United States Patent Application Publication US 2007/0161031 A1 - sequence listing, part 10

SEQ ID NO: 11751 - DNA, 2300 bp, Homo sapien
acctgaaccagcaaggatagagagggcatggctgctgcattgtcaaccaacagtattcacaacagaatgaaaaacaattcacatttactactgaataaagcagacactcctgacagacaggcagccttgatctagtgccttatacaacctctgattgcgcctcgaccccaatcccacagtcacggtttacaaggtagaagcttagtcaaaatccggcttcagcagtcagggttcttgcaggaaactgaaggtgttcttgggaggggatttggaagcgagtttgatgaaggactctttgttgcggtgtggtcatggttcaaggatccttcaaagggtgctgctatttagggaccagcaacaatggcagaccgacaacatgtctcaccctaagaggcttgggggcggggagaagttctgttcgtagagcctagaggagttgtgcaatggaaagggcacccaggaagaatcgtagccacagagtgaaaccaacactggtgggtgtggggccaggccaggaaggagaggggaagaggcccctgcctccctcctacccggtctgcagcaggttgtccctgtgggtgaagatccactgagggggaccgccagcttcctgagcacagggcaggccagagcaggacaggctgggatggaaaatgaagaatcagtgctttagccgacaacaaatgggagccgtttactgtttagtcactatgattagtgttcactagtactcatttctcttcgtctaaaaagtggccaacaccatctcttttccacaagcactcgggagaacattcatattcaattgccttcctaagacccagacggggcagcgctctccacaggccaccaaaaggtgttgcctgtttggtttcatcagtgattatctgtggcagcaagacaggaagttggaaatcaagtacctcaattaagtcaaggctgaccgtggaattagagaacaagtgtttgttaccccggccaggtcaccctagggaaaacaggcattctccgggattgaaatggtggtgtttgtgtggtaaatagttctcagtccagttcaaagccagcagcattaaggacacgccaccgccaccgggagctggagaccaggcgaagctgagctcctctgtggttcaccaacccctcaggccgcctaagtgtcttctgctgtcgcagctttggggacagaggggtttcggaaacaggggcctcttgtctgcaccctcccctcccactgacaggctggcagcccagggcagccacctgaggagcgtccctgtgtctctccatctgcagagcaggaaaagcctgcgggtcggtggcgccacgctggggcgagacccagcttcggctcaggagatctcccacccagccggactcccgctctctgcccgcggccccctcccacactcccacctcgccccgcgatctcactgccccatcgaggcttccgggcggaggagaaaagttttccggcaggaacccgggaaggaagccctgggaccctggctgaaactccgggtttccccagtgccgagtcccttccccgccgcgcccagcgcctgcgccccgggaggcggaagcaacaggggggttcctccccgcggcctctgacctctgccctctgccctctgcccccagggtctggggcccgggcggaggcgcgagggggcagggccggcgcgcgggtgcgagcgcgggtgtgggcgcggggccggcgggggctgcggccgcggggcgcatgctcacttgcgccggtgacgtgcgcgcccggagcaggggcaggagccagcggggcccggaggctccagagggcggcgggcaggggaggaggagactcgggaggagcagagcgcaggctccgccgcggccggggtgctccagccgagcccaaccgagcgggcggaccgacggggagagagaaggcgccagagcgcgcgcgcgcggccccgagcagcagccttgccgccagtggagcagctgccgacgcgcggggccgcggacccagcattcgccggccgggccgggcatgagcgcggaggggccgcggccgccccctgcaccgcccggcgcgccgaggccgtgaccggagcggggggcgcggccgcactagtaccccggagcccatgggcgcgccgagccgggcgcgggggcgctgaacggcggagcgggagcggccggaggagccatggactgcagcctcgtgcggacgctcgtgcacagatacgtgagtgctcccggcgcgggctgggggacccggggaccagacagacgcgggccggccccgcagcccggaccct

SEQ ID NO: 11752 - DNA, 2300 bp, Homo sapien
tgctgggagcagacccctcgctgggagcaggccccggctgccacaagctgctctggctgctgtggaaatcgtcagacaccacacaggctgccctggggtgcagagggccgtgccccagaagaaaggcaaagaggcatctgggaagcctcagccaccagccaagaagcacctctgacaccgtccaggctctccaggtgaggcccacctgagctcagccgccaccagcggtctgaaatcgtgtctgctgtttttcgtgccgtcccccacctgccccgccatccgctagaccctgggaggtaaggtctaggtgacagggaccctgttaccaagagagcgccccagtgagtggtcagactcaacaagcacacacactctgggcagaaggcagatacaggtgcctctcctggactggaaggggaccctgatcctgaagcccaacacgcaggtgagagaggtggcctgcagggtctagagagaaagaactgccaggaaaaacactttcccctttcctgaaggcaccgcaacgatggacatgacccttagttatttggggtcagaggtcgattcgcacagccagccagaatcgtagaccctgcctggaatctaacctgtttcacagactaagttttatttaatttgtattttggttttggctttgtagtttaatgttgtaaggatatcattataatcaacatatgtcaacaccagggttgctaagaaatttacgctgctctaagtaatgcttccatgactggaaatgattctagaatctgctctgagtgacgcttccgtgaccggaaatggttctgggagccgctctgagtgccgtttccgtgaccggaaatggttctgggagccgctctgagtgccgcttccgtgaccggaaatggttctgggagccgctctgagtgccgcttccgtgacgggaaatggttctgggagccgctctgagtgccgcttccgtgaccggaaatggttctgggagccgctctgagtgccgcttccgtgacgggaaatggttctgggagccgctctgagtgccgcttccgtgaccggaaatggttctgggagccgctctgagtgccgcttccgtgaccggaaatggttctgggagccgctctgagtgatggttccgtgaccggaaatggttctgggagccgctctgattgatgcttccctgactggaaatggttctaggagccgctctgagtgacgcttccatgattggaaatggttctgggagctgctctgagtgacggttccgtgactggaaatggttctggctaaccttggctgcagtcctgcagggaggctcttcttgtgtcaattttacatgcaagaaacggaggctctgagaggacctggagggatcccataggcagttcggggccgtcctctggcaagcgccctgtgggtgactgctacaagggacgcagacaagaagcggaaaaccggtctctgggtgtagagagactgtccaagctgggcagagttctaggatccaaggagagggtgggactgtgcaatggaaagcagaagacacgaaaacccagcgacctctgacctgtgaagcagaggcccacagacccgcccccagtccacgtgcagcctgcagcctgtctgtgtggtccatgaactgagaatgcttttacgtccttaaatggttgaaaaaaatcaaaagaaaagtaactgtttggggacacgtgaaaatgttcggaaagtacaatttcctcgtccacagtcgcatttcatcggcccacagtggtcctcctgagccatggactgacgacggcgccctggctactagggcacagctggcactgcagaggccacgatgcccaggtccgcgccatccagccctcggcaggagctctgcgcccaccgcggagcaggtcaggcacacgcgctcgggaggggcaagtgcagggtgtctaggagggctggggaagccctgcagtggggccgggccagcattcccggagctccatggacaggtggtcgattgtggatcgtggagaggcctcctgagcaggcttgtggggtggagccctgccccccgcccgcatttgtgacacgcccctgggtggccaggtgccctgcagtgtgagacattccagccaatgagacccacaggctttggaggcgatgggtccacctgtgagtggagtacagaacgtgggggaacagcttcccaggagtctggggctcaacctctccaggaggccctgaaggtggcctgagaaagttctgcctctcgggggggcagcgtggagcacaggagccgcagtgagtcctgcctg

SEQ ID NO: 11753 - DNA, 2300 bp, Homo sapien
gctgagtcctaataaaagaaattgcaggtgaattaccgatggaatttattaaagcaaatgtgcagacattcacacagctcctgtccgggacgttctgggtgggacagtgtggaaagacttcctctgagaggttggtaggggagcagaggagctgatgacatcaagtccaaaaacagccccatgaggtttataaacaagagcaccacgcagacagggactccagactgttcagaccctgcctgccttttttggctttaaaaaacgagagttccctgaagcaccgaggggcagcccacacagagaggacttggccctgagcatttacaagtgtctgtgctgggccgggcccctggccttgttctgttcccgttgcctcatttcatgctccaggaccctgagaaagtgctggtgtccccctcatgggtgagaagctcagcgggaaactgtccccgtgcctgcggcgaggagtggcccagcagccaagggtcagcccttcgacggcagtgcccgctcgtccttcccgtcccactgcaccagcattcccctcatggaggaggcttccgtctcctcttcagctgtgtttctcatgccccagaaaggctgatgtcttgcagttcctacagagaactggggcgtgggacgagagccacacgctaaggccccgtattccgaggtgggctcagggccatggccagggctgcgtattcagatgtggcgtttggatttcccgttacgagctaaagtatttttgtggttttagtgctgacatcaaatggcccgcctgagtgttgttgaaatatttcttgtcagagctgtttccttaactcctccaaatacagtgttccgagtaatacagagatggtcaggcccaagtcagctttgcaggagagccttcctgttcctgagcagacacctagcagggttgagcgactcttacccatctgcagatgcagggccggtgaccccacagtggggcaagagcctggagagctcttggctttgcccaggaaggaattcaagggcaagcaggaggcggaagaaacagcttcattgaagaggctacagctccctgactgcccctgcagagcggggctgccctgttaggcggagaggagtagctcagggcagatttaattgcatgcagattaaggggtggtttatgcagaaatttctaggagaaggatgtaacttgtaggcgatcgggtcattgccatggaaaggggccgcagctcctggctgttgccatggcaatggtaaactgatattcacaccgcgggcatgtcttatggaaagctgcctctgccccagccctgttttcaccagtcctcaatctggtccggtgtccaagccccacctctggagtcaagtcccgccttctaccccagtatcatagtttttctttcctcttccattaaagacctttcccaacatcactgtctcttctgttttggaagccttacgatttggccacacgttctgttctttttttttttttttgagacagagtctcgctctgtcccccaggctggagtgcagtggtgctatctcggtcactgcaagctccacctcccgggttcacgccattctcctgcctcagcctcctgagtagctgggactacaggcgcccaccaccacacccggctaattttttgtattttttagtagagacggggtttcaccgtgttagccaggatggtctccatctcctgacctcgtgatccgcccatctcggcctcccaaagtgctgggattacaggcgtgagccgccgcgcccggccgcgttctgttcttatgtacacgccctgagctgtttccactggcagtcagctttgaagttcactgtgtggctctcacaggagcgcagaccctcctggtgctcaccagaagaccttggcccatgagggctgcgtaagacagggtggctcgggcctggggtgctgggccccaggtctccctgcagccctgaacgatgctctcagcagcaggtacaggtctccgttccgacgaacgtgcctcaaggcaacactctgggcaagagcttttgatgcaggttctgaggcagctgcctaacaccgctctcctttccgcagtgtgcaggagaagagaattgggtggacagcaggaccatctacgtgggacacagggagccacctccgggcgcagaggcctacatcccacagagatacccagacaacaggatcgtctcgtccaaggtaacttggcttgggtctgagtgtccataatgtgtctaaaaagcagctgccggggggtgttagtgcttctcggtttcaaagagcggc

SEQ ID NO: 11754 - DNA, 2300 bp, Homo sapien
tcactgtaggtgattaaggacgatgataaaaaggcaaacttctgagttggttgtacatctttaataaatctaaagaaaatgggaataaatctaagaaaatgggagaagatatactgttctagacatgtgtctgaaaggaatcctgcaaattctgtcttattgaacaggcatctttaataaatctaaagaaaatgggaataaatctaagaaaatgggagaagatatactgttctagacatgtgtctgaaaggaatcctgcaaattctgtcttattgaacaggcataaggtgtcacgtcaggcgtaaggtgtcacagcaggcgtaaggcgtcacgtcaggcgtaaggtgtcacagcaggcgtaaggcatcacgtcaggcgtaaggcgtcacgtcaggcgtaaggtgtcacaagctcggtgaacgtcaggggtgtgccttgtgttctctgttcgttgctttcagaagcagcagcatgtggcagcatctctgtgcctatgacgatattgcagtgaatatgagagagaaaatatctgagcaaaagttagccaaggacatgagtgggtagtgaaatgctggttgtgatgaacatgccacatttgtggccagagcacaaacttgatgtttactggccgtgcacatcttatcccatgaagacaacgtccagggatggccaccccagagcctgggggaggtgccgggccctgattctcgaggacacacgctgtgcacctttctcctcaccagggacgtcgccaagaatgccctgctgcgctggcgcgtgttcatctactggacgctcctgggactgtttgacgcactggtgttcttctttggtgcttatttcgtgtttgaaaatacaactgtgacaagcaacgggcaggtcagtacagagctcgattgcgctgacttagctgcttaggaataaagcctcccaagcccatatgatgattttgccaaagcagaattcagtgcagcccatgcagcttcccagcggggtccatcaccacctgcgcagtaattcagtgcaggccacgcagcttcccagcggggtccatcaccacatgtgccgtaattcagtgcagcccgtgcagcttcccagcagggtccatcaccacctgcgcagtaattcagtgcagcccatgcagtttcccagcggggtccatcaccacgtgcacagtaattcagtgcagcccatgcagcttcccagcggggtccatcaccacctgcgcagtaattcagtgcaggccacgcagcttcccagcgggatccatcaccacgtgcacagtaattgagtgcagcccatgcagcttcccagcggggtccatcaccacctgtgcagtagttcagtgcggcccatgcagcttcccagcagggtccatcaccacctgcacagtaattcagcgtagcacatgcagtttcccagcggggtccatcaccacctgcacagtaattcagtgcagcccatgcagcttcccagcggggtccatcaccacctgcacagtaattcagtgcagcccatgcagcttcccagcggggtccatcaccacctgcgcagtaattcagtgcaaaccatgcagcttcccagcggggtccatcaccacctgcgcagtaattcagtgcagcccatgcagcttcccagcggggtccatcaccacctgcgcagtaattcagtgcggcccatgcagcttcccagcggggtccatcaccacctgcgcagtaattcagtgcaggccctgcagcttcccagcggggtccatcaccacctgcgcagtaattcagtgcagcccatgcagcttcccagcggggtccatcaccacgtgcgcaataattcagcatagcacgtgcagcttcccagcgggatccatcaccacatgggcagtaattcagtgcggcccatgcagcttctcagcggggtccatcaccacctgcacagtaattcagtgcagcccatgcagcttcccagcgggatccatcaccacctgcgcagtaattcagtgcaggcctgcgcagcttcccagcggggtccatcaccacctgcgcagtaattcagtgcagcccatgcagcttctcagcagggtccatcaccacctgcacagtaattcagtgcaggccatgcagcttctcagcggggtccatcaccacctgcgcagtaattcagtgcggcccatgcagcttcccagcggggtccatcaccacctgcgcagtaattcagtgcagcacgtgcagcttcccagcggggtccatcaccacctgcgcagtaattcagtgcggcccatgcagcttcccagcggggtccatcac

SEQ ID NO: 11755 - DNA, 2300 bp, Homo sapien
tgggggcgtcctgccgtgctctggggagttgctgcatcttcttttacgggataataagaaaatatagtgcttatatctttggggtttgaagtgttggcacacaagaaaaatgaggtgtattttctaaaactcttgattgtgaaagagaaaaaaaaatacataaaaacgagatgacttggactattttccccaaacagatatttggaaactggacgtttggaacgctggtattcaccgtgatggtgttcacagttacactaaaggtaagtggtctcgcgctcacgttcctcccccagccacagtgaacccctgcagtgtaggcctcacgcgctctgagctctctgaattataactctgtactgaggctggaagccactctccacccagccttggctggctcctggggcacccctgggcatccttgtcctgctgtttagacaagtaatgcacagccactcagcacacccggccaccccatgtgcaaaccccagagctacaccggaggtaacctcgggagcaagctgcttctttgtgaaagaattcaggctagaattgttttcagtggcaagtagccctccccccagcgccatcaaaatacactttaattgaaacaaattaatgtattttgaaaaatttcactctttaaagttcagtgaaattatatacagaatatatcattatgaaatctcaaaacctatcagactgagtcttaaaaagtgataccaaaacattcctaaggtgattttcttagatagtgatgtaaacaacacctgactctaaagtaactttctggccaggcatagtggctcacacctgtagttccaacactttgggaggccaaggtggatggatcacctgaggtcagcagttcgagaccagcctggccaacatggcaaaaccccatctttactaaaaacacaaaaagtagccgggcatggtggcacgcgcctgtaatcccagctacttgggaggctgaggcacgagaatcgcttgaacccgggaggtggaggttgcagtgagccaagatcgcaccactgcactccagcctgggcgacagagcgagactgtctcaaaaaaattttaagaagtaactttcttcagtagagacataaagaacaccttaatctgaatgactttcttcggtgacgatataaacaacaccttggtctgtggcccgcatgctgccatctgggaaatacatccatggctcccttacctaggacccagggctgtggcgtccccacattcttcctctccactcacactgtgaggtgtggctttgtcttcctgagcagtgtgaggtgtggctttgtcttcctgagcagtgtgagctgtggctttgtctcccgaacggtgtgaggtgtggctttgtcttcctgagcggtgtgaggtgtggctttgtcttcctgagcggtgtgaggtgtggctttgtcttcctgagcggtgtgaggtgtggctttgtcttcctgagcggtgtgaggtgtggctttgtcttctggagcggtgtgaggtgtggctttgtcttcctgagtggtgtgaggtgtggctttgtctccttaatggtgtgaggtgtggctttgtcttcctgaacggtgtgaggtgtggctttgtcttcctgagtggtgtgaggtgtggctttgtcttcctgagcggtgtgaggtgtggctttgtcttcctgagtggtgtgaggtgtggctttgtctccttaatggtgtgaggtgtggctttgtcttcctgagcggtgtgaggtgtggctttgtcttcctgaacagtgtgaggtgtggctttgtcttcctgagcggtgtgaggtgtggctttgtcttcctgagcggtgtgaggtgtggctttgtcttcctgagcggtgtgaggtgtggctttgtcttcctgagccgtgttttgcaggcattgagtcgtcattgctgggtcttgcgtttggtttagtttctcgtcaccccccggctctctgtcctgcccatcacgatcattctcactgctcagatgacaccgttaactgcccttttttttttccttttagcttgcattggacacacactactggacttggatcaaccattttgtcatctgggggtcgctgctgttctacgttgtcttttcgcttctctggggaggagtgatctggtaaatatctgataagtagctgataatctgataaatatcatgtggttgttatttttttatcaagggttgaagacacattttccgtgcggccctgttggttggggcaagtgtttgttgaatggctgctgtgtgctgggtgtcgtggggtcctgggatacagt

SEQ ID NO: 11756 - DNA, 2300 bp, Homo sapien
cacgatcagccagctcatgtttgaaattctctgaggagaatttggaagagaaaaaggacaaaacagcattttgcttttgtttttttaaccagggacatttttcttcctactttttaatcattgaaattagatttaagcaatcagaaaataagcctttagacctgcgccaggttgtcctcaggtctgtgcccctcccggacctttctgcagagatgaagcaggtgcccggacaaggtggtgagcacagctgggtcccagtgccagccactgagggtgggcatgagatgcgcaggcagcctcgtggcaggctctgcaagtcagctggagaacacgccacacgtaaacaaaagacatgtatgaaaaaccacacaggagccaggacgtgtaacaagttctgaacagtagcagcaaagggatgagttgaacactgaggggtgagtgtttgtggggtggtctcgaaggcctgtgccctgatgaacaccaaggggtgagtgtgtttgtggggtgggagtcaaggctgtggagcttgtgtgttgggggaagaggggcgggtggagaagcacagcctctgctgtgaggggcatgggtgtggccctggtgtccccagagtgtttgggacctggactgtgggttggcgatgggtatcaccctgtcctgggcaggcttcgtccttcagggctccatgtggtggggcagtggttctcgggacgggcctgctctccagggccgggcattggtgtttgcaaagctccctggggactgacagcagtggccctgagagcgcctgtggggtggtctgggcacctgcaggtctgacctgagggatgggatggggtttagctgaagacaatgaaagggggagatgtcccagcaggggcctctgagcagggatttcaggttggagggaggcaggcggccccttcccaggggaataccagggcaggagggatttccccagggagctgaggcccaggcagcagcagaactgggcgacaggatgcagtgtgaacagtggcgtggaaagcgacatccctggtggagccaccgataccgtttattttttattttattttttttgagacggagtttcactgttgtgcctaggctggagtgcggtggtgcaatctcagctcactgcaacctccgcctcctgggttcaagtgattctcgtccctcagcctcgtgagtaactgggattacaggtgccggccaccacgcctggctaatttttgtatttttagtagagacggggtttcggcatgttggccaggctggtcttgaaatcctgacctgaggtgattcgccggcgtcggcctcccaaagtgctgggattacaggcgtgagccacaatacggtttatttaagtaaactgttgctgtctttattcctagggaaggggtcctgcgggtgggacgccaacagtgggaagtagcagtgagccataaatgtgctgaaagacagcacggaaaggcaccacaggtcaccgcctgggaggggaagggctgccggcaagtgactctgaggcttcggttggaaatgcagctactagttttctctttacatttaagattcttcccaaaaacttcgtgtaagtttctttgccaaattttcagtgaggaattatgctttaaagtttctggaactcggaggacattctctacttaggggatttagaaatgtttttaggtaatctgaataagcaatcagcactgattttgaaagtttgccagttcggcgaattagatactgaaacctggagaactagggacgtctatgtctttgaaacaggagtctgaatgtcgaggggaaaacctcggttgttgttgtttttcttttcttcagcagcagaagttgataatatgttttgctcctgcgaccctttattctgtgtcagagttatagaagaaggttccttgtgtaagtgaaccctgatacagtggaaattgaccggagaagaatgaatttagtttcaaacatactatcttcactgcagaataaataccacgaaggttgtaactagttatttcggttttgttcagagcaacagttcttaagtctttctgcagcatgacctcatcgtgcttttaaaatcttttttctgcagcctcatgtttgactgttggagatttatcctgtgcaagagacctggaagcaacagttattcttccccacaacggcccaatgaggccaaaaaggaggaaacggatcaccaaattgatgtgtctgacgtcatcaggcttgttcaagacacaccggaggcgacggccatggccacaggtaggcgcctggtgctgcggcct

SEQ ID NO: 11757 - DNA, 2300 bp, Homo sapien
tttttctctcaagccccttgatagattgggtgaggcccacccacgttatgtcacacaccttactcaaagtctactgatataagtgtcaatctcatctaaacataccttcacagagacatctaacctagcatttgacccaatatctgggcacggtggcccagccaagttgacaagtaataaagccaatgaccacagagaccaagggtctccaccctggtgccccaacatgacatggtgccagccagaggatattggccaggggacagagtggatggcacagggttgaggaaagaagccaatagcatgtgtggagatgcccaaggggtgaagagggagatcggagaagcgggacaggccagagggtgtggccctttcctttcatcttgcttttaagatgcaacagatttcagcagtgtttctcaaagtgtggaccagcacattcaacatcccaggaaattttgctagaaatgcacatcctcgggccccatcccagacctcctggatcagcaaggagccatcagagcccagctgtgtgagcttaacaagtcctcggtagatcctgacgcagcccaaggctgggcaggctggagggcacctgcatgccaggagagcggccgggagaagagggcaggtgctcagagggagtgtggcctagggccgtgtgggctgaggaccagggagggtgttgtgccttagactagtggaaagggcagggcctgcatttcaggacccttctgcctgatgacaggctttccctgaagctggaggggcagggttggggtgggggggcggtgggggatggggagtggtgaaggttccctgaactgacagggaatgagaggagcagacccatttgagggcactttttgcagaccatgtgtagacaggaggtagcaattgtgccgccgtaggcaccctgggcagcccagggaacgcttgtccacagagggagaggctcccatccactctgaggcctttccagagttctcctttcactggtctccaaagagattctgtagaaccaagtgaaactgctgatactcaatacgtttctcatgttaaacaaaaacaaaaacaaagcagccatttcttacagatttattcaatactttctatctggttattatgcctcttattctgtaattattttttattatgaattatttatttccagatctgtctggcctataaggcctgtaggcactataagggggagtactgcgtcaccttcatctttttatccctttggccttgctccgtgcctgaaagctcaccacactggaacgtccaggtgcacatgtgccactggacaccgggatgttgccggatgctcttttggacgctggaatgctggtgcattgttgccggatgctggaatggtgcacgcacgctctgttggacgctggaatgctggtgcattgttgccggatgctggaatggtgcacgcatgccctgttggactctggaatgctggtgcattgttgccaaatgccggaatggtacacggatgctctgttggacgctggaatgctggtgcattgttgccggatgctggaatggtgcacgcatgctctgttggacgctggaatgctggcgcatgtgcacatgttattggcatgagctgtagttcaaacctcagccatatgatgcttgaattcccaaaccattcgtggaaatgtgtacttcttcctgctggaattctctctctctctctctctcttttaactgattggggagtgaggtgggggggggggtcttgctacattgcccaggctcaaacttctgggctcaaatgatcctcctgcttctgcctcagcttctgcctcggcctccggagtagctgggactacaggcctgaaatactgtttctttaaggaagggcatgttacctataataccaaaccacaaaaggatagctgcggttttgggcgaggagagctcagagagtttcttgcatatggccctgtgatggcggccatggccctgcatagacacgagctggaatctgcaggtggcagccaggacgctgcgtgtgtcgagtgcacagtgtggcttggtgccaaccatggcgagggtggagagccccgtgcctgcagcgcgcgcttccctcactgggtcctgcgtccttgggcaggcgatgcccctgcggggaggggctggtccatccccggccagccacggacccacgcatggacccagcgacccacggacctgcttacctgggcgcggcgcgggtggcatgcggccacacggaaggggcgcgctgggctgctgcggcctctgcagcttctacacctgcc

SEQ ID NO: 11758 - DNA, 2300 bp, Homo sapien
aaacctggggaatgacatcagcctctggagcggttcccactctgtgactctgacaccgaacggcacgcagaggcatgcagagcaaggggggctttctcctccacccccacagccgatcggaagcctccctgtgaacctggcatccacgcagcccttcaccatactcaaaccctgcaaaccctgcacggaaaagctccactcaagcttcagaaaaagagctgattctctaagaatcagggagcagacggcatgaaaatggttttgttttctttcgacccacatacaataaacccagcagctttgatcataaaagcccccattaaaaacatcttgattagaccatcccatacgatggtgcttatgctgatttaatcactggttcactctcagaatccatcggggtgggcagagaaagagaaccacacccaaaccaagcaactgacattttaatctcccaggcaagtactagttagacaactagtaatggcatatatgacataacatatggcaacatcaggcaaaacacttggcaacttacttttaatgatatatcattatttcctcttcatttcaaggaaaacgagttaaggatgcctctcccttctgcataacacagcctgagaactcagatgcgaccgcctgaaagccacggccagatgcaagctgtcagcccagtctctgcttacacctaaaagaatcgatctgaactactcttcaaagcttatttgaagtaatatttcgattaatactgaaaatgaacgtccagtccactctttacccataccgtctcaaacatctgtcttaggtttaaattgcatttaatgaagaaaagaaccacctgattagtccaggttttttcatcctcaaaacgagcttccaggtagcttcaccatccctacccctggctctgaaaccccaagctctgaaagcccttggctcagatcattctccattcgcaatgcattctccattgcgagggctgcggacaggcaggttgatgggcagacttcagacacacaaatggctccgcatgcagacccagcaaccctgagagagccagtgtcaccaacgtgcagtcattttgactatcccgggcagcatacgatcgccgacagcctctgaaaacacaccagctgccaaccagtgccccccatgtcacagctaccacggctagaaaggaacacgagggcggcttacaaaaatcagacgcatttccccacatttcagcccatgatgtcaagcttaagcacagatcactgacggccagcagctcctcctacccgtgtgcttggaaaccgcatttaatctctgcaccatttcttccaaggccatctcttcagtcctcagccaaaacctcatcctccgacacaacaaaaatgatcctggcagatccgcttcctccgcacggggggcgcctgcgggtggggccgtgcgagtgcggagggggcgcggcggaggcggggagggggccacggcagcgctttcagcctccagccgccgcctccctgcccaggattggttccgcgccaccgggaggggggcgcgcgctgcgccgcggggggcggggggcggctcggcggaagcggaagcggcgcgcgcccgccccggtgtgtcaccaccgcgggtcacctgggagtcctgtgagtgcaccgccggggtcacctgggagccccgcgtgtcaccgccgcggtcgtcggggagccccggggctcaccaacgaggtcacctgggagccccgcgggtcaccgccgcggtcacctggaagtgtcacctgtgtcactaggtcacctagtgtatcacacaggtcacctagaaattcgtgtcaccgccaaggtcacctagaaattcgtgtcaccgccgaggtcccctgggagccccgcgggtgccgcacaagtgcccccgcccttccccccggttccgggtctccacgccctcctggtttgcgggcagccgcgaagccgcgagtggaccgagcgagtgcagctgcctccgcggggccgcgcctggccgccgcctccctttacctccggccgccccgtggcaggtgtagaagctgcagaggccgcagcagcccagcgcgccccttccgtgtggccgcatgccacccgcgccgcgcccaggtaagcaggtccgtgggtcgctgggtccatgcgtgggtccgtggctggccggggatggaccagcccctccccgcaggggcatcgcctgcccaaggacgcaggacccagtgagggaagcgcgcgctgcaggcacggggctctccaccctcgccatggttggcaccaagccacactgtgcac

SEQ ID NO: 11759 - DNA, 2300 bp, Homo sapien
atggttttaattagtaacatctttaaaactatttagatgtttaggacattgaatgatgaacgtctgtgcacatccaatctgcgcagctggaagtggccctgctgttccgatttccttgacttcctcagcaccttaccacgcacaagggaaggaaaggcagagagagaggtttggtgttgaccccagaggcgaccctgatggctcccgtgcgcaccgctcactgcttccgtgaatacaaagcctgtctgcgtctgtccttgtggatgaaaccaacatttagggcttgatttcctggttattcaaagaggcccttggaggctcaccttaggtcaggagttggagaccagcctggccaacatggtgaaacctggtctctactaaaaatacaaaaattagccgggtgtggtggcgggggtctgtaatcccagctacttgggaggctgaggcaggagaattgcctgaacccaggaggtggaggttgcagtgagctgggatcatgccactgcattccaatctgggggatagagcaagactctgtctccaaacaaacaaacaaacaaaaccaaagaggcctgagctctggaaacaccacgcgaaatgcgccatctgtttccccattttcatgtgagtcaggttagggctgacctgtcctgggcttgcacacaagcccccaacaaaacggggttcgtggtctctgctcctgggtggctgagacatcgatcccatcaccctgctttcctctgtagctgttttgggggatgcagcacagacagcaagcgtccagctgcttcaggggacggcagccttgggaccaccttgttgcgtctggcaggtgggtgtggaaggcaggagggggatggtatgtggagctctgtctttcctggcagaagctggctctcaacacctgtagctctcagaggagcaaacccagcacagaacactttgaacagaatcactgtatttgtggaggctaataggacaccaaggcgccacctctcaggctgtggaagcagccttttcctcttgatgtccccgatgccagtgggaggacatggtaggcagggaccctccatacgttctgggagcgcctgtgcagggtggcaggacgggtgtgcactcagtaaacaatgttgaataaatgccttcttttgctgcaaaccagatgcgtgttctaatcacatcagctcacagaagggcacatgtggtgctccagacagcatgtgggctttcacaagcaggcctgagcgccagccctgccaccttctcttcctgtggcctggagcacataacaatgagttaaaatggcactaggccatttgcacggccttgcacatcagctgtgaggcctggagccctgtgtgtgcccagcacggtgcccagggactctgagagcctgagggtggcacgtcacctcgggggccattgggagccctggatgctgtcacctctcacccctcggaagcagccatggggcagagggtgggagctgctggcttgggacgggctcaacacctcttggggaaaagcatctccggccacgcaaagcaacctcatcacttcctccctcgaggagctcggcagcagacgggagccacaggcgtggaacttcccactttgtttcaggacagccagcagcacgtccctcccttcctctgggtttgtagttgtttgtttgaacttgagacttcctgaggcctggaaggtgtttttggcttgctccataaggcaaggaggtccagcccacgcaagcccccgccctgttcgaggaaggaaaggcccagaacttgcacacagcaggcaggcccagcggctgggtttctctagcacctcggcattgtctgcctgctcttccaggcgtgcagggcagtggtggctcgggccaggctctgggaggccgggcactctgaggaggtggctcagccctcttgggttctttcttgtgagttggcgaagcccagagtcaccagggtcctgagcacctgtctcttgtgaccatgcggcacccgcccggcttttagctgtcgcagcagagacccgaaggctgtggctctagcatcagggggtcgcctgtggtccctgcgtgaagaaccagagctgcctccgctttgtagcagcctttgtgacagggcggttcgatggccgagaagggagcatcccggggaaccctgcggcggctgtggtcactgcccaggaggcgccggggaactgcagggcgctcgaggccaggtgagatacaatggggtcgcagggcatgggggcaggtgctgtgtcccctctgcaggtgtcctctctgcgggcag

SEQ ID NO: 11760 - DNA, 2300 bp, Homo sapien
ggagagggggtgtttggtacatgtgtcccaagcctgaggcctctgggcgtgctttgctgttgggggttggaagctggaggtgaggacacgttggactgtgctcagctgtgaggggacccaccgtgtggcaccgtgatctgctcctgtgcccctgccgcctgataatgtaggagttgtgcctgcaaaacatgcttcggacattagagtcggctgggaatgaagatgcctgcaggccccagagcacaggcagggctgaagtgcgggcggcgagtgggctgggaatgaagacaccggagggccccagagtggaggcagggctgaggcacaggtggcgagtgggccgggaatgaagacgccggcaggccccagagtggaggcagggctgaggtgcaggtggcaggtgcatcggctggtgccgtggtgacggcgtgaggggccatgatgccgtggcctcccccggggctcgtgttccagggatagctcatctgggatgcgttctgacggtagaagataggaacacagagatcccagacacaggaggtctgggtcaatgtgcacagcccaaacctgctgtggctcagggggcagctcacaccgtgggtaccagccagccctaggtccaaacttacagggaaggatggctgggctggggaggacaaataattatggatggacatcacagcccctcggtggtcgtgagtgggtgcagaggggcttgcagaagcgacattcctgccccagggatgaggctgcctctcagaggacccaggcgtggaggaagcagtggcccctcttaggcatccctcccctaagtgtgtgcagcgtggagatgagagtcttggcccaggaggaagagtgagcttccagacttagctttggtgcttgtcagcgcaatcatggctgcaagaaaagcctccatggctgatgttcccagaggcagggcctggcgaggccacgctttcctctccagcaagcgtttggacctgagggagccgaggtttccagaggcaggagccaggtgtctggcatttggggtcagccacccccagaagccggtgttcccagcgggagaagctgaagcctggagggctggctgtgctgtgctgggcacacgcagggcaggagtcagtgcacatgtaaggctctgcggagaaaggcgccggaagaggccggggccagcagggacatagcaggccggggtcccacccaaacccagcacccctcccaggccttctcggctggggctgactccagcagtgggtgtgatattctcaggagatgtgcgttgactccagcactgggtgtgatattctcaggagatgtgcgttggtccccttagctccttgggattttcggctcaaactctgggcctggacaaatggtctcaggtaacttgggagctcgtcagggacagaacctgagtttgaacgagctctctgtgggactcccacccagggcagcggttaggagccccctcctggactgccagttttcaagtgacgtatttaagtatccccctcccggtcctggaaaagtagagaggcagccgggagcctgccttctgtgttctcggtgcaggggtattctgagaacggcccctgctcacacgggtttaaaaggaactcagtgaccacagacggatgagaacagcggacgcagctgcctcccaggcactcaaaggctcaactccccacaggcgtgtgttgccaggggcagaaggcttggcccctgggtcagcatactctccggacagctcatccctgccagcccaggtccctgcagccctggggctagcacaggggatgcggacctcggcctaggtccccacagctgtggggctggctcgggggacggatctctgctaagcatggcccctgccagctcaggtccctgccactcagtggatgggactttggcggagtgtggggcccctgcagggagggtctagacaagcaacaccaggaacctgaagcctccctggccggggctcagctgtcgccaggatcgcaacagttaagctgcctgcagcaggataagtgagccgatgctgctccttaatcagggacatcgaatcggaggccctgggaggagcagccggctggctgccctgcagaggccaggtctgcccagcaaacccaggaaggtgtggcgtccccgcttcgcggccaagatggtgctggtgctgcgccatcctttgtgtgcccgggaagggcgttccgggagccgggtcgggggctcctgactcgcactgggcagcatgacggtgcgccggctgtcactgctgtgccgggacctctggg

SEQ ID NO: 11761 - DNA, 2300 bp, Homo sapien
gaggtcaggagatcgagatcatcctggctaacatggtgaaaccctgtctctactaaaaatacaaaaaattagcagggtgtggtggtgggcacctgtagtcccagctactcgggaggctgaggcaggagaatggcctgaacccggaaggcggagcttgcagtgagctgatatcgcgccactgcactccagcctgggtgacagagcgagcctccatctcaaaaaaaaaaaaaaaaagaaagaaattaaagtagcatgaataaatggaagaatattttagttcacagattagaagacaattagtattataacaatgttaattctctctaaataaacatatagatcgaatgcagttcccaaataaaattccagcaggtttttctttatttaggtgtgaacattggcaggctgcctttacattttatatgaaaatgcaaggggtgaggaatagtcacccaactttgaagaaaaaagttgaaagctgatactgccaaatattaagacattattaaagtgacagtgattaacacagatggtgtaaacagaagagcagcagcacagaatattgaatccagacagaccacacatctgcagtctcttgatttatttattgatttatttatttatttttgaggcggagtctcgctgtgtcacccaggctggagtgcaatggtgctatctcggctcactgcaagcgccgcctcccgggttcacgccattctcctgccttagcctcccgcatagctgggactacaggcgcccgccaccacgccctgctgattttttttgtatttttagtagagacggggtttcaccgtgttagcctggatggtctcgatctcctgacctcatgatccgccctcctcagcctcccaaagtgctaggattataggcgtgagccaccgcgcccggccattgcagtctcttgatttatttcttaagtgatactgtagcacagagggggatggacgtcctcagtaagaggagtggatgtgattggctgtctgtgtgggaaattatgaatgctgatacctgcctcacaccatatacaaaagttaattccaaatagatcacaggtgtaaatgtgaactctaaagtaatatagtctctattctcgacaaacataggaaaatgcctatttcagagtaagaaaagatttcttacgcaaggtttaaaaagcagttatcaaaaaagcaattatcagaaaggaaaaggtcagtaaattgggctacattaaagttaagttactcttttcatcaaaatgaaccatgaagagatcgacacggaaagccacagtgtggaagcagatgtttgcaatatgcacatccaataagaaacttgtttctagcctatacagagaactacacaccaacaagttaaaggagaatctagtagaaaaacaaccaaaagatgtgaacaggcatatcataaaagaggatagccactagacacagaaggcttcctgcctctgggaaatgccaattaaagccatatcaggacgccactctgtatccacaagagtggctaaaattctactgacagacagtatccagtgctgacaaaaccatggagcaaccagaagtcacgtgcatttctggcaggtgtacatttgtccacatctacataattacagcaattcctaagaatatgtccaacaggagtgtgtattgtgtgcactagaagacatgtataagaagctcattgtcttatgttcagtttagccccaaactggaaacaacccaaatgtccattaagagtagaatttattaataaatcatatttcatcatatatgtataccataacccagcaacaagaatgaacagacaccctactgcaacaacatgggtgaatcccacaatgttgaaagaagccagacagcaaaaaagcacatattgtatatttttatttggacaaaattcaacggcaggcaaaactaatgtatggtgacaagagtcgggatggggcaccctggacggtgggaacggcctctcagtctgggcactcgctgccgtcactcacactctgtgcttctgcatgatgtgcattataattggacaaagtattcacataaagaatggtgtcctccaaggaaaagaacttaggtgccacctactctatcccagatgggccaaggtaaccgagtcgcactgtgcagggagggccttcctgtgtgtgtgtgtgtgtgtgtgtgtttcttttcctgaggacacagccaccctgctgtgcagggacccttctcccagactcctcttctcatcttgggtgcaggttgacgtttgagaagcaaagacaccaagggtcc

SEQ ID NO: 11762 - DNA, 2300 bp, Homo sapien
tccagtggcatcgggcgcctttttcgtggctgcagcgtcagcctgcactgccgggtgtgaggcagacgcgcacttaacggcgtgagaagccagatgtgggaggcaccgggcactgtgggcagtgaggcaggagcttggccgcgtgtggggcagaagctccatggctagaatgggatgtgtttgggtcacgggtctgggggagggtgcgttctggctataactggatgtgtttgggccacagaggtctggggggtgcattctgcatccagcagctctcacatggcagtcgtggtccccgttgctggtctgggctgttgtggagtagcgggggcatttgtgggcgaacccagaggctgaaattccaccccaatcagagctctattccagggaaaaggggagaaattgagtcaggctttgttgttctgcaaaacagtgacgccgctcaggcagcgctgcgggttacagcatactcagtggcttcatttcactctcacggtaaccgctgggggtggattctacgattgtcctcatttttacagaaaaggaagcagagatggttcacagccaagtcacctgtccagggtgatgcctttgcggggcccaccagagcccgccagtgtcgcagaggcggtgagcccctcccgcccaacacacagccccttggcaggggctcttgagcaaacctgcaggtgggcagcttggggcgtttctcagctagcatcacccctgcttcaggacttgaaagcatttgactgggttcgctggcctgaggattacgtgctcggtggaaattagtcattctgggctcttctctccttcactctaggaggactgggacccagagagctccgggatcagctccctggcttggagtccaaaggcagctctgaccacgccgcctggggcaagagggagggcagctgggttccatctccgtggcctggcacatccaaggtccctttgtggaaaaggcacgtgtagcacctgttactggaggataacctgtaactttgtgcctctcccaagggagcacacaggtctacacgggaagtaagattccctgtacccactgtgtctcacagttcagaaaaagtcgtcaaagtgctcagactcaagaagtaaataaggaaatatgaaaacatgactttatttctttctttttttgagacagtctcgctctgttgcccaggctggagtgcagtggcaccatcacagctcactgcaacctcaaactcctgggccaagcaatcttcccacctcagactccccagtagctgggaccacaggcatgcgccaccacactcagctaatctttgtatttttcatagagacagggtctcatcatgttacccaggctgatctcgaactcctgggctccagtaatccacccaccttagcctcccaaagtgctgggattgcaggcgtgaaccaccacgcccagctgaaaatataactttaaaaaaaatcttagctccgtaagaactaagccagatcagaaaacgaattctgtctgtggcccccacagctgtgaaatggagtcgctgactcgccatgctcgtgcacgtgcttagtgcccactgcagaaggctgctttgaatgaaagctagtgtttattcgtgtactcacccagaaggtttctgctgttattgaatcaaattaccctacatgtgaggcatttttcacggccagatgcagacagggacacagacgcagcagcacccaccacacatgaacgttcgggggtcactgcctcgtcttcatgtcttgggagttgctgtttctgtctttaaatccgagcgtcagaaggatctgagacacccgatataaatccctggcttgttaatgatgctcacagagagcggccacgcccatagactgcataatttatctccatcctgcagaattctgattttcatgtaaacctaggacatgttcagagacttggaagttagcgattctagcccctgccttaggcatgcccgtgtggttgtttctgctttggattggctggtggtagcagctgctggcatcacgcaattggcttggctgcagagtgagcccacggaagagggctctccgcaccgactctgtgactcaggcttctactaccaggctcatccgaggacggaggctgtcgttatacaacgcgcaagtgtggtctctgtcacagatgtggctgtcgcagagagtgctgcctcctctcccgtttccagcagatgcttgggaaccttcagaagtcttggggattttctcccagcaccgtagccatgccaccacgagtgaatccttaacgtggacca

SEQ ID NO: 11763 - DNA, 2300 bp, Homo sapien
cagaaagcgctttaccctgcagggttttgctaacctcaaaggtcagaaaggtaaaagtagtgcctgccccaaacccaccctcaccgtggtggcgtctgtcatgcatcgtgtgtgaccattcgtgcctccttcgtcacaagggcggccacgcaaaagcgtttctttccacccaatcacgtgttccctgatgctgtgtctcgcgcacagacaccagagttatttagaggtggctttccttcgggaaaatgaaggcgagcttttcaaatggaggcttgctcagaaacggagctgtccttggctttccaggccccctccttcctctccctgccccccacccccgccttctcccgccttctcaggtgagttccctgcagggtgctgaccttgctggctgcgtgtctctgctccgcctggtggcagaggccgctcagccatcttctggggcatccactagtgaacagggctgatgggacccttgagacggagacgtctaatgccctgctcacctgcgagagctccatgatgggaaatacatggcggggaaatgggcccaggaggccctggaagccggccctggcgtgcaggcggctcttctgggaagccctgaaggccagcgtggacaagggctctttccagagaagtaggagtgttttccaatttataaaatgcttttaagttggcctgagacttgaaacaaacaaacaaacaacagattctggtgctgcaaactctgctagcgcagaactaagaaaacgtccctagagacgggccccgaaaggacgcctctgagtgccgcagcccccactcccatgccctcccggcccctccttcactgcgcggcccctcggctccctgtgttttgctcacagaagctcctttttcatcggtggaaaggggccacaacgtcggtgtccccttccagcacgagcgcgggtcagcctcctcgccgcctccctccgtccttcacactctctctccggttgtatttctgcctcctcctcctcttgcagcttctcctaccagtcctgacaaaaaagccaagcggcatgaagtaaagagcgacccgactccctttggtgtgcgaggtagagtggcaccctcgggcacggcacccactctgcgttggcaggaagcgcggcccagctggctgtcaggtggccgtcaaggccacctaagggggatgctctcgtgggtctttatgctgcggaggcagacacgcggttgtgttcaatgtgtgatgctctggtgacaggtcctcgaggacagcacgcctctcagccaactcctcacagcaggtctatctggagcctgcggaactgcccaccccgtcggtggctgctggccacggctgctgcgctggtcacctggccgtgctgggtggagctgggtggggtctcactgcccagtggctgctgtcggctatagggcaccctgttccctgcccttccctgtggcacagtttgccccgacacttcctgctgggaacacagagcatagcaactggcagggccgacccggaccctcctttcccggggccaatgaggccgagctccctgtccgacccggaccctcctttcccgggccgacgaggctgagctccctgtggaacctggcccttctcgtttcctgcctcccttatattctcagggtgaaaactgccctgtgaagcccagagacctcccctggcctgttgaggaccttcaagtgcagggacggggctcatgtttgcaatcttgagttttcaaaaatttgcaaaggttcccaggggtgtaagcagaaccagccttcccattccgcccgcctccacagcctcctcacatgacacagcgagcctcacagaaccaggcagaagctgtggccaccctgggcatgagttcagaggcagggagctggcccggcgttactgactgtcctgcctgcaagtgggtgggcgcccggcttgctgcttcgaggccccaggagtgcttgggagaagggagtcatttccctgttgacagtctcctgggagaggctattcttgtctgtcaaaccctctccgcttgtgaactggagtcggcagagccggtccctggtggagaaggtgggccgggtgggccctgtgggccaaatgccgcttctgctgcactttggccaagctcagcctctgcttccgtctcgtcatccatgaatgaagacagtacagccttgcagggtctcgagaaagccagtgtggtgttgaagccgggccactgcccgtgggtcatttccaccgtggtcagtgtggtgtcagagccgggccactgcccgtgggtcatttccac

SEQ ID NO: 11764 - DNA, 2300 bp, Homo sapien
gggtctcactgcccagtggctgctgtcggctatagggcaccctgttccctgcccttccctgtggcacagtttgccccgacacttcctgctgggaacacagagcatagcaactggcagggccgacccggaccctcctttcccggggccaatgaggccgagctccctgtccgacccggaccctcctttcccgggccgacgaggctgagctccctgtggaacctggcccttctcgtttcctgcctcccttatattctcagggtgaaaactgccctgtgaagcccagagacctcccctggcctgttgaggaccttcaagtgcagggacggggctcatgtttgcaatcttgagttttcaaaaatttgcaaaggttcccaggggtgtaagcagaaccagccttcccattccgcccgcctccacagcctcctcacatgacacagcgagcctcacagaaccaggcagaagctgtggccaccctgggcatgagttcagaggcagggagctggcccggcgttactgactgtcctgcctgcaagtgggtgggcgcccggcttgctgcttcgaggccccaggagtgcttgggagaagggagtcatttccctgttgacagtctcctgggagaggctattcttgtctgtcaaaccctctccgcttgtgaactggagtcggcagagccggtccctggtggagaaggtgggccgggtgggccctgtgggccaaatgccgcttctgctgcactttggccaagctcagcctctgcttccgtctcgtcatccatgaatgaagacagtacagccttgcagggtctcgagaaagccagtgtggtgttgaagccgggccactgcccgtgggtcatttccaccgtggtcagtgtggtgtcagagccgggccactgcccgtgggtcatttccaccgtggccagtgtggtgtcgaagccgggccactgcctgtgggtcatttccaccgtggccagtgtggcgtcgaagccgggccactgcccgtgggtcatttctgctgtggttggtggtagtgagcccaggtggttctgggtggcctgagcgctgcccagcacccactccccaagccctgcaggtggtgactccaatgagcaaaggccaatggctgttttacagaaaacagagggcaccttcctggccatcacccggcctcctgccttcacacagaatcccccagctcctggtgcagcagtgctggcctggcctgtggctgcccactcccaggcactgccgttcccatcatggtcagacctctgcgttttgctgttggcctcccccgcgccctgttccagcacagcgctcttgatggcccgcagagaggctctggggagcactgagcacccacggccagggcagctcaagaatccttttgtgtctctggtggtgccaggggcagagtcgcttgggtttcaccccgcacaggccggcctcgctgcccctgtggacaggttcgtgtgtaaggtcctgcccacgccacaccagctcctgtgcacacacagcagcccccctttttttgttcccactgtcctcaatcagacttttggttctgtctggccagaggccccacgtgcggtgcctcagagcgactgggggcctggacggggagggcacgctggcagccaggccccacaggccagtccctgctgctgtagaggaggcacctgggcccccacccttgctgtctctcagcctcccttgctgggggcagctgcaggtgcactcaggaggccaagctgcaggtctgcaaccggaaaatcacagtcctcaattctcacacagatgcaggcctggtgtggtgcctggaaggctcaactgcctccagctgtgaccccaagaaggcaaagcacccgggtggggtggaaggagcagccccgtgctctgctggctgacagtggtgcccaggcccagctcccttctctgcacagacagcagagttccgcttagcacaggcttttccttgccagcgcagacgctgtcagccattggaactggcctgcaagacagcttgctgtggcggctttgcaggcacagggcacacaggcatccgtgcacgcagctcctctgtcctccccatgccccacaccctccatcgcaaggaaacgcttgcttccagtggtaccaaataggatttggaaccagtttgtgcccaagctcaaatctcgttagcatctgcctgtttccctggtgtgcatgtgtcctgcctcgatgcatttggcagcaggtgggatgcgctgggcctgctgcctggttgctggctttgcgtgtttatttagccccaatggcgtc

SEQ ID NO: 11765 - DNA, 2300 bp, Homo sapien
gcgtcacgggtgggctcggggcacgtgggccttacctgagctgctcaggcactgggccgagccggacgggccgagccggacggacaggctgctggccggcacccagccctccttgccagtggtcgggtccctgacgtacctgcaaggggcgagggtcagcggcagccacgtgcggggcagtccggggctgagcgcggggtcttaccagaggccctcgtcgccctcctgcaccagctccaccacgtccccgctcctcacgcgcagcgcatcggggcctcccttctcgtggtccgccacgaccgtgtatttacctggaacctggtgggagacgggcaggggcacagacagcgtcagcacccgccccggcagcagccccacagcagccaggcggagtgccgggccttagcgccctgccccggtgggagctcctggccacgaccagctccggggaagggctccagccttgggaggaggctacgccgcagggcatgactaccgcagcggcgatggaaggcgtctgtgaatctgtctttgggcccagctgccccagcccctcacgctggtctccacacacagctctcggccccagggcctttgcgcctgcatacccgcctcccggagggcccttccgtgctttcaggtcttatttccatgctgctttgctgaggccttccttggtactccccgactcgcccgtcctctgccctccctctccctgcagctgtcctgcccaacctccccaagcctcactcctctttctctcctcactgtaagagtggaggttcctgtctgtgctgttcccgctttgtctccggggcctagaactgtgcctggcacacagcggatgctgcacagatgtcatggaacacgttccgttggggaatggggacccaggaagcggcagctgttcctacagagtggggagattcacagcctcctggtgctgcgtgtggtgggctgcggaggggtgctgccggctgcagggcctggagcaggaggacggtgactgggccacctgccctcacgtgatggcctggagcaggaggacggtgactgggccacctgctctcacatgatggcctggagcaagaggacggtgactgggctgcctgccctcacgtgatggcctgtactggctcctgcctctgtggtgcccagagtagccaggatcactccccacaccccacaaagaatgagatccaaatccctccccaggccccgtgcaccctgttccaccagcctgtttcccctcctgccacgtggcctccgcctctgtgtcccccacatctgttctcacgcccaggccttccttcatgctgtctctgtgggagaggccagaggccccgagggctctccctacccttccacgcctggcttctctgcccttccagagcctccgggacctgtcccctttgcacctccagccttggggcatggaccacgcacagcacagaaggtgcagcagacacttcttggtgtaaccctcactggaatgattaacacatggcagctttttcttgcttctgacattaacaatgaatgttttttcaaatgcaaatccatgcttagcagttccattttcttacaaaatgagaattgtatgtatagttaggaaggctcagtgacagcattctatgacataaagggtaggggggtggggactgtctcctctgaggaaggtgcacccacgagtgggctctacaggaggctgggtgggcacctggaaattaacccagaaacacaaagtgctgctgagacagaggagctaggaggagctggggctgcatcctaagacccaggcccaggtggaccttccagagagagttaggaggagctggggctgtgccccaagacccaggtctgggtggaccttccagagagagttaggaggagctggcactgcccgtaagacccaggcccatgtggaccttccagggttaggaggagctggggctgtgtcctaagacccaagcctgggtggacctgccagaagcacccctaatccccggagggcagcccccaccccaagtgcccacagggaagccgtggttaccagcttcttggggcccaacccgccgtcctcctctgcgtcggacgagttaatctgctcctctgcacttgaccagcccccgtcgtcctcaggtgcctccagtgagtgggacgttttgctccaacctaagagagacagacacccgtgagggaccccccggtgatgagccgctgtctgcatctgtctgaggtggggtcagctaagtcccacagaccccctgaaatgtgtgccgtgggcccccaacagagcc

SEQ ID NO: 11766 - DNA, 2300 bp, Homo sapien
gccacagcatgtccaaggaggccccagaggaggtcccgggagtcctgggagagcctggttagcctccctgaagggaggaagtggggttttgtgagagggatggtgcagcagcccccacacctgctactccgtgtggccgggtccagccccaggcaaggttccaggcatgcccctgggacagacgtgggagggagaccagcaggcaggtccccctcagggaggtatggagcgggtccccggggccaggtggagcccctcacacctgtgtcctcaaggacccacaccaggacaatggccataggcgggcacctgcagccgccctggccagcagtgagacgggcagagagcccagccagatagcccggttcctgccccctcccgcctgcccgcacagagagggctgcatgcaggtgagggtccatcacctgaagagcttcaccagccccgaggccatgagccactgaatctctcagggggttttggcgcttgaggttccccaggtcattctgctgcccagagagggttgaggacctctgacctggagccccaaaggggaagggtaccctaagaccagccagccatctactctcaggtgggaaaggggtagggtttagatatggccccctcccctccacgtcctgaaattaccttgggctgtgctggccgagagccgcggggaccagatttgagctggacgtgagctttattccagacggagcagctactttgtaagcgatctccctgggatcgatatcatggaggggcacagatgggcttcagctgtgctgggtggaagagaaaacatgccctgtcggcccctcagcaagtgctctgctctctggactgagatgcaggtcagcagcaagcagggaggctttgggggtgctgggggctgctttgaaaggcacccctgagctaagacttggctgttgggaaggaatcacctccctccctccagccgtaaaaagaactggacatcagcttccaaagaagtcatcagcaatgcaactgttcacatggaggatactccctgcttgaggggtcagacaggcctgctgggcaacccaggaggcttggatgaccgtctaccccagtgtttttgggatggaaagttccacattctgagaaccctcagtccctgggcaacctggggtggttagtcaccacagcttgtggcttgggcccatgacagcaggtagaaatgacgtggactgccgccagccgggcacagtggctcacgcctgtaatcccagcactttgggaggctgaggcatgtggatcacttgaggtcaggagttcgaaaccagcctggtcaacacggtgaaaccccatctctgctaaaaaaaaaaaatatatatatataaattagccaggcatggtgacgtgcacctgtggtcccagctactcaggaggctgaggcacaagaatcacttgaacccgggaggtggaggttgcagtgagattgcaccagtgcactctccagcctggcaacagagcaagactctgtctcaaacaaacaaaacaaaacaaacaaaaagacgtaagatgtggaccgctggagaatgggggtgctgcctgcagtcaaaacggagtgggggtgcccagctcagggccagaatgatcctattcccggcacttctcagtgaggctctgtggctcacctaagaaaccagcctcccttgcaggcaacggcctagctggcctggtctggaggctctcttcaaatatttacatccacacccaagatacagtcttgagatttgactcgcatgattgctatgggacaagttttcatctgcagtttaaatctgtttcccaacttacattaggggtttggaattctagatcgtatttgaagtgttggtgccacacacaccttaacacctgcacgctggcaacaaaaccgtccgctctgcagcacagctggggtcacctgacctttctcctgtcccccccacttgagctcagtggctgggcagcaggggatgcatggccactggccggccaggtgcagctctcagctggggtgttcagaggacgcctgtgtcctcccctcccccatccctctgtcacccttggaggcagagaactttgcccgtcagtcccatggggaatgtcaacaggcaggggcagcactgcagagatttcatcatggtctcccaggccctcaggctcctctgccttctgcttgggcttcagggctgcctggctgcaggtgcgtccggggaggttttctccataaacttggtggaagggcagtgggcaaatccaggagccagcccgggcttcccaaaccccgc

SEQ ID NO: 11767 - DNA, 2300 bp, Homo sapien
gagacgtccagccggacagaccagctgacccgccaagcccagcatggttagtgtcaggacctctgctgaagatgcttgctgaccctggccagaccccggttcctaatgccccctaaacgggacgggagccagtggcgggccctgatccaggtcagagctggctctgctttctcttttgtccgagtgaccatgcctcagtttcctcatgtgtaaaacaggagcccaccgtgatgcttatggtgggatgagatcagcatggatggaacaaggccctggaagggcccatgccatggtcatcgacagcaaagccactctgcagacagatgcttcagtgaattggtagaaaattctgcaaccagaatgcccggggctcctgagggcctaagcccagcccagggttctggaagccactctgacttcttgggagtggaagttggcaggactcttcctgggaagaagcggagggtggggatgagaggacagttcaggagcccacccagacccacaggaggaaactaggggagtcatgcggggtcctggtggagcgccagcctcccttcctgccaatgggaaatgcaggcgcccacctcatggtgctgccggaggagggggcccgggactccccagaggcttcgctgaagggcctgggcgcccccaaaggctacatgtttcatatgggacgtgccacctgccacggctcagctccagctttctgtgagtggcgagatagaatacggggaggccactggccatgggcctgggacagggtgggatgaggcggcaggcttgggccaccaaagccagcatcgccacccagcattgatgacaaagactgcgtgtctgccatgagcatcctgctgttggtgcacacaccgcattggtctctccatacaaacatgcctagaggcgatgtcagagggtggagaccaggagaggcaggagtcagacatctggtgccaccaggaaggcccttctcagaggaccaggctgtgcgtggtgcccgccgtgggaggccagcctggcgttggcatccagcatcatcagtttgtgcagtcgggtggggctcagtgagtgcctcctgtgtgccaggcacaatgacgcacaatgtgtgcacaccaggctcatgtgcaggtggctgcgagacagggcgacccatcaaggcagatgcaccatgaggcagtggccagtgctgtgggtgttaggggcattgctccccggccactacggcatagcaggcagtgatcgccacactggccaagctttagaccatttattccagagaccccagaggcaaaaagcccggctgcacctcccagtgactcccacagccattgagcagagacactcaggaccttgtgatgggaggtttctgcactggagaacgagcccagaagccctctcagcctcggaacagtgtggccagtggtgggcaggtcaggaggggcttcagacacagcctgtccctccagatggtcacgggaaggtcactccccacagaagtacgttttggggccatgcgggcacagaaggtttgggggtgggtggggcaggtgccagcctggcctgtgggaggccatggtgcagatgccaagccccccccgtgacatgagaccacctgataccacccagagagtggctgtgagcggaagggcccgcccagaaacaagcagggccttggggcagaagtcctgggctcagatcccacgctcactgccagcggcctcggctcaggcttctgcgctctctaaacttagttttctcttctggaaaaatgatggggaaaatgatatttgtatgtgaggactgagagttaaatgtaaacatctggaaactacaaaatgagcacgaaatgatgtttttattcttagaacagaaagtccccacacccgcggccctggtgactgatgaggatgaggttctgcggggcctctctggccgcccagctctgcctggggaaggtggggccagagtggatgtgttcccagcgtggtcactcccctgcctcgccagcaggtctcggctccaatcaggaggcctaagccaagtgataagcagccagacaacagccatcccagctggggcgtggactttgctccagcagcctgtcccagtgaggacagggacacagtactcggccacaccatggggcgcccactgcacctcgtcctgctcagtgcctccctggctggcctcctgctgctcggggaaagtcgtaagtgcccctcgcccttcagacccaaaagcagcgccagggagcagggaggggcggcagttggggaaaccctctcatctctgcagcc

SEQ ID NO: 11768 - DNA, 2300 bp, Homo sapien
tcaccagacactgagtctactggagccttgatcttggacttcccatcctccagaactgtgagcactacgtttctgtttatcgtaaattacccactctaaggtgttttgttacagcagccccaacagactaaaatggtccatgagggaagaggttgtagctcagatacccatgtcaggcatataggatgtgcttaattaacacttattgatcgaatgtgtatgtccctgtctgcctttccatttttaggcagctattgatggtttttaaactatccagcagaagtatttttaatgtaaatttccatgtgggaatacattttcacacaaaaaaaggcaccttttcttaagtgaaggccacgtagattgccaggctggtgcaattcacccaagagctatcctatacaatcaacttctggctttcaaattattttaactcactcactaaagataaactttattttcttttcccagctttttaaagcaaacttcacaacttcagtgtatttgcgggcatgccctcttaatcaagggtgtcagcttcttagttttcttctgttcccactttaacaaaattgtatttagaatcctttcattgagttttgccacctttgagtgtcattcaatcgaacaatatctatatgctgacaatgctgtcatttcatctgttaccacctgaatctccactgtgagtcccagcttctcggatgcccactcctgtctccacctggacatcccacagacacctcaaatttgccaaacctcgcttccctctgccctcctggagcttggccgtctcagcacacgcactgccatcctcccaatcgctcagcccaaaccttggagccgtgctgcccgacacaattcatcatgaatcccatcagctttcccttcctgaagcatccagactgcaaacgtgcttcctgctgcatggctgcaccctcaccccctcctggactagccggcagcctcccttttgacttctctggaatgttctgttctccacacagcagcccagtgatcccttcagagcacaaatctttccatgtcaattcctgttccctccaatatcttcccaacacagtgaaaatgaaacaccaggttcttacctcaggcttcaagggctgatatggtttggctgtgtccccaccgaaatcttatcttgaattgtaatccccatagtccccacgtgtcctgggagggacccggtgggaggtaattgaatcatgggggtggtttccaccatgctattcttgggatagtgagtgagtctcaagagatttgatggttttataaggatctggcatttcccctgcttcagtcattctctctgctgccaccctgtgaagaggtgccttctgccataattataagtttcctgaggcctccccagccatgtggaactgggagtcaactaaacctcttttcttaaattacccagtcttggctatttcttcataacagtgtaagaagggactaatacacagggcctacatctgaaagcagcaaacgacaaccctggggccaaatctggccccttaatagctcttataaataaagctttattggcacacagccaagtgttcattcatgattgtctatgctgcctctgctacaatggtgctgagctgtagtgacagacactatttggcccttccccgctttctccctcctccctccctcccttccttttctccccttccttctttccatcctcctgctttccctccctcactccctcctgtctctttccctcgttcttttctgtgtattccacacacacctagaacgtaagctgcatgtgactttgtctgtcccgcccagtgctgtgtccccagggcctatctcacctccattgaccacacacgggcatgggtgccaccttccaccttgcacctgctgcctttaccttctgttctctgtctccctaaatatctcccagggtcctctgagccttcaccgttcatttctctgcctggcctcaaacagaaaacgtcaggagggaagcacacagctgcacaggtcgtgccccgaggctcctgctgccggcacctcccccagcctggactttggctgtgtttgtagccctgtcccagcgctccgggtgggaatggcaggctgcgtcccactgctccagggcctggtcctggtcctcgccctccatcgtgtggagccctcaggtaggcatctggcttacctgtctgttgtgcctgtgctgtgtctttcttgactcggtccatggtggatttgtagatgaggctttttccaggagccagaggagccctgagtgcccagactagtct

SEQ ID NO: 11769 - DNA, 2300 bp, Homo sapien
cagatttccgtacccaacactgcaagagaacggggccccactggacacatgggtagctagaaaacagatgcgcgcccaaagcctccgccggcatgagtttgctccgtgtctgccccacaggacataggaggcacttgtcacgactgccagcgctgaggaccttgctgctgctggggagcagctacgtaggtcaagaggatccttggcatgaactccacaggcacaggcgcttgccttcgtgcattcatctctcgcgtgtacgtgtggcagtccacggctggaatccgggtgtgacttaggagagcagggcataaaagagatctggcttccctggctctactgggatctgcgctcccagaatccagctccctacgtgtggagagaaacaggggagcccacccacagccctgctgagctccaggtgagagcccgggccaatacacgggaatgagtcaccttcaaagaggcccattcgggccccagaagagcccacaagcttccccgcccagcccggaagaaactgcagacctgcagatgtaggagcgagctaaggagtgctgctgaagccctggggcagctcctgcatccaggggaacctgaggaaggagccacacaaagtgagtcctgcgccgcgcggcccggagagagagaaagagggattcacactttgtagaatagcctctccttgaacaagcagctttcaaatgcagtaactttgcaaagatgagctcttatagtttgtgttcttctttagtaaattttttataaacggggaaatgtgcatagtctgaaaaatggcagtgctggggactaaactgtgtcccccaaatttcttacattgaagtcctagccccagtgtgactgtatctggaggtaaggtcttcagggggtaactaaggctaaatgtggtcataagggtgaggtcctaacccaacagaactgtggccttataagaggaagagagccgggtgtggtggcacatgcctgtcaccccagcactttgggaggccgaggtgggggaattgctttagcccaggcgttccagaccagcctgtgcaatattagcaagacgctgtctctacaaaaaataaaaaaattagttgggtgtggtggcatgcacctgtgctcccagctacttgggaggctgaggagggaagatcacttgagtctcggaggtcgaggctgcagtaagcactgactgcactgccgcactccagcctgggtgacagagtgaggtcctgtctcaaaaaaggagggagagagtcatctctatctgtaccatctctagcacagcaagaataccaccttattcttaagtgtgcaactcagaagagagccctccccagaagccgaccgtgctggcaaccccatctcagtcagacctccagcctctagaactgtgaggaaatacattcctgttgcttaagctgcctgtggtattctgtgatggcagccccaacagcccaatgtgagtggcccaacttagcgactgtcaacctcgccgtggtgccgaagggacgcgctcaggggcagccatgcctcagcgtccacgcagcccttcagtttccactctcagtgtagcactcggtaagctacacgaggtatttacacttttatttttatttatttatttttttgagacagagtttcgctcttgttgcccaggctggagtgcaatggcatgatctcggctcactgcaacctttgcctcccgggttcaagcgattctcctgcctcagcctcctgagtagctggaattacaggtatgcgccaccacgcccggctaattttgtatttttagtagagacggggtttctccatgttggtcaggctggtctccaactctcaatctcaggtgatctgcctgccttggcctctgaaagtgctgggattacaggcgtgagccaccacgcccggcatctacactttattataaaataaaatcggctttgtgtttgattttgcctaagagtggaggcttctgagtatgttaaggaaggctagagtgagccataatgtttagtagcaggtgtattaaatgtattttcaatttaagatggttttttaaaagaaatttttttttaaccaacaaagcaaaggcaaataaaataagtttattgggatgtaaccctatcataaattgaggagcatccatacaggcaagctataaaatctggaaaatttaaatcaaattaaattctgcttttaaaaaggtgccttaagttaaccaagcattttgataacacattcaaatttaatatataaaaatagatgtatcctggaagatataatgaagaaca

SEQ ID NO: 11770 - DNA, 2300 bp, Homo sapien
cattctgtatcgaagaggcacctattttcttaaaatattcaagaatctgttaatacataaaacttaggtaacatgccagttcaaccagaaatatttttatccatcagaattaggaggaagcggactttttgctgtctcaccccagtggctacactgccctttgcggagatgtaggcatgcacatctccatagaagtccatcctgggcccagcccctgtctactctctctacttgttccctgggtcaccccttcccttctcagtctttcccatcatgtgactacgaaggagtctcaggtttgtatctttaacccaaatctgtctgtttaaacttcagtttacacacatagagtagaagctcgcttatcagtctcactttaactgacttgaattggaaaaatgactctctccaatccctccctgaaatacacgagctgatgcccaaggtatgatgacgactttcagcaagtaggcttcactctaatacatcgcaagcttttgccagctaagttgtatgtgttctcatatccagatgtgtttgttctcaaatctatttttgctacccgaacctgttatggtagttatgtacttttaagctcatcaatgaaatatgaatgcaaaaggaaacagttgtttctctataagctaagttgtatgtttttaaaaggctcacttgagtttgttaaaaaaataattaggtatgggggaaaaattgtaaaagattaagaaaattctaaagataatcgtatcaaattggttcttaaatgcctatatccttgtttaactttaaataaactgatattggaaaatgttaagtctgctaagattaggccaaaacagacacagcctaaagaaaaggccctgggcttacatcaaaagattggcaagtatagaacttgaggtaagtggtgtaaaaaaaaaattggcaagtgaatgtatactttcatgttttaagttaaaaacatacatccatttcttcgtgattcctgttttaaccagttttctcaattaaccaagcaactgctgggcccaatcatgtcagacttttcagctatcaagtacgtatctttacccagttgtcaacagacacctcaaactcaacatgcccaaaactttatttctccctccaaatccactctattcatctttttcccagattacaagcctgggaatcattcttaactcctccgtgtccctcagcccacccattcttattcaccacgtcttggtaatgtttccttcaaatattttaaaaatccattccctatatttcctatccctgttaccacagtgctggttctgaagacaggcatagtttagtggaaagaatatgcgttgaatctttacaagtgtccatcttttaactgtgcttctgctacttacaagctgttgaacaacatctgtcagacgcatgtaccgagcgatatgaagtgtgcattgtgctcggagagtgaagggcgttaaacgacagcgaggacgaggggcacgagcccggcctgcagcacggccacagcctcgcgcttactcctccatcgcctcctggagtccccgaattcatcccgcatcctgctgggaaacagcgtccatccgacacagcaccgcccacagcgggccctcggcgtggcccgcaggcccttcggaccgcctgggagcgcggccacacgtgccagcaagtgagggcagcgacctgggaccgccgcgtctacttacaccgcgacgactccgcgatccacggacaccgcccggcccccacggcggccctgcaggggagaactcgggccgccttcccgagtcccggccgccgctgttcggctcgcgcggctgcccgccggggacccgaacggaagaagggtggcgaggcgggaaaggaaaaggcctgagggtccaaggcaggaggggacacacggaacacgccgagggccaaccacgccgccgcgcgctccccggctaggacccacctgctgcaggtactggttaatggtaatgtgcgccatgggagcgccgccgaacggagagcgccaccccctacgcctcaagcgggccagctggcgtcacttccggccctcggtccgtctgggtcctggcgcccccggccccgccgcgggtgcgcaggttggttccggagggagaacctggggaccggctcggcgacgcgctcgggctgagggggcccggggtctttctgccggggccccgtcctctcagccgggacgccagcggctctgattgtgtgttcgggcccgcccgggctgaggggtttggggtccagtggcgaggacagccccacggctaaactgcctt

SEQ ID NO: 11771 - DNA, 2300 bp, Homo sapien
acttgaattggaaaaatgactctctccaatccctccctgaaatacacgagctgatgcccaaggtatgatgacgactttcagcaagtaggcttcactctaatacatcgcaagcttttgccagctaagttgtatgtgttctcatatccagatgtgtttgttctcaaatctatttttgctacccgaacctgttatggtagttatgtacttttaagctcatcaatgaaatatgaatgcaaaaggaaacagttgtttctctataagctaagttgtatgtttttaaaaggctcacttgagtttgttaaaaaaataattaggtatgggggaaaaattgtaaaagattaagaaaattctaaagataatcgtatcaaattggttcttaaatgcctatatccttgtttaactttaaataaactgatattggaaaatgttaagtctgctaagattaggccaaaacagacacagcctaaagaaaaggccctgggcttacatcaaaagattggcaagtatagaacttgaggtaagtggtgtaaaaaaaaaattggcaagtgaatgtatactttcatgttttaagttaaaaacatacatccatttcttcgtgattcctgttttaaccagttttctcaattaaccaagcaactgctgggcccaatcatgtcagacttttcagctatcaagtacgtatctttacccagttgtcaacagacacctcaaactcaacatgcccaaaactttatttctccctccaaatccactctattcatctttttcccagattacaagcctgggaatcattcttaactcctccgtgtccctcagcccacccattcttattcaccacgtcttggtaatgtttccttcaaatattttaaaaatccattccctatatttcctatccctgttaccacagtgctggttctgaagacaggcatagtttagtggaaagaatatgcgttgaatctttacaagtgtccatcttttaactgtgcttctgctacttacaagctgttgaacaacatctgtcagacgcatgtaccgagcgatatgaagtgtgcattgtgctcggagagtgaagggcgttaaacgacagcgaggacgaggggcacgagcccggcctgcagcacggccacagcctcgcgcttactcctccatcgcctcctggagtccccgaattcatcccgcatcctgctgggaaacagcgtccatccgacacagcaccgcccacagcgggccctcggcgtggcccgcaggcccttcggaccgcctgggagcgcggccacacgtgccagcaagtgagggcagcgacctgggaccgccgcgtctacttacaccgcgacgactccgcgatccacggacaccgcccggcccccacggcggccctgcaggggagaactcgggccgccttcccgagtcccggccgccgctgttcggctcgcgcggctgcccgccggggacccgaacggaagaagggtggcgaggcgggaaaggaaaaggcctgagggtccaaggcaggaggggacacacggaacacgccgagggccaaccacgccgccgcgcgctccccggctaggacccacctgctgcaggtactggttaatggtaatgtgcgccatgggagcgccgccgaacggagagcgccaccccctacgcctcaagcgggccagctggcgtcacttccggccctcggtccgtctgggtcctggcgcccccggccccgccgcgggtgcgcaggttggttccggagggagaacctggggaccggctcggcgacgcgctcgggctgagggggcccggggtctttctgccggggccccgtcctctcagccgggacgccagcggctctgattgtgtgttcgggcccgcccgggctgaggggtttggggtccagtggcgaggacagccccacggctaaactgcctttcactgcgctgacccttcgtctgccccttgtgaaaaccaggccgcggaggaccctccgcgcctggctgggccagggcctcggggcgcgcgcgcccgaggagggggagggggagggacatggcgcgcgctcccgagctctcataaggtgcctccgccgcgcgctcccgagcctgcaggagttagggcacgtcccggcgcgcacccctgagccctcgaggtggtctcacgcccggggtgggggtgccgagccctcaggaggcgcgcgccccggggccctcaggagggtgtcccggctcccgatcccctcaggaggggtgcccgcggcacgcatccccgagccaggagggggtgcccggagccctgggggcagggtctcggtgcgc

SEQ ID NO: 11772 - DNA, 2300 bp, Homo sapien
aaacgccctgcctttccgctccccggcgagagcctgcgaggcacccggagcggccgcccggccgcgtctgcgtcacgcggggcaggagcggcgtccccagccccggccgccgcctcacctggtagagctcctcgaggttgtacctgatggaggtgctgctctgcacggcccgcaccgcctcgtgcagcttccgccacgtgtcctgcgtgtagttgtcgggcagccgaggtctgtctgcagggcggagggagagcgggcggctcagggcgcgccgcgaagcgccccgcgtagccacccccgacccggccggcgccccggcgcccccgctcccggggcccgcacggatctcggggccttccccccaagtcgggcggggtctcgtggggtccccgcccggggcgcctggccctcgacccggccgccgcacccacctcggaagttcttgatgaccagcttcttggagccgcccgcgccccccggcttggcgggcgcggcggccagggccgcgggcttggtgaggccgttggtgcggcccacgagcgccgagaagctgcccttccgcggggcctcgtccgccatggctgggccggaaccgccgcgccccgccccgagcgccgccgcccgccgagctccgctccgcccgccccggtccgcgcggcctccgccccgtcctcctcgcgcgccccgccccgccccgcccgcgtgcccgagcccaaccgccgccgcgcccggctactcctgagggcttaggaacgcgcgccgggaatccctcctgagggatcggactccccctaagagattcggacaccccctcctggctcgagggcgcgcgccgggactcccgtcctgagggatcgggaccctcacccccggctccggggggcgcaccgagaccctgcccccagggctccgggcaccccctcctggctcggggatgcgtgccgcgggcacccctcctgaggggatcgggagccgggacaccctcctgagggccccggggcgcgcgcctcctgagggctcggcacccccaccccgggcgtgagaccacctcgagggctcaggggtgcgcgccgggacgtgccctaactcctgcaggctcgggagcgcgcggcggaggcaccttatgagagctcgggagcgcgcgccatgtccctccccctccccctcctcgggcgcgcgcgccccgaggccctggcccagccaggcgcggagggtcctccgcggcctggttttcacaaggggcagacgaagggtcagcgcagtgaaaggcagtttagccgtggggctgtcctcgccactggaccccaaacccctcagcccgggcgggcccgaacacacaatcagagccgctggcgtcccggctgagaggacggggccccggcagaaagaccccgggccccctcagcccgagcgcgtcgccgagccggtccccaggttctccctccggaaccaacctgcgcacccgcggcggggccgggggcgccaggacccagacggaccgagggccggaagtgacgccagctggcccgcttgaggcgtagggggtggcgctctccgttcggcggcgctcccatggcgcacattaccattaaccagtacctgcagcaggtgggtcctagccggggagcgcgcggcggcgtggttggccctcggcgtgttccgtgtgtcccctcctgccttggaccctcaggccttttcctttcccgcctcgccacccttcttccgttcgggtccccggcgggcagccgcgcgagccgaacagcggcggccgggactcgggaaggcggcccgagttctcccctgcagggccgccgtgggggccgggcggtgtccgtggatcgcggagtcgtcgcggtgtaagtagacgcggcggtcccaggtcgctgccctcacttgctggcacgtgtggccgcgctcccaggcggtccgaagggcctgcgggccacgccgagggcccgctgtgggcggtgctgtgtcggatggacgctgtttcccagcaggatgcgggatgaattcggggactccaggaggcgatggaggagtaagcgcgaggctgtggccgtgctgcaggccgggctcgtgcccctcgtcctcgctgtcgtttaacgcccttcactctccgagcacaatgcacacttcatatcgctcggtacatgcgtctgacagatgttgttcaacagcttgtaagtagcagaagcacagttaaaagatggacacttgtaaagattcaacgcatattctttccactaaactatgcctgtcttcagaaccagcactgtggtaacagggataggaaatat

SEQ ID NO: 11773 - DNA, 2300 bp, Homo sapien
caagccttttaatagaaataattgtatgacacatcgtgacctaaaatatagatattagactactgaatgaatgttactttacaaaaagaagacaccagaaaaaaagtcgcttataaataaaatatccaagtatggtaaaatgtacttttttgttacttcagaaacggaacaccatcactttgaattaaatgctaccaaatctgtttgaataccttaaaggcaaccactaatcacaaaacacaacagagaacaaaaccactttttctgaattttgaattttttcaaaatctgtttgaatatcttaaaggcaaccattaatcacaaaacacaacagagaaaagaccctcttattactgtggcaagtgacacagtcatgagttttacatataacgagaaaataatttgccgtatacttgcaaaatatgagtcacgtggctcctagaaacacacctccttctcttccgtaatgggataactttaaatatggttctaagcagcttaagcctgaaaacaaaaattccaccacggcaataaacaaaaccacttgttgcctctggggctcccggccctgcagtggaggcaaacgccctgcctttccgctccccggcgagagcctgcgaggcacccggagcggccgcccggccgcgtctgcgtcacgcggggcaggagcggcgtccccagccccggccgccgcctcacctggtagagctcctcgaggttgtacctgatggaggtgctgctctgcacggcccgcaccgcctcgtgcagcttccgccacgtgtcctgcgtgtagttgtcgggcagccgaggtctgtctgcagggcggagggagagcgggcggctcagggcgcgccgcgaagcgccccgcgtagccacccccgacccggccggcgccccggcgcccccgctcccggggcccgcacggatctcggggccttccccccaagtcgggcggggtctcgtggggtccccgcccggggcgcctggccctcgacccggccgccgcacccacctcggaagttcttgatgaccagcttcttggagccgcccgcgccccccggcttggcgggcgcggcggccagggccgcgggcttggtgaggccgttggtgcggcccacgagcgccgagaagctgcccttccgcggggcctcgtccgccatggctgggccggaaccgccgcgccccgccccgagcgccgccgcccgccgagctccgctccgcccgccccggtccgcgcggcctccgccccgtcctcctcgcgcgccccgccccgccccgcccgcgtgcccgagcccaaccgccgccgcgcccggctactcctgagggcttaggaacgcgcgccgggaatccctcctgagggatcggactccccctaagagattcggacaccccctcctggctcgagggcgcgcgccgggactcccgtcctgagggatcgggaccctcacccccggctccggggggcgcaccgagaccctgcccccagggctccgggcaccccctcctggctcggggatgcgtgccgcgggcacccctcctgaggggatcgggagccgggacaccctcctgagggccccggggcgcgcgcctcctgagggctcggcacccccaccccgggcgtgagaccacctcgagggctcaggggtgcgcgccgggacgtgccctaactcctgcaggctcgggagcgcgcggcggaggcaccttatgagagctcgggagcgcgcgccatgtccctccccctccccctcctcgggcgcgcgcgccccgaggccctggcccagccaggcgcggagggtcctccgcggcctggttttcacaaggggcagacgaagggtcagcgcagtgaaaggcagtttagccgtggggctgtcctcgccactggaccccaaacccctcagcccgggcgggcccgaacacacaatcagagccgctggcgtcccggctgagaggacggggccccggcagaaagaccccgggccccctcagcccgagcgcgtcgccgagccggtccccaggttctccctccggaaccaacctgcgcacccgcggcggggccgggggcgccaggacccagacggaccgagggccggaagtgacgccagctggcccgcttgaggcgtagggggtggcgctctccgttcggcggcgctcccatggcgcacattaccattaaccagtacctgcagcaggtgggtcctagccggggagcgcgcggcggcgtggttggccctcggcgtgttccgtgtgtcccctcctgccttggaccctcaggccttttcctttcccgcctcgccaccctt

SEQ ID NO: 11774 - DNA, 2300 bp, Homo sapien
gttctttaaaatgtgcctgcttttcctaccccacccactgggcacgctgacccaaggcaatgtgatttctgctttcgccatgtagagattgctcttgtctgagatgtcggtgacctgccagttaccaaatccagcaagcatttttgtccttattttatacaacatctatacaattttggacaccctgtccttgttgaagctcccattaatgccatttgcccttctaacttcctcatggaactcccaaacatctcctagtaggcatccatgtggtctacgagaaggcaaacgctgcacagaaaagacagcctgtgttccaggaaagaatggagatgataaaagtgatcatagcagattatttagcatttgctctgtgcaagggactgtttcctactaatgtatttaatccctagagcagctctgtggcgtggccattgtcactcctattttatacaaactaaggcacataagttaaaataacttgccctacctcagttgtctggcccatagtctaaatgcttttcaaaaattattattattattattattatttttagagacagggtctcactctgttacccaggctggagtgcagtggcacaatcataactcactgcagcctcaaactcctgggctcaagtgatcttcctgcgttggcctcccctgtagctgggactataggcacgcaccaccacattcgactaacttctaaaaattttttgtagtgccaggatcttgctatgttgcccaggctggtctcgaacccctggcctcaagcgatcctcccacctcagcctcccaaagtgctggaattacaggtgtgaaccaccatgcccaacactaaactcttaatttataaacatagtttataccataactgtcatacaaactataaacattgtttataaaatagaataaatgataccacctccagtctaccacaagtggctaaaaacctgaacgtgagcatcattacaagaagaatcctggttgaggtgtgtgtgggcaatgcatggtgaggagatactttgtccatctctgggatggggaggagggctgagggtgaaccttggcctgtgctttgaagaatgagcaaaggtggtcaggcagctaagaaagaaagagtagaaggaagcagtaagttcaaagccgagtatctcctgctagtgatggctaggacggcagcatgaccagaagaagcctgtgtggggagtgggaggtggggagggatagagctgatgagggccctgaagggtttttcagctgaggttgatgttttaaagagaagatcccagtggcagggtagagagtcacacaagtggagacctaagccttcctaagcactggctacctgcctggcactgccccaagggcttcagaggcaggaactaataacatttgatccccattttaacagttcaggaaggaaaggcacagagacattaagcttctcacccagggtcacacagctagcaagtagtagggccaggattcaaacccaggcagctgcctcgagcccacaagtctggccactgcaccttcctgctccaactgtggtgaagtgcacagaagacctggtgtgcagcacacgcgggagcaacaggagaggcccatggtgatgtgggcagtcaagggaggtgcacgtctccaccattgaggtggctcccagggccctctgcacacctgtgtggcacccaccactgcggctgctgccaccactgccaccataatattattaataatactaccaccaccacccgcctaccactgttactactgccaccaccaccaccaccattactgctgccaccactacccgcccaccaccattactgtcaccactacccgcccaccaccattactgtcaccactacccgcccaccaccattactgtcaccactacccgcccaccaccattactgctgccaccactacccgcccaccaccattactgctgccaccactacccgcccaccaccattactgctgccaccactacccgcccaccaccattactgctgccaccactacccgcccaccactattactgctgccaccactacccgcccaccactattactgctgctgccaccaccagtattactgtcaccgccaccaccgctattactactgccaccaccacctgtccaccactatattactgctgccaccaccaccactattactattactgccaccaccagcaccactcctgccctgatgtgccaattccggatttctggctggagcccagcatctgtatttttggcccctccttaatggcgtacttggccactggg

SEQ ID NO: 11775 - DNA, 2300 bp, Homo sapien
gtttttgttttgcaccataaaactgtaatattcagtatgcttgttcaaacacctctcctactttctaaaccctacttctagcctccttaagaagcagtggatcagaggagtccccgaatttaaacctccagagtttcgcgtaattgtctcattccactgcaggggagaaaatataatttctcttctttctctctttattagttgagacattctcctgaaaacaaaattcagagcaacaggagaaacaagcagaagtttattagcacttgctgtacccatcgtgtgagaggcctcagttcagaagtatttctctctcaaggcatgttgtgaacagcacaaggtcagacataaccaggtccacacacgtttatgtctttccacagggtgggaatatattgatgctatttcaattataaaagccacgagctacgaggagttgcctcgagacaattcccttcagtactacttgttaacttggtagagccatgggcaaaggctcaagccagtccacgtgtcagtcaatactgcaaactatacatcatagtgtacttaaaatacaaacgctatggtttaaacattccccatcaaacaaagtaacattggacatcaagagaaagaggataggaaaaggggttaatggatcaatccaaggaaagcaatgacgggaacaaggagtgtattccagcctgatccagacagaagtcattgtcttccaaggaagtccttgatgtgagcagatccttaggcagcagatgcagggtgctaagcacaagtgacagcaaggtggggtctatcaaaatgccagtgttgaattggtcaaatcccgccctttttaaggtcacagtcctctggtgaggactgatagtgagtgcctggtcctgtctttatctggctgagtgctgtctctattaactaggtgcacatccagtccccgttgctatgatgccttttgaaatgtaagattaaatctttttctaagatgtaggtacttatgcgacgggtgctttatacaaagcagtagcgtaggggccttaattaaatagtattttaacaaaaggccataaatcctatatgatgacaagccaaaaaacagagcatcttcagacttctaaaatgcaggagccaggcgccgtggctcagggctgtaatctcagcactttgggaggccgaggcgggtggattgcttgaggtcaggagttcgagaccagcctggccaactggtgaaaccccgtctctactcaacatacaaaatcagccgggcgtggtggcgcacgcctgtaatcccagctacttgggaggctgaggcaagagaatcgcttgaacccgggaggcggaggttacagcgagccgagatcgcgccactgcactccagcctgggcgacagagcgagactccgtctcaaaaaaaaaaacaaagtgctcgacaggaactttctgtaagccaaagagtatcgccatcgcaccttcaccttcaccttgggcagcctggtgccgtcttccctcagcccgcgattaacgagcggaaggccgcactgacccatttcagatcccttatttccttcctaaaaccactcaagagtttgggcacagtggcctccctgtgtgaggaacttgcttcccactcaccaaaagacaaacccttcgcccatccctggccgcgcacccggccggtcacccgcgctgccacccacaccaccctcctgtccataaagagcccgcgtttgggacgcctcgcaggctgaagggaggcctgggcgtccgcgatccgtctgccctttctcccctcgcgggcttcctctttcctcactttctcccgccactactcttcctcttccttttccgcgaacccagcccacttcccgtttcaggacctcggctcggccccagtcccccggaccaggccgggtcacgtgggtccagggtcacgtgccgctgcgggtcacgtgccgctgcgggtcacgtgtcggcctgcatcacgcgtgagggggcgcgcggtgctggaagctgccgcacctgcggggagccgagccgccggcgctcgacgcgcgcgctctcgcgagacccgcgggatcacgtgacgcccgggcgcggcgcagctcacgtgacaagcgctgccggccgcggtgtcttcttcgtgccggcgtcgcagtggccgggcctcttgcgtctggtaacgccgctgtctctaacgccagcccttggcgcccgcgccccgccaccgcagcgcccggcagtccgcggcccaaccgccgcccgcgcccccgctccccgcaccgtacccggccgcctcgcgccatggcg

SEQ ID NO: 11776 - DNA, 2300 bp, Homo sapien
tccttagtggttttgttgaaatggctttgtgtttctttgggatgactaaagccttttggaataacaaaatattttaaaaatccaagacatagtaagatcttatctcttttttaaaaaaaaaaaaaaaagccagacatggtggagtgtgcctgtggtcccagctacttgggaggctgaggtgggaggattgcttgagcctgtgaggtcgaggctgcagtgagctatgatcttgccactgcactccagcctgggtgacagagcgagaccatctccaaaaaaaaaaaaaaaaaaaaaaaatccagtctcaaattataaatacttgtcaaagccttttttcttttttctgagacagagttgcactctgtcccccaggtggctggagtacagtgccaagatctcggctcactgtgtcttccacctcccaggtttgagtgagtctcgtgcctcagcctcctcagtaggtgggacatcaggtgcatgccaccatggccagctaattatttgtatttttagtagagacggggttttgctatgttggccaggctggtcttaaactactggcctcaagtgatctgcccaccttggcctcccaaagtgctgggattacaggtgtgagctaccgtacctggcctccaagcactttttttttttttttttttttttttgaggcagagttttgctcttgtcacccaggctggagtacaatggcgcgttcttggctcactgcaacctctgcctcttgggttcaagcaattcttctgcctcagcctcccaagtagctaggattacaggcatgcgcccagctaatttttgtatttttagtagagacagggattctccatgttggtcaggctggtctcaaactcctgacctcaggtgatcttcccacgtcggcctccccaagtgctgggattacaggcgtggcccagcgtacctggtctccaagcactttttatttaatttctacatcacttttttaatgtttggttttggtggttggattttttaaatattctattataaattatgtttcacaagtgaggtcacctatatgctgttatgcactttgttatttcacagaacatgtctttatcaccttgtgtagtttcgtgttgttttttggcccacgttagtatactgcttcactgtagttcatttgacctatctagtttactttgatgaacattaagtggttttccagttgctcgttttgcttatagtagtaaatttaaacatttctgctataaacaccttctttgtttaaagaaacattatttaaatgaacatttctatagtaaaaaagtagtgatagcttttctcaaatatatatctcaccctgaagctggtgtgaattgtttcaatttcaagacgctttaaattctgttataaattatattaacataaaatgaatttatggggttgttttgttttgtttggagacagagtcttgctctgttgcccaggctggagtgcagtggtgcagtcgtagttcactgcagcctcaaacctaggctcaagcaatcctcctgcctcagcctcctgagtagctgggacgacaggcagacaccaccatgtctgattagtttattttgtttttgtagagatggggtcttgctatgttgcccaggctggtcttgaactcctgggctcaagcaatccccccacctcagcctcccagagtgttagcattacaggtgtgagccaccatgcccagctgcaaatttttgattatatgaattattaagccaactttctcttacacctgaaatacttttcagtcttttactgacatgtaatactaacctttttttggtttatattaaaaatgagtacctcagtagtgatatcttagttggaaatgaagtataagtttatatcagacttacagaaaatctctttctttgaacttttaataacctgcatcccaattgggttacatttaattgtgtttattctagaacatgacctttgacctgccatcagatgccacagtggtgctcaaccgcagctcctgtggaaaagagaacacttctgaccccagtctcgtgattgcttttggaagaggacatacactcactctcaatttcacgagaaatgcaacacgttacagcgtccagctcatgagttttgtttataacttgtcagacacacaccttttccccaatgcgagctccaaaggtaagaaccaaaatgggccgattatgaagtgatagaaaattgggttggaggattgtctaaagttacttttacctaagaagtacaggctgggtgtggtggctcacacctgtaatcctagcact

SEQ ID NO: 11777 - DNA, 2300 bp, Homo sapien
gtttcacaagtgaggtcacctatatgctgttatgcactttgttatttcacagaacatgtctttatcaccttgtgtagtttcgtgttgttttttggcccacgttagtatactgcttcactgtagttcatttgacctatctagtttactttgatgaacattaagtggttttccagttgctcgttttgcttatagtagtaaatttaaacatttctgctataaacaccttctttgtttaaagaaacattatttaaatgaacatttctatagtaaaaaagtagtgatagcttttctcaaatatatatctcaccctgaagctggtgtgaattgtttcaatttcaagacgctttaaattctgttataaattatattaacataaaatgaatttatggggttgttttgttttgtttggagacagagtcttgctctgttgcccaggctggagtgcagtggtgcagtcgtagttcactgcagcctcaaacctaggctcaagcaatcctcctgcctcagcctcctgagtagctgggacgacaggcagacaccaccatgtctgattagtttattttgtttttgtagagatggggtcttgctatgttgcccaggctggtcttgaactcctgggctcaagcaatccccccacctcagcctcccagagtgttagcattacaggtgtgagccaccatgcccagctgcaaatttttgattatatgaattattaagccaactttctcttacacctgaaatacttttcagtcttttactgacatgtaatactaacctttttttggtttatattaaaaatgagtacctcagtagtgatatcttagttggaaatgaagtataagtttatatcagacttacagaaaatctctttctttgaacttttaataacctgcatcccaattgggttacatttaattgtgtttattctagaacatgacctttgacctgccatcagatgccacagtggtgctcaaccgcagctcctgtggaaaagagaacacttctgaccccagtctcgtgattgcttttggaagaggacatacactcactctcaatttcacgagaaatgcaacacgttacagcgtccagctcatgagttttgtttataacttgtcagacacacaccttttccccaatgcgagctccaaaggtaagaaccaaaatgggccgattatgaagtgatagaaaattgggttggaggattgtctaaagttacttttacctaagaagtacaggctgggtgtggtggctcacacctgtaatcctagcactttgggaggctaaggcagacagatcacttgaggtcaggagtttgagaccagcctggccaacattgcgaaacactgtctctactaaaaatactaaaattagccaggtgtggtggcgggcacctgtaatcccagctactcgggaggctgaggcaggagaatcgcttgaacccaggaggcagaggttgcagtgagccgagatggtgccactgcactccagcctaggcgaccaagtgagactgtctctaaaaaataaaaaacacacagccaggcgcggtggctcacgcctgtaatcccagcactttgggaggccgaggcgggcagatcatgaggtcaggagttcgagaccagcctgatcaacatggtgaaaccccctctctactaaaaatacaaaaattagctgggcgtggtggcgcgcgcctgtagtcccagctactcaggaggttgaggcaagagaatcgcctgaacccagaaggcggaggttgcagtgagccgagatcacgccactgtgctccagcttgggcgacagggcgagactctgtctcaaaaaaaataaaaaacacataaagtaaactaagtactataagtagtttgcaattgtgattttttttttttaatctagaaatcaagactggaatctataactgacatcagggctaaaataaaaaacacataaactaagtactgcaagtagtttgcaattgtgattttttttttttttaatctagaaatcaagactgtggaatctataactgacatcagggcagatatagataaaaaatacagatgtgttagtggcacccaggtccacatgaacaacgtgaccgtaacgctccatgatgccaccatccaggcgtacctttccaacagcagcttcagccggggaggtaggacgctgacccttggccctctggtgctagtggttgggtagctgggctgcagtggctgcgggtgacctcactgctctgtgtcctggtgctgggctctgcctggaacgcgtgtgcacacagccggcgacgtctctgcagaacg

SEQ ID NO: 11778 - DNA, 2300 bp, Homo sapien
ctcccagcttcacccgacacggcactgccagccagctacagagccacacacgcacagcacgtggaacagctggtgaggacagcgtggtcccgtggctctgctgctggcctttcacagggcgctcctcacgcaacgtccaccctttctcctcgggagcattcactctgccaggtgccaggcccagggctgtccaggcaggggctccacactcctccaaacgttcactcaaactgcattttctggttggtgcacgcctggctcccggctcctacaggaagtttctgggggcatcactgggactgctaggttcgaaccacccatcgcgacgatgtccttccctgtcctcctagaaacgtttaagccagccacaacccctaggagcccgtgaagcacatggcctaaaatgccaggaacgcactctccaatcccggtggcagccgtgggctccaggctctcagccacggggactcacaggcagtcacgggctgtgcgcacacctggaaaccctcgtggaggccagccctgcccagatgcctgccctgccctcggcgagctcagacagactggaacagcaccaccagcgacaggcccaggcaggacacacaggctgggagactgcacggctcctggttgccctgcattccggcctgttcactccactagttactaacagcaatgcccttaatatgcgcccagctaggtggcctccgggaggcgcaaggactctcccaactgcagctgctggttcacaccacggagccagccaggggatgacagtgtagacagcagacactctgggagtggcctcagaggacgacacacacctcacagcacatgcaccccatagcacacacatcccacagcgcacgcaccccacagcgcacgcacccacagcacacatatcccatacacacaccccatggtgcacatgccttccagcatacacaccccacagcacacacaccccacagcacacacaccccacagcacacatatcccacagcacacacaccccacagcgcacgcaccccacagcactcgccctctgtgtcccgtgctgattctcctcccgccacctgaggccggaatgaggtcgtcggctgctgctccctgtcctccctgctgggaaatggcgtccgagcctcaatggggcatcaggacgtggaattcatgaacagggttgacagagacgtgaggccgtcactgccgagcctgcagctgtggacagacctgtcctcacagccacctcatggcgtcagagggtcccgaggctcacctggcagtagcccactccctggttatggtgcccatatgccagcagcacattgtacagggtcctctgtaagcaggggtccgtggtcttccggaacttcacgttgtcggggaaggtccggttcaggtctgtgggaaattcagaaggaatcacccacgggtttctgttccacaagcctcccacccctccagctgccccgagggtggccacctgggttccacttgggacttacggactggttttcaccctggccgcacagcagactcaacacagccagagcgacaggctcactgggccaggaaggagggggtgatcctgaactcggggcggagaggggccctaaccgtccttcccgcagagtcagggacagcagagcgaccccagagctggtggccaggccatggcactccctcctcaatgcccgtctcctcccggcccccagcacaggcctcctgcacctcggacctcgcgcgtagcggaggcaactctgcctcgaggacccagggtgacaggtggagagaaatgcacacaaaactttgaggtgttttcctaatttcaaagatccaaaacagaaggagacagaataaattgagactcctcagagataaaggacacggctgagagctgagagctgagaactgaataaacctcgagttgtcagcttgtgtgtgcaggaggcatccctgccggcctcttccttcctcagcaccaacccctcccactgtcccgcccaggcatctcttggcaggacagtgtggccttggccaagctgtttagtgctgggggacccggataccacgtgggtccctgagactaaccaagcctcacgctgaccaagtgccaggcctcactgaagctgacctccgcgttaaccctggacacaagccgagcaggaaggataatgccggcttgacaactccactggtttctgctcccactggccctacctctgttagaggtgttcgccaggcaccccatgcggtcaccagcagacagccgctttctgcacaagttccaagatggactc

SEQ ID NO: 11779 - DNA, 2300 bp, Homo sapien
ttttcatgttcctgtaagcagtgtgaataaaccgtaaaccaagtgtgctgagatgttcttacctgagacatgatcctcaaatatgtttctaaaccagaaagagggtttcttaagagggattcttttttttttttttttttttgaggcagtgtcactctgtcgccaggctggagtgcagcggcgtgatctcggctcactgcaacctctgcctgccaggttcaggctattctcctgcctcagtctgccgagtagctaggactacagacgtgagccatcacgcccagccaatttttgtattttgagtagagatgaggtttcaccatgttggccaggctggtctcgatctctggacctcaggtgatctgcccacctcggcctcccaaagtgctgggattacaggcatgagccaccgcgtccagctaatttttgtatcttttgtagagacagggtttcaccatgttggccaggatggtctcgatctcttgacctcgtgatctgcccaccttggcctcccaaagtgctgggattccaggcatgagccactgcgcccggcccttaagagggattctttggctttcagtggatggcattagtgtctgttttctctctcctctgggtcttccctcgttgtccttgtataattcgtcacgtatttagtgagcaattactgcctcccaggttcccttccaggagtgggaggcccagtggacagacaagggcctgtccttccagagcctgattttctcagtaatcacatagcacatgatcatctgctcgtgtccagatgatcatacattgtggatcaccttggaatttgagctcataaagttttaccctatagtgcttttcttgactgtagcctataaagttatgagtttttatctgctaaatacagctggtgcctcagatttttttcttttaaggcagcttatagaattttacaaattgcatatgccttcttttcttttgtaaagtatggtttcttttaaaatattggtttcttttcaaatatgtgcagggccaggcgtggtggctcacgcctgtaatcccagcactttgggaggccgaggtgggcggatcatgaggtcaagagttcaagaccatcctggccaacatggtgaaatcctgtctttactaagaatacaaaaattagccaggcatgttggcaggtgcctttaatcccagctactcaggaggctgaggcaggagaattgcttgaacctgggaggcagaggttacagtgagccaagattgcaccactgcactccagcctgggcgacagaacaagactccgtctcgaaaaaaataaaataaaataaaataaaatatatatagtgtagtatcaaaggaaaacagcaaaactttaaatatttgctttgaaaattaactgttttgtaggttaagagcacagtgtcgcagctttggacttaacataattaattcagatgttagccatacataccttttccatctgcctaagaaattactcagtattgactaatgaagatagctcatggcttttggcttctttctgtccctatatgtttctgtggccattaaaattactaattactttttcacatttttattgtcaattaaaatatccctacaaaatggagtagctttcaatatatagagattaactgcacgagttggacagtgacgtctgccactgaaaccgtgttctcccagctgtggcgtcccacctgaggtgctcacagctgagcccagccggcctccttgtactcagctgggcctctcactgctttgcccctttgctgctgctctgcacggctgccaggaagctttgcagagcagccatctgaccgcggctctgtttcttgaccacctgcattgaatggtgaagtgggcgtgggggcggttctgtagccagtctggtttgtgctctgttgagagggagaggagagcagaatttttaaaggagtatatgtaccagttttggtggagatggacgaagttctgggtctctttaatatttgatttaagaagagaactggtgagagtggaaagtgtggcaggaacgcgtgggccccgcaggcccctggtccagctcacacgctgtccgtcctctcggccttcagtgaagcgctatgtccggaaaggggtcccgctggagcaccgtgcccgcgtctggatggtgctgagtggggcccaggcgcagatggaccagaatcccggctactaccaccagcttctccagggagagagaaaccccaggctggaggacgccatcaggacaggtgaggcggtgggggtcgagctctggtgcagggcccggg

SEQ ID NO: 11780 - DNA, 2300 bp, Homo sapien
aggtgggagctgtcccaggtgggagctgttccagataggagctgctgtctcccagtcaggtcccaggttggggcttggccaggcctgggctggagcgggagacctttctagctgcctcggtctggctgcccaccctgcacagagcctggggctctggcctctctgtatctctcctctccactcttcctggagggcaccgctcttatctgacctgctcccccacagtctccctacatctggcccaaaaatacacttggtggcagtcccgccatcacactcaggctcgggagctggcggcccctggtccgtgctgcctgccacgctgctttccacggcagtggtgggaaagggaggttagaaccccatctccatggccagaaggcaggaattagggaaaaggggagccgtgaggcttccaggcctggggttggaacagaagctgcgcggtgtggggcgatttgggcgcaggaccccgggtgctgggaagtggggagcaggactgtgtctgttgctccagaaagcgcgagggatgcgatataggaaattcgggcgtcagttagagcccgagaggggttcagggagtcactgacttaggcagagaggagcccagacggggttcgaagaccctggggacggacgcccacctgtcagtcctggactgtggggcacccgtaggccgaggggcaggaggctatggccctgtctcctggcttgggtctaaacatcccaaggaggtcagaccgtagagtgggggctgtgtgatctttcaaatgagggacgccgcgtgttaccaaaggccagtgctgaggagctgggctgaaagcttggggagttcccagaaccagcagactaggaacgggaggaaccgtgtcgggggctctgctccgctgggcactgacccccaccccgccccccggtcttgcaagggctggagaagggtgaaaggcagaggcgggagtccgcacttagggaccggtccgttccacacgctgctgaccaggctcctgggtggcgctcgcatggaacattccggaaacacccatgggaaggtcccaagttggttccgaaaggccctgacggacgcgcaggggacgctgagcctgtgatcctcgcctcacccagacgaggccgggctgcttctcacaggaaagtgcgtctggagtccggggacggcctcctcctggggcctgtccaggtcgccctgggcctaaattacaggcggggagaggcctgtcggaggagcccccgctccagacccctgggggacccagggcgaggtcgccccagcgcctcacgtctgggggctcccctttgccacgtcgccagagcaaaattcaaaatctgcagttctggcaaatttccggggcctcccggacacgaaaagcagctgaaatctcaggacaatgtcattggatgcggaccgagaagaagccgttcggaaccagagctgccccggattctcccaggcctggctcgccggtggggggaccccggtccctggtttgggggggcaggaacgggcgggcgcccctgggggcttctcatttgtgtgttggtctcggccttgaaatgcagcggagaaaataaaaaataaaataaaaataggagtcaggtgtcagagtcgggtcggccaggcactgaggtttgaaggaatcgcagaagaagctcctctcacccgggtccaggccgcgggggttctgcgggaggcgcccccgattctgcccgcgggacgccgcggcctcggaagccccgggagcaggccccgccccgcccccaccctcctctctccccaagtcctcccgcccccccagccccgcccctcccccgccctgggtgctcccctgcccctcccccggccctcccccgcccctcacccgctcctgcccctcctctctccccaggtcctcccgcccccagccccgcccctcccccgccctgggtgctcccctgcccctcccccgctcctgcccctcctctctccccaagtcctccccgcccccagccgcccctccccccgccctgcccccccccgcccccgcctccagccccgcccctctccgctccccgccccgcccccacgcgcccgcggtcccgccggaaggacttaagcgccccggagccgggaggcgaacttgggacccgctggcctcgctcggtgcgcgcctccctccccgcatgcagcccgccgagcgctcgcgggtccccaggtgtgtggcgcggggtgcgggcgtccccggcggctgcggtccccgcgcgggcccgcgaccccccagaggaaacttcggggacgccggcctcct

SEQ ID NO: 11781 - DNA, 2300 bp, Homo sapien
tcttgccgaagatcatgggcaagagctcggtgctgtccaagctgcgggagaagttcgagcagaacagctgcctgtgctccgaggccagtgcgctgaggctgcacacgcaggagcggaagaagaggaacctgcagaggaagaggatgcaccggccggaggtgcgcgtgctgcacacggccaccatggccagcacctgcgtcaagatgccccctgcccgctttctggcctgcacggctgagcccctgccggccctcagcatcgccaccgtcgtctgtggccccaggagctggctgtcccactgcaccaaaatcagccactcggaggcaaggcgtccacccagaggagaagccagcgtgccccctagtgccagggagacggggcccagtgggaacaaagcagtgggaaaggggcccctggaggaggagccccaaagacagccaaggccctcgaagcccgtgacaccccaggtgatggctcagagggacggccacgctgtcccctcgctggccttctcttgtgctccctgcacaggtggagtccttcctggccttgtgcctgcatcatccccactgggaccggccagcccttggggcaccggatcagccggaggtgatgggactgcagaccccaccgcagagagcaccgcaggaggcgtccaggaggtgaggggagccaggctcacgtggcctcctgggcccccaggcgagtgtgcaggggagggccctgaaatcaccatgactgtttgcagttcagaggatgaaagggaaggagcaggcttcccagacccagggagagaccccctctttgccacccagaagtatttcccagaacagaaggtgccggagcacatcccacccctgaacgctccatcggtccaggctgctcggagaacacagcctgccacggagcctccacggataactgtccaaattccagttgtccatgaaatgccagcccctcccaccaggctgcaaaatatgtcaagtggtgaaaacaaaccttgtatttgtggaggagagaatgtggttgaaaatgcccacacagaatttcccaccgtgactgagaacagaaggggtcaccgagccccagtggaactgagcaagctttcagggatgcaggcgggactcagcgcctcttcgccgcaggggccacgggcagctccgcgtctggcagcagcaagaggggctgtgggcgccgaccacagtgtcccagagacacttctgacacagagactccagacagatcctgctggcgggaaggaaaacaaaggcagctttgagaattcacacggtcccaggaatcctgacgatatttcaggagagaggacctctgagctcagagatgtgaagcatccgttgccggaatctaatgaaatatcaatgcagaagaagggctccgcaacaaatgatcctgcagcctcacaaaaccttctgaggggaaacaccagccatgcctccagcagccagcaagtgccgtccccgactgggagaaacccaacaggagcccccacgtcactggcggcatcatccaaggggcgtacggggcctgagggtgtcaccccgatgggcatgacagtgcccggtgcgctggaggaatgcagaaggccgctgctaatagagtcttctcagcccctgaaggctgccgaggaaatcaccagccatgatgttcgcgagaacccactgtcctcattaaatgaaccacccaaaccaggtatgaaagcctgtggggcgatggcagctgcagggagcgttgcgagccgcgccacgcctgcaccagcgccaggcagcacccagagccctggagaccgcacagcgggagagccagagacgctgggccagtggggaagcagagccttgtccgaaagccaccccagaggagaggctctccctcgagaccctcacagccacggcctcctggcccctgggggatccttggagcccaagagtggagcagcagggaggagcctcctgagaggcgtggccctcgtccagcacccagaggacattgcgaccctcgcccgccacccggaggatgctgcggccctcgcccggcacccagaggcggcccgattatacatttcaaacacatcagcagccagcagacatacagcagctgtaggaggcagaaaggatgtggctgtggaaggaaaccttttgggtttcagcacagagtctggaattcctgcttctgatcatcctaggccacaggcaaggagcgtggcagagtcccccagctatggccctggcctcccgccgtcgcctcctgagaacccacaggcaaagggcagggagggcgtcagg

SEQ ID NO: 11782 - DNA, 2300 bp, Homo sapien
gcaattactttttattccaatattatgataatcctcgctctataatcatagcctaggaaaaaccaggccatacagagataggagctgaggggacatagtgaggtgtgaccagaagacaagagtgcgagccttctgttatgcccggacagggccaccagatggctccttggtctagctgtgacgccagcgtctgggaagacgcccgttaccaggcggatcgtggtccagcagtagcaaaaggtggcaaggaacaacacctgctacttagcagaccaggaagggggggggggtctccctttccccaggggagtttagagaagactgctcttccacctcttgtggagggcctgacatgagtcaggctcgcccgcagttatccggaggcctaaccgtctccctgtgatgctgtgcttcagtggtcacactcctagtctgccttcatgttccatcctgtacacctggctctgccttctagatagcagtagtaaattagtgaaaaattagtactatcagtactaatagtccctgatatgcagaaataatggcataagctgtctttctctctgtctcctctccctctctgcctcggctgccaggcagggaagggccccctgtccagtggacacgtgacccacatgaccttacctaccattggaggtgactcgcattctttaccctgccccttctgccttgtatccaataaataacagtgcagccagacattcggggccactaccggtctccgtgcattggtagtagtggtcccccgggcccagctgccttttctcttatctcttgtcttgtgtctttatttctacactctctcgtcactgcacacagggagagacccaccgaccctgtggggctggtccctacagcttacccctctagaaaccaaagcaagcagatttttttcaactcactaaaaatcaaagtcgaaatttcacttaagtttatctttgttctttaaataacaaattgtagcctatggaagggggtctttaagctgtgttaacaatggtgagggctgggcacagtggctcacgtctgcaatcccagcattgtgggaggccacggtgggcagattgcctgagcccaggagttctagatcagcctaggaaacatagcaagactccatctctacaaaacgacaatggtgagtgctgactccacagcacttctgtaccaggcattgttccagctgcttcacgcatgttatcctccacacatgctcctcacatcaccgtggaggctgattttatcacaatcttacaggagaaaaaattgacatacagagaggttcaggcgcttgcccagtgccacacagcccagcgagtggcagagcttggacgggaaccagagaatctggcccctgtgctcgtaagcatcctccctgactgctgagatcacggtggcctgcaggtatcctaacaattgcagtgtgcaggggctcttcagcatgctttccaaagacaggcagacttttacaaatggaactacgtttggcagctttaagtaagctgcactgaaaagtccttcaccccacgagccacggggctgtgtggtctggcaaaccctggctctgctgctagagtgagcacaggtctgagggtcggggcagcctgtgtggctccctccttccgggtgagcctctctgaaccgggctgcctccttccgggtgtgtctctctgaacggggctccctccttccgggtgagcctctgaacagggctgtctccttctgggtgagcctctctgaaccgggctgcctccttccgggtgtgtctctctgaacggggctcactccttccaggtgtgtctctctgaacagggctgcctccttccgggtgagcctctctgaacagggtccctccttccgggtgtgtctctctgaacagggctccctccttccgggtgagcctctctgaccggggctcactccttccgggtgtgtctctctgaacagggtccctccttcccggtgagcctctctgactggggctgcctccttccgggtgagcctctctgactggggctgcctccttccgggtgagcctctctgactggggctgcctccttccgggtgagcctctctgaacagggcacgagagcagactctgaaccaggaagtagccgtgtctagcgctctacaagacacataggagaggtggcatccatggccctgaaacgacaagcccatgttgccagcgcattatcaccaagtcacttggcaagcgtttagcaggtgtgtgtgtgtgccaggcctggggaggggcggcctcgcacagagagctcggccat

SEQ ID NO: 11783 - DNA, 2300 bp, Homo sapien
agcggtgcaccgtgcacctgatggggtggctcatgtgaggaatgagagatctcacaataggcaggatttacgggagtgtgtcggggcaggaggtcatgtgtgccagcacaaactgctggaaaccgtcccttatcggaggcaaacggccaagcacgggggtctgaggatcatgtgctacctgccgattcacggtgcacctgccagcgttccggaatcaacaacgccagctcctctcagtgacattgtacatgtcattgtgttattttcgcttgaagtttatatccattttagacctcaggcttcttggggccaagaataaactttcttctgatccttgttgctgtgtccacagtttcaggtacaaagtaggggctctgcaaatatttgttggataaacgagctaaccttatcccgtcctgtttgctgagggagccagctagtgctcttggcaaaggtttccgccgcctgcgaactgaagcgctcagcgagcgggctgtgttaatcccctcagcagcacacgcttcggccccacagtgcagttgtgcctaaaacaggtgagagtttgaacgaagggccgcccctcctgtctgtcttgtttggatagggaccctgcgtgcatgctgttttttgttttggagttttgtttgtttgtttgtttgtttctgagacagagttttgctcttgttgcccaggctggagtgcaatggcgtgatctcggctcactgcaacctctgcctcctaggttcaagtgatcctcctatctcagcctcccaagtagctgggattacaggtgcccaccaccatgcccggctaatttttgtatttttagtagagacggggtttcatcatattggtcaggctggcctcaaaatcctgagctcaggggatccgcccgcctcggcctcccaaagtgctgggattacagccatgagccaccgcgcccggcctgcatgctggttttgaagtttgtttctgaatctcaggatcatgctagctggcatgactgtgctgatggctgcctccaccagcagacagtggagggtgaggtgaactcactgcttgagatcctccgttttaacaagtgctgatataacgccaggcggttaaatgcttcctactgtctcgctgtacactacgagagtttttatcagacgcatttcttcagtccaggtgtaactctttgcttcccctgggtctgatggaaaccaggccccgaggaaggagacgggagagacacagccctgctgggctcccggcctctgcggagaactgtcctggggtggggtcgggagatggactgttttcctaatttatttcaaaccaggaaccctggctgtgtgcattctgcctcaccccccgtctccatattttttaatattcttttcatgagctagcagggatgatgtaaatacactgagctgaccgagggccggatgggaggttctagtgaagcctgcggtttgctgacgactttccccctcagtgcagtccaattatttgggagccgttaaacaccgcatgctgagaagacaccgtcattgttcacacaggagctagatagactttgttccctctacactgcattttttaaaagttttctatcaaaaacacatttcataatcgaaaagttttctaaatgataaaaccgcatgtcacagattaatctcaacattatgttgagtgaaggaagccagacaccgaaggccacacattgtatttgaaatgtccaggaaaggcagaactgtagagacagcagatgggttgttgcccgaggggtgagggcacgccccgcagcgggcggcagtgacaggcacgcctgcacacatctgctcccgcatcaccccacgccacacacggggaagtgtgcgcactccttccagggacagcgagaggagcccctgctctgtcaacgctctgaatgtgctgcggctgccggcagaagctagcaggctcctctgctgaggagctggtgcctgtccagacgcagaagaaaactgacacctcccacgtgggggacagaaaggtcctctcattggtgccacctgcagagatagacaaggagcgcctggccatcagaggacgctcctgacagtgacacagtgaccactataaaagtcaggcgggctgaggaggagacaaaggccaggacgctccgcagctgttggggaagaggagctgcctcctgggatggagaaatttaaggctgcgatgttgctggggagcgtcggcgatgctcttggctacagaaatgtctgcaaggagaacagcactgtaggcatgaagatccaggaggagctgca

SEQ ID NO: 11784 - DNA, 2300 bp, Homo sapien
aaaatgtacacaattcttgaaataaaaatctggacaatccagtggaaacagcaaataaaatctctaaactataaaaaagtctcaaacactttaattgtgaccttgtgaaatacgactcatataatctggcaccaaggatacccatatgtaaaatggaaagaaattactcttaaaatgtccttagggtcaacttacccggggctggcgggccaatcatgttgatcgaataaactacgtaagtttatggatcactttcactctgtttcggtatacagcacgctagagggagggggagttaaattcatccctgctcttggatctccaacctcggcagcagtggaacgctcctctccagcatcctgaacatgttcaagttttccccaaactaagttcctgtccactctgcccctgtcctcctaaaagctggagcaagctatctctacctgcccaggtgtgcatcctaactcaggctacctggctccagcccggcctccgcagtgacccctaaaggtcacaaaagctcggctgctgcggtcagtgggatcttttcagctgctcttttgttcagcactgctgatggctccctcctcctttaaactccatcctcttggtttcgacacattctagtgtcctggtttctcctaccagccccctctcagtctcctttgtggctcttctcccatcctgaagcttgtcctcaccctccactcccctctacacgttaccgtgtcccttctccggtggctctctgtgccttagccaggacaatctttcagctcctatacgtcatcatcgcctaccactaagggtctgtgcattctgtttcttctgcctggagccgcacacggctggctgccccggaacctcactttttctctggctaatttccagagaaattctccacagttcaactcacaccctcagcatctgacaccactcccacagccgcatcctacaagttcctggaacccgtgccttagcctttgtcccaactgtggtcaaacaattgtgcatctggtgcctgtctcccctgctggggcatcaactccctcaacgccaagatcatgcctggcccagcaccagtcacacccagcagcaccttgctggcctctgaaccgatgtggactgaataaatcccatccatcaccatttccaccacatttcaaagtaactgatgtgcacctccagcagcctccctcctgcgctgcggaactctaccagctccacagatgcacacctacagccacgctacagctcccggctagagcccgcgctagggccccgctgtgcctctccctcccctcccggcagcagggcctcccccgcgaatctgagcttctcgcggattccttccttgcgctgttttggtcaacagcctcagcatctgcacagacgcccgcaggagcagccgagccctcgcccgcctcgactgcccgtttcgaagccgccctgggaagcccccggcctgggttcccgctcggccccggcccctgccccaaggcccctacagttcctcccggcccccgccctccgctcactcccggtcgtccctcgcggctccgggtcaaacccgcgctccccgcggtcccgcgcctccgacgccaccgctccggctcgcgggcccgcggcgcgttcctccctcggatccacgcggaacgccccgcgcagctcgctgggctcggcctcccacatccagcgcgccgcctgcgccgaccttggggcccgaccccgaccccgaccccgacgggcagaggcgacgccgggccacctaccatctcccccgcgccgcccgcttctggccggccccggccttctgcgcaggcgcggcggcggctccgccctcgtcctcggacggccgcggccctcggctccggggcagtgccgggagccggccgcggggactcccactcccggcatgctcagcgccgcccgggggcccacgggagctcgcgccccacagcccctgcgcgtccagccctctgcgagggccttggctcgcccctgcggggtccaacgccagcctgcggctgccaggccccacgccggccaggaagtgctcgccgcccgcggccgacgggacccgcccacgccccgcctcttaaagggggcagtgactgcggctgggcgggagtccgggtcggcttggctgagcgggggcggtgctgggcagggcggcggccgctccctcccggactcccggcctcccggcctccctggtcccgcctgggaagggatgcaaggaagccctccggcgctgcgctccgaggcgggagacagcgtccccctccgcccctcgggtc

SEQ ID NO: 11785 - DNA, 2300 bp, Homo sapien
ctcctgcctcagcctcccaagtagctggaattacaggcgctcgccaccacacccagctaatttttgtatttttagtagagacggtgttttgccatgttggccaggctggtctcaaactcctgacctcaggtgatccacccacctcagcctcccaaagtgctgggattactttttaaataatgaattcttagaatttctgcatcttgagcaattgatacacataacaatgcggatgtatctcaaggctgagtgaaaaaaaatctcaattttattgagaagacacacaggtgtagattcacactcactagtgcatgtatagttggtgcaatctcaacaggtcaggggatttgatcaaagaaaattccccacatatactatggttttgcaaggtgctaccattggagaaaacagggcaaaggcactctgtaggatttctctgtattactccttacaacttcatgtgatctacaaccatctcaaaataaaaaggttttcaaattctacctaagaccaggtgcggtggttaatgccactgctgtattacgacacaattatctgtattcccagcgctctgggaggctgaggtgggcgaactgcttgaggtcaggagttggagatcatcctgggcaacacagcaagaccctgtctctattaaaaatgaaataattagccgggcgtgatgctccctgtggccccagctcctggggaggctgaggcgggagaatcgcttgagccttgaccagccactgcactccagcctgggcgacagcaaaactctgtctcaacaaccacaaaaaagctttagaatatttaagtcaagcctgtaggagaaaaaaactacaaatatttcacaagtaatccaatcattaagacactccttttgaaaaagccggtaaataagataaatttggaagacagaataatcagaaaaacaggcagtgaatagggacccgatacgcagcggtcttgcttcccccgcgcaggcgtccacaccctgggtcatggacaccgtgaggagccgttaggagtcacaggaggggggccagggacagggctgcatctctgcggccggccctggaggccccgagtccacccgggcggccagggtgggaacgcaggttccattccaggttagaacgtgggcctcagcgaagagcgcctaggcaaggcctggaggagcgggaccccaggccacacagaccacccgaccccgggagacaatacctgcaagaaaaggggagccccgaggagagagagaggggaggtgagccccagggagggagagagaggaggggagccccagggagggagggaaggaaggaaggggacccctgggaagggaagaagggaatgggagccccggggagggagagaggggagccccagggagggagggaaggaaggaaggggacccttgggaagggaagaagggaaggtgagccccggggagggagagaggggaggggagccccagggagggagggaaggaaggggaccccgggaaagagccccggatggacgggcctggtgctcaccgggacgcagggatccgcgcccgcccgtccggcccgagcatcaccgttccgcggcctgggccgggctctgaggcgccaggacccgaggggcggagggggacgctgtctcccgcctcggagcgcagcgccggagggcttccttgcatcccttcccaggcgggaccagggaggccgggaggccgggagtccgggagggagcggccgccgccctgcccagcaccgcccccgctcagccaagccgacccggactcccgcccagccgcagtcactgccccctttaagaggcggggcgtgggcgggtcccgtcggccgcgggcggcgagcacttcctggccggcgtggggcctggcagccgcaggctggcgttggaccccgcaggggcgagccaaggccctcgcagagggctggacgcgcaggggctgtggggcgcgagctcccgtgggcccccgggcggcgctgagcatgccgggagtgggagtccccgcggccggctcccggcactgccccggagccgagggccgcggccgtccgaggacgagggcggagccgccgccgcgcctgcgcagaaggccggggccggccagaagcgggcggcgcgggggagatggtaggtggcccggcgtcgcctctgcccgtcggggtcggggtcggggtcgggccccaaggtcggcgcaggcggcgcgctggatgtgggaggccgagcccagcgagctgcgcggggcgttccgcgtggatccgagggaggaacgcgccgcgggcccgcga

SEQ ID NO: 11786 - DNA, 2300 bp, Homo sapien
ttttagtgtgaagtttgacttttcttcagtgtcatatatcgaaaataaaaatactaaaattagttttaaactaatatatacatttgaattaaggactttgaccaagtatgcttttaaaatgatgggaagtttctgaaattactgtatcagatgttgtattagctgtttacattttttaaagccatcatttcttgagtacctctactataccaagcatcatgccaagccctttaaatatataaagtatcacgtcatcttcatagaaaaacctgtgatattattacacagcataaacgttagagaaaatacagacattaaactttctttaccaaaatatattttgggggagagaaatatgattatcaggcaaatgtataaatcaaggttttcaataacactgattcatttgtcttgcctgtgtgatatgtgcatgagctactgtgaccctgtgtacagtggagacgtgaagatacattggtaaggtccagatttgtggtggttttattatagagaaaaaacatgagtttgagtaacattggctcctggtatgcacacttcataacatatcaacagtattttaacatatgctagttattatctcctatgctgagattctccaggtgccggtgacctgcagctatactagccctccagttgcgtgcttgacctgcagctgtgtgtcagacctgcagctgtgtgatagacctgcagctgtgtgtcaagtctgcagttgtgtgtcagtcaaacctgcatctctgtgataggccccagctgtgtgctaacacctgtagctgtgtgtcaggtctgctttggtgtgctagacttgcagctgtgcatgagacctgcagctatgtgagaccagctgtgtgcaagacctgcagctgtgtgtgagatctgcagctgtgtgcaagacctgcagctgtgtgtgagatctgcagctgtgtgagacctgcagctgtgtgtgagaccagctgtgtgtgagacctgcagctgtgtgagacctgcagctctgtgtgagaccagctgtgtgtgagacctgcagctgtatgagacctgcagctgtgtgagacctacagctgtgtgagacctgcagctgtgtgagacctgcagctgtgtgtgagacctgcagctgtgcgagacttgtagctgtgtgagacctgcagctgtgtgagacctgcagctgtgtgagacctacagctgtgtgagacctgcagctgtgtgagtcttgcagctgtgtgagagacctgcagctgtgtgagacctgcagctctttgtcagtggcatcagatgatgtctcatgactacttagtaattgaggcgatgatgttcttctaggctctggtcctctctgctctggccttgtcccacccctttagctaagaataaatgtttaaaagtaagattattgattaaatataattgtgtaaaatacattactaaattatattgccagcatcatccatcagttcttcaaatgattaatgctgttggtttctacatgtgttttggaacagctttcccttgtaacttgaatttgactgtgcattgcatttagatagtagctccacattcaggtctcacatctggttttaaagtaccgctgcactcacacacatgatagacctggagcacagtcactgttgagtaaatgagttttgtgtgaatggatgacctacagatattacatttacttttgtgtaacaaatgtttcttacgtgtgttgatgtacgtacacaaaaacctttccctaaacatttggctaagctcagttatgtttgaataactaggacacgtgacttccctagctgaccagaattaagttattgacatatgaacagggacatttgacaaagcaggaggattgattaagaaagtcatgtcctagcttatttcttaatatatctcactcttcttttcttacaaatgaataggaagaaacagaatatatggaacttctggcagcagaaaaacatcaagttgaagcccttaaaaatatgcaacatcaaaaccaaagtttatccatgcttgacgagattcttgaagatgtaagaaaggcagcggatcgtctggaggaagagatagaggaacatgcttttgacgacaataaatcagtaagcgttccagaacagctgcttcttcacctcctgagccactcactaatcagaagacatgttgttgaaattgttcacgtgtatgtttttaatgtagattgaaaatgaagacaaactaaaatgcttctctgtcgtagagaaaataatttggtcttgtagaagtaagctaattatcttttattttccttt

SEQ ID NO: 11787 - DNA, 2300 bp, Homo sapien
ttttttttgagatggagtctcactctgtggcccaggctggagtgcagtggtgtgaactcagctcactggaagctccgcctccagggttcaagcaattcttgtgcctcagcctcccgagtagctggggattacaggcgtgtgccaccatgcccggctaatttttatattttcagtagagatgaggttttgccatgttggccaggacggtcttgaactcctgacctgatgtgatccacctgccttggcctcccaaagtgctgggattacaggcatgagccaccatgcctggacatatataggaatttctaataaaatttcaagcatatgcaaaagtagaaagaaaaatacagtgcatctcaaggaacaaataatccagtttccatgatcaggcagactaaccttgtttcatacactaacctccactctaccctcctaagggaaaccccagtcatcctcttaaccatacctttcaatgtgcatctctaagacacaaggctggtgtccaaattgggaagaatgaatttaatgatcctgtaagcagatgagattatctcatatgtagaaaatcctaaagattccacacacaaaaatctattacaataaaccagttcacaaagttgcagggcacaaaataaacacacacaagtcagctgcatttcttttttttttttttttttttttttgggacggagtctcgctctgtcaaccaggctggagtgcagtggcacgatctcggctcactgcaaactctgtctcccgggttcacgccattcttctgcctcagcctcttgagtggctgggactacaggcgcccgccaccatgcccggctaattttttgtatttttagtagagacggggtttcaccatgttagccaggatggtctcgatctcctgacctcgtgatccgcccgcctcggcctcccaaagtgctgggattaccagcgtgagccaccgtgcccagccacttaccttgtttttaaaaacaattattataaaatactttggatcaagaaaaaaggtacaaagcatgtcatgaacaaccagagccatcactgagcttctggaagaaatgtcacaagcagccgactgccctgcgtctctctctgatggcatgcctccccatctctggcacagccacccggccacatctgtcattctcaaacacttcttgttgcttttagtgtaaaagtttgcatgtatgtaaagttcagactttaaacacataaaacatgttgcattccacatcttctatctttccctccatgctacagaattcacatttgcttctgcagcattccaatgtatgaatacatcttaactgtccagcatgttactgaatattcagttgattaattttttgctactaaaaataatgctgttttgaattataataatttgcaagaattttctaggatatgtatatagaaatggaattttctgattgcaaaattgttctccaaagtggctgaaccaatttacattcccatggagaatgcttagatcttgcaactccacattcttgccaatggtagatcaggttaaaaatgtctgccagggccaggtgcggtggctcatgcctgcaatcccaacgctttgggaggccgaggcaggaggactgctcgaggccagggttcaaaaccagcctgggtaacatagcaagacctccatctctacaaaaagactaaaaacttagccaggcatggtggcacacgcctgtcatcccagctactcaggatgctgagatgggaggatcacttgagcccaggaggttggggctgcagtgagccaagatcaagccactgcactccagcctgggtgacagcaagactcggtctaaaacaaagcttggcagcaagctcgtgtggatggcgtcgatctcagtcccatcagcctgcaccccgaatactagcgaggctcatgtcttcctgttgcaagactcggtctaaaacaaagcttggcagcaggcttgtgtggatggcgtcgatctcagtcccatcagcctgcaccccaaatactagcgaggctcatgtcttcctgttgcaagactcggtctaaaacaaagcttggcagcaggcttgtgtggatggcgtcgatctcagtcccatcagcctgcaccccgaatactagcgaggctcatgtcttcctttttgttcatcatttaggtttcttctcccgtaagttatttgctcagatattctgcctattttcccattaggttactttttggtttggatttacagacgttcttgatacattctgaatattaatcctttgctctaaacaaacaataaataactat

SEQ ID NO: 11788 - DNA, 2300 bp, Homo sapien
agggctcaaatactgacatttaggaacacataaagaatccctgtgaaacagaaggaacggacctaggaagatagggccatttgaggaacatcagtgttctctaagtatctatttgtgtgaaccagctcgcagaaagtgagcgtttctggtagtcttcaaagaagaaacgggtgctaacttgtaagcagtttaagccaagtgaccagagctttagggggtgcggcgttgcctgaggggcaggagtggccaaaatcagcataaaacgtgcaaagtgggctgtcatgtaataatacaccgcacaggcagagaggcctttggtcagctcctcaagtcctctgtagatgttccttaccctcggcgcgcaccagcctctgccgcctgctgtggccctgaacttcggactcttctctggcctagcccgcccttggctggggtgctcgggcctggccctagcggcggggccctccagggtggattaagtctccaagactccgggaccaccaggctcaccatgcaatgaaactgtttctggagttttcctgtccctgctttccctcccgagtcccgggccaggctgcgtccggtgggcaccgaggacgcccagaattgttgggaatctgggcggaggcccgtcgtgggcttggaggccaccgggtccagcagaggcagaggcctctgtgccacgcacgcacacacacctgctctcctccgtgtgtccacatacacacgtctatgcacacacctgctctccatacatgcacagccccacacacagtcggccctttatgtgcacacacactcgtgcacacaagcggccccctctcctccgtgcatacaggcgcacacacagctggctctcctctttgagcacacacactcaagcacacacccggccccgctcttccaagtgcacacacactcctgcacacactagtccctgctcccccccccacactcgcgcacacagccggcactctctgctccctgcacacaaacacacatcctgacatacccggccccctacctgctgccccatgtgcacacacactagtgcacacaccagtccccgctccctcacatgcacacacactagtgcacacaccagtccccgctccctcacatgcacacacactagtgcacacaccagtccccgctccctcacatgcacacacacgagtgcacacaccagtccccgctccctcacatgcacacactagtgcacacaccagtccccgctccctcacatgcacacactagtgcacacaccagtccccgctccctcacatgcacacactagtgcacacaccagtccccgctccctcacatgcacacacacgagtgcacacaccagtccccgctccctcacatgcacacacacgagtgcacacaccagtccccgctccctcacatgcacacacacgagtgcacacaccagtccccgctccctcacatgcacacacacgagtgcacacaccagtccccgctccctcacatgcacacacacgagtgcacacaccagtccccgctccctcacatgcacacacactagtgcacacaccagtccccgctccctcacgtgcacatgcactagtgcacacactagtccctgctcccccacgtgcacacacactcttgcacacagccggccccgctcccccacgtgcacacaccagctcccgctcccccacatgcacacacactcgtgcacatagccggccccgctcccccatgtgcacacacactcttgcacacagccggccacctctctctccggacacacacagtcagaggcgcgcacaaacacagtcccttggccgccgagcgcacgccgcgcgcgcgcactgcccgtcccggcgcaggccccagctacatctccgcacgcgcacgcgcacacacggacacgcgcgcacagcccctccccgctctcccagggcgcgcagcactggcgggaggagcgggagaccgaggagcagcagaagaggaggaggagggcgccgaaggcgcgaaaaggcgcgcaggcgcgctgcgcggagcgggcccgccgccgcccacgtcaccgcgccgcgcgcacgtcacgccggcccgacgctcggccagggtgagccccgcgtcccggcgccactcggcccagggcagggaccccgccacggccgggaccgcccggcccggccccagcccgcgcctctccgcgccgccccgcgctccgcaccgcgccctctccgcgtccccgcccgcgcggccggaccgggcagccaggtgcgggtgggcaggggatgccgcgggagccgcgggcgggagcc

SEQ ID NO: 11789 - DNA, 2300 bp, Homo sapien
caaggggtgcacgctggcctgctgggcaacagcaaagtggcctcggcacaagtccccactctccaggccaggggccagctcccatctcaaactcagcacctgaataggcaaccccatttcagccacacaggatccaaggccacagcctcccctgtgtcctgcccttaggagtgtgggtgtgagtctgggtctctactgacactttagaacttactaagacagacccaattatagcctctgtggttttttaatatgaagtcattcttatgggttgatattcagtagctactactagaccacaattaccagcttgagcatgtaaggagctgtaggaaagaccctcatgtgggtcctccttgcatttcttgtgggctgtgacccacaggaactcagtaacaagcaccaccaaaacacaaatagtttaatttgccttttttttttttttttttgagacaggctgttactctgtcacccatgctagggtgcagtggtaagatctcagctcactgcagccttgaccttcccggttcaagccatcctttcacctcagcctccaaagtagctgggacaggcatgcaccccatgcctggctaatttttttttatttgtagtagagacgaggtctcattacgctgcccaggctggtctcgaactcctgggctcaagcaggtgtaagctaccacgcctggcctagcttcgtgtttttaacatattgctgaaattgctattaattttaagacatgtgcactggacttattttcctgttaaatctttacactcaagatgcaaccctacctgccagtaaggacacctcaaggtgctaaacacattaacatataagccaacagcaaaggtgctccttggctaaaactaaccttaatttctattagaaaaactatattcaactgtatttgtgtttgtacttcatggagataacagtagattattctcttctgtcttacattagacaaaaccatactatgagtagcagcagtaacagcaaaacacacgttcgtaaaacacgccatgctgctagaaaaagctgaatcaattgaaaataagaactataaaagatgacatcaccagtgcccactctgtgacagggtctacgaatgtgactaatttccatgccaggcccaaaaggggacctatcactgccgtcatctttaaaacacacaggtgaccacggttctcacaacctgaagctgcacttgcctggccaggatggaggcgctgcccgggccctcaacgcctccctctttgccagccagcacccgccagggtgtgtccagggggctcctcccctggggacacacaagccctagagacccaggagggtgcgagggcatgaagaggactctcccttacactcgaaggcccatgagggggtcagcaagcaacacacagcagccaggtggggcatacacctggaccccacgctgtctcacccttctctgccctgctcttctctgcactttctaatctactgaacaactgaccatttccattgctaacagctccccactagagtataaaccaggcttatccgacctgtgtcctgcaggctgcatgtggtccaggacacctctgcatgcagcccaacacaaatttgtaaattatacgttttttttttttttttagctcaactattgttagtgttattctattttatgtggcccaagacaattcttcttccaatgtggcccagggaaaacaaaagatttgacacccctggcatcaactctgtgaagcaggaattttgcctggtaagaaaacggcccagcaggggccctgcagtcccgacatcacaggttcacaagccaggcccagggcagggctggagagagggacgccagggccgcacacttctcaggggggaccctgcaaatgattcaggcttgagggtcacccagtctctgtcacagccactcaactctgcctacgcaacagccataaaagtgtcaaggaacaatcttaatttcaaaagtaagcagagctgagaagaaagtgacccagctgcactgagggatccccctgaggactggagtggcctgcgccagaccccagggcagaaaacacttgcactgcacattaaactgcataatgaatgaagagacctggggaagaggccactctataaacagcagctgggatgggccccgcctgctaccaggaccctcctggccccagcacgggactcctgcacagaactctctccgctcctcctttgactcgtgcggagaactccatccgctcccctctcgactcctgcaggtaactccatccactcctccctcaac

SEQ ID NO: 11790 - DNA, 2300 bp, Homo sapien
tgtggtggtcacagtcctaactttctactacgttgtgtctgacaccactcagatggggggagagaggggtgaccggtggctgccagatgtgggtgggattctgggcccccctcattgtctggcacccaatttgtatagagcacctagttctatgttttcagagcatgctgtggggaaactgccctctaccaaggtctctggccctcctccccacacgtatgtgtccagaagaaggtcattctgataacatgtgtacagctcagcacatgtacctgcttctggaaattcagagactacattaggaagactaaattcaaagatgtttagaaataattcatactttgttcatttcaagagcatctatacccttcacagacaacagttgctgcatccaggtgttgtcagacccctggcactctggggtcccagggccacagtctgtgaacaatcagactgtggcctttactgccagaccctgtgttcttatcgccctaacattccaaagtcagaaatgggtacaatgttaaaggaaggataggtccattaagaaattatggctgggcgcaggggctcacgcttgtaatcctaacactttgggaggccgaggtgggaggatcccttgaactcaggagttctaaaccagtctgggcaacatagggagaccccatctctacaaaaaaataaaagaaataaaaattagaaattaaaaaaaagaaaagaaatgataggaatccaggctaaaatgacatcattccatttgaattttagggcaattattttgcaaactctaaattatcctaaaaaattaaagcagcgtaatgcctagaggaattttgtttcttctaagaaatgaatttggttacacgggtccctgagagggacggcctagagttgacagtatgggaaactctgcatgtaattctggacacacagggctagtcgacttcgaatcatatttgtcagaaggcccctgagcacatttcatttgccctgcattcccatcaacctcctgcagagatgggcactgcagccagcaggcagcaatggcatctgccatccaggacccctgtctccaacagcaaagcgtctgagccggggttctgaagtgcgccgcccaacaagactgcctgggagccctccacgtcctggtgctcggacccatgggcgagaggctcaggcagaatctccgggcggaagtgggcagtgatgacttcatggtccctgccccggccctgtgaccccagtgcactgcccggacccccggtgaccccgaggtactgcccaggctgagcatcccccacctggaccctgccttactccctcccaccagcactgttagaaatgcagtctggggcccccacaggactcgctgggctgaatctgcattcaacagatgctcagggctcctgtgcacttcattttgaggaccactagatttaggggtttgtgtttatgaattcctccatggacacaaaaaaatcctaaagggccctcggtgccactgccctctggggatctaagaggctattgctgctctgggtgaatctgggaggcagaggagtccccggggacccctgtgttccctgccaacccagctccagctgccaggctcacccttccactgggtgacccagaatcggggcggccgcagcggggggcccagggagccggtcgcccctcactcgcctgcctcacgccctcccaggccagggatgcggccccagctggctcagcccaaggtcgtggacacagtgggtccaggccggctctgctctgacctcaatctccctcctgaaggagaggagggaaggggaagggcctgtgagtgctgctcaccccggaacgtgccctcaccgcaatcagagcagacaaagctgcagccaagggcgtcccaagagcagcagggtgaggaaagcgggcctggcccgccccaggggcaacagccgggctgcacccagcccctggtgtttggtgaggcgatggccggcgctgataaacggccctggcctctccctgggatccttcgcctgcgatgcctttgacctctggcagaggaaactataaagcccagaggtgggcatctggcctcagtctgggcgtagagggtgcagggagcagacgggaggatctcaggccagggacgatggcggctctgcaggagaagaagacgtgtggccagcgcatggaggagttccagcgttactgctggaacccggacacggggcagatgctgggccgcaccctgtccaggtggggtacgtgcggggggcgggccggctgggtgcatggagggggccgct

SEQ ID NO: 11791 - DNA, 2300 bp, Homo sapien
tcctccctgtgtgagctggaaccaatcccctgctgaattcctcctcattcttctccaaacctttattgagtacctactgtgtgctggaataagacaggcagggccatgccctcatgaagctgacaatcctattggtgtgaccatccccaggtgtgtcccaggtgtgttgcaggtgtgtccgaggtatgccccagctgtcccaggtgtgccccagctgtctcagatgtgccccagctgtcccaggtgtgtcacagctgcattgcaggtgtgccccagttgcattccatgtgtgctccaagtgtgtaccagctgtcccaggtgtgtctcaggtgtgccccagctgtatcccaggtgtgcctcagctgtcttaggtgtgtctcaggtgcatcccaggtgtgtctcagatgtgccccagctgtcccaggtgtgccccagctgtcccaggtgtgccccagctgtctccagtgtgtcccagctgtgccccaggtgtgtgtcctaggtgtgcctcagctgtctcaggtgtgccccaggcatatcccaggtgtgccccagctgtcccaggtgtgtcctacgtgtgcaccagctgtatcccaggtgtgccccaggtgtgtctcagatgggtcccaagtgttccccaactgcatttcaggtgtctcaggtgtgcccaagctgtcccaggtgtgtccaagatgtgccccaggtgtgtctcaggtgggtctcaagtgccccagctgcatttcaggtgtctcaggtgtgccccccagtgcatcccaggtgtgtcccaggtgtgccccaggtgcatcccaggtgtgtcccaggtgtgccccagctgtctcaggtgtctcaggtgtgccccaggcatatcccaggtgtgcctcagctctcccaggtgtgtcctacatgtgcaccagctgtatctcaggtgtgtctcaggtgtgccccagatgtgcccccggtgtgtctcaggtgggtcccaagtgttccccagctgcatttcaagtgtctcaggtgtgccccaggtgtgcccccgctgtcccaggtgtgtccaagatgtaccccaggtgtgtcccagctgtcccaagtgtgtctcaggtgtgccccaggtgtgttccaggtgttccccagctgtcccagctgtcccaggtctcaggtgtgccccaggtgtgttccaggtgttcaccagctgtcccagctgtcccaggtctcaggtgtgccccaggtatgttgcaggtgttccccagctgtcccagctgtcccaggtgtgtcccaggtgttccccaggtgtgtcccagctgtcccaggtgtgtcccagatgtgccccaggtgtaccccaggtgtttctcaggtggattccaggtgtgtcccaggtgagccccagctgtattccatatgcgtccctctgagtggggccttggtttgatgtagctccggggatcttctgctccctggtcctggtgtcaccagcaactgcctcttgacaatcctgccttgcctgcaaaccccaggtgagaagaagacaaatgactgggaactgacccctcagtaagcgctggtggtctcacctacagacccccaggaagctggtcactgtgggcttcttttcctctctaaattcctattatcaggtggttttctttctcatttgctattttcttaaaaataaaaatagggaaaaacagcctttgtaaattacggtttcttccggctccatcctctccgtcaggcccacatcccaaggaaacagcaggcttgagcctggctgctgaagccaggggctggatggagcagctcagaacagagctttgagtgcctctccagccaggggccccagaagcctggtggttgtttgtccttctcaggggaaaagtgaggcggccccttggaggaaggggccgggcagaatgatctaatcggattccaagcagctcaggggattgtctttttctagcaccttcttgccactcctaagcgtcctccgtgaccccggctgggatttagcctggtgctgtgtcagccccgggctcccaggggcttcccagtggtccccaggaaccctcgacagggccagggcgtctctctcgtccagcaagggcagggacgggccacaggccaagggcagcagtcaggcctgctctgtctgtgaacgctcccggcttggcctcggctgatgggccctcacgcctgaagcgggcaggaagctccgggatggatttcgggtctttggagaccgtggtggccaactctgccttcatcgccgcccgaggcagctttgacggcagcagctcccaaccctcccggga

SEQ ID NO: 11792 - DNA, 2300 bp, Homo sapien
tcccatcagaggtaagtgtggtctcccgaccagagcagccaccgtcctggtgtctcccatcagaggtaagtgtggtctcccgaccagagcagccaccgtcctggtgtctcccatcagaggtaagtgtggtctcccgaccagagcagccaccgtcctggtgtctcccatcagaggtaagtgtggtctcccgaccagagcagccaccgtcctggtgtctgccatcagaggtaagtgtggtctcccgaccagagcagccaccgtcctggtgtctgccatcagaggtaagtgtggtctcccgaccagagcaaccaccgtcctggtgtctcccatcagaggtaagtgtggtctcccgaccagagcagccaccgtcctggtgtctcccatcagaggtaagtgtggtctcccgaccagagcaaccaccgtcctggtgtctcccatcagaggtaagtgtggtctcccgaccagagcaaccaccgtcctggtgtctcccatcagaggtaagtgtggtctcctgaccagagcaaccaccgtcctggtgtctcccatcagaggtaagtgtggtctcctgaccagagcaaccaccgtcctggtgtctcccatcagaggtaagtgtggtctcccgaccagagcagccaccgtcctggtgtctgccatcagaggtaagtgtggtctcccgaccagagcaaccaccgtcctggtgtctcccatcagaggtaagtggggtctcctgaccagagcaaccaccgtcctggtgtctcccatcagaggtaagtggggtctgtttttgaaagtcactgacacgaaaccgtgcagaatgtactttttgtgtctgagattcactcacctccttgtgcagaaccttgaagtcctcgtgaagaaatgtggccccattagtgtcctgcaccttttctcccctcactgattgttagaagccaggtgctgtgctatgcctgctagggccagtatttgacaaattccctgcttcgctaaagaggagggttcgtgtctggaagtcacgggcccggtgacaggcccactgtctgtcctggagggccagacccatcgtgccagtgagtgcgggccttgcccaccgttgtgtgtgcggccctagacacacttgcagaactggccccaatagggagtttagagagaggattgcacaggcgagtggatgaatgagtgacatttcagaagctgaggtttgtagctgctgcctgcaatctgttctgaagtccagcagcagcaaaggggtggggaggggtcaggctcacctgagacaggaaggtgggttcccccaggcagaggcttggcagagggaatcattgttgggacatctctaaaaataagtgacagaaagttccgagttctctcacgcagtctagaaacacagattcttactgcacagatttttctttaaagtgaagcaggaatttcaatgctctgaactgacaccagcaaaccaaggcagttctggctcatccaagggttggggttcttatttcaaactcgagaggcctggactaagatgcatcatcactaaccaggctccaacaaggcagaaatgccgctttatcaaaaccaccgcaggctggagagaaataagagctgccttgccaaggctgggaccgccagcagaggcatactcagcttccaggtggggcctgccagctgggggctggccctgaagatcacagactcccagaccgagggggcgggaaggtcgtctcatccagtggggacccctgtccagccttttctcctgctctgtagaacctgtggggtcatttcaggaaacaaaatatacgaagctatccagcctcaaagccataagtaactaagtaactgaaaaattagacccaagcttccagaaaaacggtgcagaacatcctcccactcccttgggttgggagctcctaaaggcgtttcttattcctctctgttcttctgtcacgaccagggctgagcgtgcgttcgagcttctcctgcatcatgaccaggatgctctgggacaccttgtccacgtctgtgtccaccagtcctgctcagaatctccccaggggcttttccacgatgcccatccaggcgtcaccctcactctaggccaggaggagaaggcatgccctgaggattcagcctcttcttcttcatccctcccagcacccagtgtgttgggtgcacacagtaggtgccccataagtatcataagaccacaatgtgttgggtgcacacagtaggtgccccataagtatcataagaccacaatgtgttgggtgcacacagtaggtgccccataagtatca

SEQ ID NO: 11793 - DNA, 2300 bp, Homo sapien
catttgatcatggtgcagaattctttttatacattgttgaatttaatttgctaatattttgttgagaactgttgcatctatgttcatgagagatattggtccttagtttccctttcttgtactgtctttgattttgatattagaataatgctggccttataaaatgaattaggaagtattctctctgtttctgttttctggagcagatagtagaaaactggtataatttcttccttaaatgtttggtagaattcaccagtaagcctttctggtcttggtgttttgtctttgggaagattatcagttatcgatccaatttctataagaaatatgtctattaagataatctatttctccttgttgtgagttttggtagattgtgtctttcaagtaactagtcagtttcatctaggtatcaaatttctgggcatagagttgttcattatattcatgtattatccttttaatgtccacgggatctatagtgatgtccctctatcatttctgatgttagaggtttgtgtcttctcttttttttttcttgactagtctgactaaaggtttatcaattttattaatgtttttaaagaaccaaattttgatttcattgattttctttattgtttttctgttttcaatttcattgatttctgctctgatttttattatttttttctgcttactttacatttgatttgctcttctttttctagtttcttaagatggaattttaagttatttactttagatgtttattcttttccaatatattcatccaatgctgtaaatttccctctaagctctgttttcactgattctcacaaattttgataggttgcattttcattttcatttagttcaaaatactttttaatttctcttgaggtttctttgacccacatatcgggctgattcttttcttatcagctcactgatgaacccattaaacacactcttcacttctgttacagtgtttataatttcttgcatttcctttttacactttctttgcatttcaattttacctattcattttttaatattgttcactttttctattattaaagcccttagcacattaatcataggtattttaaattcccgatctgataattcctaaatttctaccatatctgagctggttctgatgctcattttgtgtcttctgacagtattttttgccttttggcacgccttgtaattttttctggaaatctggacatgatgtgttagaccgaagaagctgaggtaaacagaccttcagcctttgctgtgaggtttttgtttatctggctttctttcttgtcatattgcaccaaccatgccctctaggacaatggtggaaagaaatggttagaatggtcaatcttgccttgtttcctatcttaagaggaaactgatatttatgttcactctaggtttttaagaatgttctttatcagtatgagataatttccttctatttcaagcttcctgggttttttctttaatcattaatggttgttgattttcaaatgtttgttatacatctgttgatgattagaattaatcctttattttctaatcatataaattacataaattgacttttttttttttttttttttttttgagatggagtctggctctgttgcccaggctggagtgcagtagagtgatctcagctcactgcaagctccgcctcccgggttcacgccattctcctgcctcagcctcccaagcagctgggactacaggtgcctgtcaccacacctggctaattttttgtatttttagtagagacggggtttcgccatgttagccaggatggtcttgatctcctgaccttgtgatccaccagcctcagcctcccaaagtgctgggattacaggcgtgagccaccatgcctagccataaattgactttttaaaaattacactttactttgaagtatatgtagattcacacacagaagtaacacagaaatcctgtgtcctcttcacccagcctcccccaatgtcaactcacaaagctacagagcaacatcacaatcaggacacaaacattagtgcagttgaagcacaggacatttccatcaccacaagaactccagtgtttgcctgcttctatcacactccagtgcttttaagcaggttttccccccatattttacctaaagtttatagctgttacctgtggaaaggttggttcagtgggggctattctgccattaccaaaagttgggtcctgttctctactttttaattggtaagcatgctttgtagttatggaaatcaactctttgtaagtgaattgaaaac

SEQ ID NO: 11794 - DNA, 2300 bp, Homo sapien
cctttaacatctggggaggagaagcggccaggtgttttttgagttagaggaaaattaccctaaaggttttgccacttgtttgacatttttgggcttggttcccacaacccaagagggcctggcctccaggcagggacatgtctgttctaagagtgactgtgtgagagcccagccatgcctgaaaatggcaacaaggtcgccacacactccctccaccttccaaaatgaaaccaggttcttgggccaagcaagaaaactggaatgctggcacaggaggtgttttcgacctgcctgcttatctaagtttcacatgcagctccattcatcatagcaagtggtttccctgctgaacaaggcaggcaggtctgacaaacacagtggctgccagattcagcaacaccgctgatgggtgggggaccatgcctgtctttccttgtgatgggggagagactagtgtttggagtttgagtgggttagatggcccccgagggctcaggatgggcatcctggggaagctcagggttcctggggcctctgtgcacactgagccttcctctcgaagtctttgaagtgcactgtgtgcttcatttgtttagctctaaactcttaaagctggcaggcgtgtctaagtgtgctgatggcctccatttaataggagaggagaatgaaggcgaagatcatccagatggacatggagaagattctcaaacacgcgtgtccctcgggactctgagaccgaagaatcaccacaggaaatcccactctcaggactctgtgttccttcaggaagaagcctgcacaggacattggctgaagccaccacctgtgaccctgtgagagctgggctggagggagccgagttcacagtgagagtgacctcagggcaggcacagggcaggctgccgtccctcgctggtgctgtttatagtgagttccaacacaacgcgagagaccagcacaatggccccgtgttcctgccaaggccagcaccccacccgcttcctcactgggctattttaaaacagttccagacatcatattattttatccataaacacttcagaaagtattctcaaagataagaaccaaacaccccacccaaccccagttctgtatttatgcctaaaataattgatggtgactccttaatgccaccagatatcagcgcccaggactccctggcatcccacaggatttttaagactctgttttttccaaccaggaaaaaatccttggttctctccgcttcttcctctcgtgacttgtcttttgtcccgtggtgtccccaggtctggactgtgccctgagctgccggcatcctccccacacccccgtctctcctgcaagggcgcggatcccggcatcatcatctgcgattcgcggccagttttggcgggaacacaacaccggagggggctctgcctgcacagaggacccgggtcagacggcctctctcgggtgccgcaggcctggccatctccctgcaccggtgattccattgtggggcttcggagggaagatgctccgattctgtgtctcctttcttcacctgtgagctgtaatacttttctgaagagggattttttctcatcaactatttggtcatcctgaggtaccgctggtttttagcatgtccaaaggtgacttgggtcattgttgctatttttagtatcgttataactcctggatcttactgcattcgaggcgtttcaacccattgcagatgttctaatggtctcatccttggccgatggtggcccgcgtgcgctgcctcagcgtccccatgtccctcactgccccgcgcatgcatcccctcagcgccccacgtccttcagcacccgccgcatgagtcccctcagcgtcccccgcctgcgttacctcaacactcccacgtccctcagcggcccctgcgggcgtcccctcagcacccccaacgtccctcagcgcccccacgtccctcggcgccctccaagtccctcggcgcccccacgtcccccagcgtccccgcgtgcgtcccctcagtgccccgtcgtgcgtccccacgtcactaacaggtcctacgtgcgtgctcacgtcactcgagtcccgcgtacgcccctcagcggccctgcgtgcatccctcagcaaccccacgtccctcagcgcccccgcgtgcgtccccacgtcactcaggggccctgcgtgcgtccgctcagtggccgggtgtatgtcccctcagcggtccagcatgtaggttgtgtggtgttgcttttcgaggtggtttgtgatgcttggtaagtttcctgcttgggattcttatg

SEQ ID NO: 11795 - DNA, 2300 bp, Homo sapien
gtaatggagacatcctccattgcaccgcatatttgctttctgtattccccagttatagaaatcaaaacgagcagttgtatgtgaatgcattgtatcaaaccaagtctctagatgataggaggcattgtcattactaggatagtaactcagtagaaagagtgaattgagaatatgaggaatgagagtggggtccagactaaaaggaggccaggggtcctgaactgccccatccaactgagttcattctgatacctactgatctgaagcagcaggtccacgcccaggtgcagattgtcccagatgaacaggcagaggctagagatgctcattcctaaagggatcaaataattctgagaatggcaagaactccattaactctcttctccaaaactacaaaaatgtgcagaaaatacgaacaatttttaggagcttacactctttgaagtttatccatgggctgctggaacccttaggaaataatagctagaagtgcctcagacactgcctggcacacagcaggtgctcaatgaattacactgcctggcacatagtaggtgctcaatgaattgtctgatgaagtgattaaggagccttgtaaatactgattaaaacatgtatcaccccatccaatttttcaaaccagtgcttctcaagaacaagcaggaaaattaatgtaatattgttttgaagtagccgtggtggtttcggggcagaagcccaggggtactccttactccgcctgctccagtaactagctgacatggaagtgcctcgtcattctggttcagacacaggtgcagatagatgacttctctatcccactttaattctccttgaagatcattcccagggacattcatttgcttaaattaacatgctcggccaggcgcggtggctcacacctgtaatcccagcactttgggaggcccaggcgggcggatcacgaggtcaggagattgagatcatcctggctaacacggtgaaaccccgtctctactaaaaataaaaaaaatcagccgggcgtggtggcgggcgcctgtggtcccagctactcgggaggctgaggcaggagaatggcgtgaacccgggaggcggagcttgcagtgagcagagatcacgccactgcaccccagcctgggcaacatagcgagactccgtctgaaaacaaacaaacaacaacaacaaaaattcatgctcataatcccactttcaaaccagtgacctcaaagatttctagcagcaatcctattccattcttccaattacagaaagcaaagagaaactggatctggggatctaagcgttgagcctgctgagcagaacggccattcatttggggtgaggtgctgactcactgcccctctacattgcattttggggtgtggggatttccagagcaggattctccagagaggagtatccaagctccctcctcccgcagcagggggatgctgggctaactgcctggttcggtcccccgtgagtggtctgctgtgttttggttctgtttgtttgtgtgtgttttgcctatgactttgcgaaatattccaagacaagagccagaaagtcttggtctctgaagacaagcacaatgttgctttcagcttaaatatctactgggaaacctcaagatttttaatgtcatcattatgaaaaacagagattataaaaggaaaccgtcgcatttcactcgctggcccccagtgggattggatctgacctcagtgtatcttttctttggtaggttttaagtcttgacaaaatgtgcctaagaatgaagactccaaaaaggatgcagtagattcggggggagtgggggttggaaagaggcttaaatcttcacatgacacctggaatatggtcaaaatgtacctgctcaagttgaaccaggtattgcgtcctccttttaccccatcgctagtgaagacaaccaccgcctggggagacgctccttttccgaaacactcgagtcccgccgcgtcccggacgctccgctttccccgcgcccggatcctcccgggaacccgcgccccgcccgcgcgctggtcccgcccccgccgcctccccgcgcgcagccgcccgaacacgcccagaccgagcgcttgaggtgccgcagccgccgccgccgccgccgccgcgatgtgaccttcagggccgccaggacgggatgaccggagcctccgccccgcggcgcccgcggctcgcctcggcctcccgggcgctctgaccgcgcgtccccggcccgccatggccccttcgctctcgcccgggcccgccgccctgcgccgcgcgccgcagct

SEQ ID NO: 11796 - DNA, 2300 bp, Homo sapien
ttgctgggacccaaggagttaaagtgtattcagagatgaaggtgtttaggaaatgttctggaaccttccaaactgactttaggctgcgtgaggtgcttccagttcagtgcactttgggcccaaaagtgtttcctgtcttgttaatgcactgtgttgtgtgccatcaccgcatggaggttttggccatttttaaaaagtgaatgggccctcccagggtctagttggatcgagagaccactggaaaccctcaccaagctgcaggcaggtaggcaggggccccagagcaggcctaggggaagagtccccccggccccttggagggtctcttcacgtgctgggtgctgcctgattcctgcggtggcatggggaggtcaccccaccttgttctgaaccacagctctgggtgaggaagcctgtcaccaggttaaaggtcatttgggggttggggcgtgagaaccgcagtgccctgctggtagggttgccgcatgggtggccaggctacagcctggtccccgaggccgacccatcctgggaaccctgtgtgcagctccctgccatgcttgacctttgccctgtgggtggctttgagcgggggagacctgggtctggtggtgggcagggcaggggcggaggtggacttgggtctttgtgacactgcaccaattcccatggattctgccggcacccactgccctcctgagcagagcaaaggcagcagaggcggatgccagggtccggaggtggcatctactcatcagacactttctgtagttttataacaaatttggggcctcatgttagaccccagccagaccaggctcctgtcctggggctcagctccctccaagctgcttcaggttcagtttcctccatgcttacgaaaccgaagggcaacgggcacagtcagggaggcgtcagaggaggcaccggctccactgttcacaccgggaccttctgcagacggggctcccagcctcgaccagccccggaacccccagcacggggacgtccaatcttttggcttccgtgggccacattggaagaagaactgtcttgggccacacataaaattaacactaacagtagctgatgagctaaaaagaaggtctgtgcctaaagctcatgttttaagaaagtttacgaatttatgttgggctgcattcatggccatcctgggccactcacagttgcgccagagcctcgggagcacaggccgagcacctgccctgcttcacccagggacggggccctgcactgaccaggaggctgttgccctccaagtcgtccctgccgggaacagcaaagcacacaaacctccgagagacctaatggctgcatcctccgtgcagtgggcaccacgcttgccacctagaagagtgggtttggcagatgtcagttaataacaaggatgtaagttttaaaatcacgtgggggtttgtaaacttgaggaattacagcacaaacacttccatattattaaaagaaacagactgggagcattgattttgacttttcttccaagtacttatctatgatttaagtgaaactgagcattcagtgctctgtgggagtgaaaactgcaggcccttgcacttgcccactgattcattcattcacccatccacccactcattcattcaactatccatgcactcgctcatccatccatccactcattccttcatttattcatccatctccatccatccagtcacccattcacccactcactcatctatccactcactcacccacccattcactcatccattcacccacccactcacccacccacctattcattcattcatgtattcatctatctactcactctcattcacccattcattcattcatctgtccatccattcacctatccacccactcatccattcatgtactcactcatctacccactcactcattctttcattcattcatccattcactcacccatccacccactcattcattcactcatctggccactcactcatccacccactcactcattcattcatacactcactcatccatctattcactcattgttttattcattcatccatccatccatccactcacccatctatctacgcatttattcatttacccactcagtcatccgtccatcctcattcatttatccatccatctccattcatttactcatccacccactcattcattctttcatccacccactcatccatccactcattcatttgttcattcatccatctctatccactcatccattcattcattcccattcactcattcatccactgattcattca

SEQ ID NO: 11797 - DNA, 2300 bp, Homo sapien
agactcggaacattctgccttccctggccagcccctagcccatctctggtgaactctccctgctgggtgtggcggggaggaccccaggcccaggctgcactgccagaggggtcctccaggaagcccccctctttctgcttagctgccccctctccacgtgtcttgatggctttaggccaggtgtgttctgccctttctcagggtggtcacctgggctcagctcctgcagggccagaggtcaggggaacgggtgagggcctgagggtgggaacccgtgccagtgcagctgcttcccaagcagtcccccatccgagaagctgctcacaaacacattcatacgaggagctgctcacaaacacgcttccaggacacggacccaaaccacgtcccagaggcaggcagggaagcccccgacagtgcagttacgcaagcctgagccccgggaagttggcagaaagaacgacaattacacccggagctcaaagaatcctttcatggctgctggcagagcagaagcagctcggggctgagcatggcagtgctcaggggcgcggtccacactcagctcagccccacatgaggactcagccacgctcagcttagccacacagggctccgtggggaaccctgggtagggcccccctgctggctgagagagggctccggtccattgattccacacaagttcaataaggaccagtccctgggaaaagtgcaggccgggccagcagggccctagggcactgggccagcatcgtcctaaggggtcagccctggtgggggcacgtcgagtcttcagtgcatgggctctcactgccagcgtgtcgcttctgttcctgaggctcccaaggtgacgtttcccaccaggtctgtagaatgtggcgtttccaccagagggtctgggctcggctgtcagtgcaggagccgcttccatccccacctggccggggtcaggggtgcccggtgccagggtgagcggcgggcgggtctgtggttcacaaagctgagttcctccagctcatccagggcttacagtcactgcctgtggccggcacagacacagcccctgtcctcctaggcgggtccaggcaccgcgctcaccagaggccctggctacgagtcccaggcttcttggggaagctgcccaaccacactggcttctttctgcgacgcttcgccgtatgcctcacagcgtttcctccgtatgcctcacagtttgctccgtacacccgcgtttcctccgtatgccccagtttcctccatatgcctcaatttcctccatacgccccacagtttcctccgtatgccccagtttcctccatacgccccggtttcctccatacaccccacagtttcctccatacgccccacagtttcctccatatgcccagtttcctccatacaccccacagtttcctccatatgcctcaatttcctccatacgccccccagtttcttccatacaccccacagtttcctccatatgcccagtttcctccatacaccccacagtttcctccatatgcccagtttcctccatacgccccccagtttcctccatacgccccacagtttcctccatacgccccacagtttcctccatacgccccacagtttcttccatacgccccacagtttcctccatatgcccagtttcctccatacaccccacagtttcctccatatgcctcaatttcctccatacgccccccagtttcttccatacaccccacagtttcctccatacgcctcaattttctctgtacgccccacagtttcctccatatgcctcagtttcctccatacgccccagtttcctccatacgcctcaatttcctttgtacgccccagtttcctccatacgccccagtttcctccatacgccccagtttcctccatacgcctcaatttcctctgtatgcttcagtttcctccatacacctcagtttcctccgtctgcctcacagtttcctctataagcctcagtttcctcagtacaccccacagtttcctccctacacctccgtttgcttgttttgcacaaatgactgacaacagaacacttgtgggtgtggacggagctcgcgtctcgaagtgtttctaagatgctattttcagcaggtcactataaacgctttctactctgaagcacacaggggctggggctggccttcggagttacgaggaaacgaggaccaggaccagggattctgcatcagcacagccgccaggagccggccggggccccatccctgacactgctgtcgcccggctgtacctgggtgctgtgtccgcggggc

SEQ ID NO: 11798 - DNA, 2300 bp, Homo sapien
cacaacaagccgggtagcttccactgttcctgccacagcggcttcgagctctcctctgatggcaggacctgccaaggtaaggccctggggtgaggcctctctcctctctcctctccccaccttctattttcggtcatgtctgctcttctgcaagcggctgctgctggctgggttcctgtggttctggatgggatggggcatcctgcagagactacacaagcccaggccagccgcagcacagggagctgctcggcaccacaccaggatgactcacccggcatctgagggccaggactcagggggccggcccagcccatgaggccacactgctggctgtagggcctcgtccattccccagagcctcacagagcctggaagtgctccaggcacttgtgtagtgagcttgtgggtcagggctccaggctagggtccccccgccgtccactctccccagcatccccagaagcaccccgttgttggtctccctctgtccactaaatatagccctgccctccccacttcctttcatatttcagtctggggttccctcagcccagggccagagctggggagccccaggacaccccagaaagtcactgtgaatgtgcgcgcccccgacgctgttccaggtgctgctgctgccactggccctttgccactttgcagggggagcaccttcctcctccctccccacgttgtatctggacatgcccaggcgtgtccctgagagtttctggcatagttcttagcgctgctgctgactgtccaggacaccgaactgcgtggacaggacagacagttgctcagggagaaacagccccaggatctggagagtgaatctgaccagacaggaggggccacaccccatcccccgatttcaaaaggcagctgctatttctgtccactttggtggttcccttccctgaccacccaggagttagccctgtgtgcagatgacgtgattcccatcttaacacataaacccatttccccgccgaggacagagcccctcccatcactgctctatccctgacctggaagacagcagcaccccaggtttaaagagaggtgaagactaggccgatcctgagagatgacgtctaaagcatctcccgtgggtccctgcaccagtcgggcactcccggcaaagtctaggctcacagttactgcccacagtgacagaggcattcccgtcctctcctcctcctccccatcttcctcttcctccccaccattccccctcctcctttccccactccccctcctcctctccccactccccctcctcctcccccccactccccctcctcctccccatcttcctcctcctcctcatcttcctcctcctctttcttctcctcctccccccactccccctcttcctccccatcttcttcctccccctcctcctcctcattcccctcttcttcctcctcattcccctcttcttcctcctcattccccctcctctttttccccctcctcctcccccatccttatttcccctctcctcctcctcccccacccctccccaccccctccctcacccctccccaccccctccctcacccctccccaccccctccctcacctcctcccccacccctccctcaccttctcctcttcctccctgcttctcctcctcctccccctccgtcgtcctccccctccgtcctcctccccctccgtcctcctccttcccttccccattctcctccccctccccctcctcctccccctcctcctcctccccctcctccccctcctctccatcctctccctaccccctcctcctcccctcctcccctccccctcctcttctccccctccccttctccccctcccccttctccccctcccccttctccccctcctcctcctcctcttcctccttcccctccccccttcctcctcccactcctactcccccttctcctcccccacctttctccgtgcccctgcctttgctctcctctggtgactaaagggctcttcatttcagggttgcccctcctaccccagggtgcttggccgtaaacagcatctgtcccacattagatgctcaagtcttaggattgtggtttaacccggtagtgaaaattgattgaaaccagtaaatgcttctctttggggttggggttttagtttcaaatgcccccggggggttactttttacggccccgtgtcctgtagcaccgtcatttaaatggaacagcacagcgtgcaccgccgccccccacccctccaccaagcagggcccttcccagctctccacctgctgggctgaagtcagccttccc

SEQ ID NO: 11799 - DNA, 2300 bp, Homo sapien
cgggccttgatcagaagcgtgcaccaacaccccgggagctgcccggtcaggggaggagggcagggaaatggggccagggcgcgctggccccacagagtctggatgcgacctctgggtggtgccctggccagtccctgcagccgcctgccccagccccgtctgagatgccgctgtgctgcggttggccggtttttttttgcttgcagacatagacgagtgcgcagactcggaggcctgcggggaggcgcgctgcaagaacctgcccggctcctactcctgcctctgtgacgagggctttgcgtacagctcccaggagaaggcttgccgaggtacccacgccacgcggtcaccctcgctttctctgacgcccaagtctagacacgggtgccagtcactgcccgagccggttgctaacaaccgggtgcttctggtgaaagaaagtctctttctccctgtttctatcagcctggtaatggcctgtgctaccaccatgcccgcacacacgtgagcacacacaggcacccatgccccttgtgcacatgaacgaaccgcacacatgcatatacaccgcatgtacacacgtgtgtacccttctccacctgcatagacggggcctctccccaaagggacggggagcagcaagcctccctctactgttctctctttccagccgccatggggagggccctgttggccgtagagcctctaagaggggccgtgcccccagtgatgggaacagtggggctgagtaggcagacagagagggtggggaagcccaggctgcctgcactgacctccatttcccaccacagctgtcggcccctctgtgctccgggggacacctcactgcacagcccagaccctgtgcttcccagacctgccttccacaccggcccggcagcgggggtgggtctggctcgttgggagcaccctcctgggacacctgcgacatttttattccctcaagaaagagcccgggcaggagcaggccgagggtgcaacctagctttccagtggggggggacgcgacccccaagccgcccccgttagaatctgcatgtaattccttgagcgcaccttgcgtgtggtttgagcaatcgcggtgtgatcccacggcgggacagcgtagaggcctccccggctcaccgccgcttccctctggctggcagatgtggacgagtgtctgcagggccgctgtgagcaggtctgcgtgaactccccagggagctacacctgccactgtgacgggcgtgggggcctcaagctgtcccaggacatggacacctgtgaggtaggcggcccctggccccgcgggcccttcacggtggttccgggggccctcgccggtgggggctttcgggagaaacacttccgtgaagacctggcctttgctaaggtgttggggatctccagggccatgtggaggtttgggatgagaaacgcttctgttccctggaagatgtttggttgtatttatagagtctctatggcaactcccagctcacagtggatcagcctggtgtggaccccagtgtgacactcacgggggcacggtccccactctgccgcgtgccagggagccaacgtgaccgacctgtcacaccggtgcctgtcacaccgacctgtcacaccggggcctgtcacaccggtgcctgtcacagcatgacctacctgtcacaccggggcctgtcacactggtgcctgtcacaccgacctgtcacaccggggcctatcacagcatgacctacctgtcacactggtgcctgtcacaccgacctgtcacaccggggcctatcacagcatgacctacctgtcacaccggggcctgtcacactggtgtctgtcacaccgacctgtcacaccggggcctgtcacagcatgacctacctgtcacaccggggcctgtcacactggtgcctgtcacaccgacctgtcacaccactgcctgtcacactgacttgtcacaccagtgtctcacaccgacctgtcacaacagtacctgtcacactgacctgtcacaccggtgcctgtcacaccactgcctgtcacactgacttgtcacaccagtgtctcacaccgacctgtcacaacagtacctgtcacaccgacctgtcacaccggtgcctgtcacaccactgcctgtcacactgacttgtcaccggtgtctgtcacaccgacctgtcacactggtgcctgtcacactggtgcctgtcacaccgacctgtcacaccggtgcctgtcacaccgacctgtcacactgacctgtcacaccggtaggaatgcagtacccacatgtggac

SEQ ID NO: 11800 - DNA, 2300 bp, Homo sapien
tgtatgtatgtgtgtatgtgtgtgtatgtataagtgtgtatgtgtgtgtatgtatgtgcatgtgtgtgcatgtataagtgtgcatgtgtatgtgtgtgcatgtgtgtatgcatgcatgtgtgtatgtatatgtgcatatgtgcatgtatgcacgtataagtgtgtatgtatgcatgtgcgtatgtatgtgtatgtatgtgtgcgtgtatgtatgcacacatgtatgcatgtgtgtatgtgcatgtatgtatgtgtgcatgtatgtatgcacacatgcatgcatgcgtgtatgtatgcatgtgtatatatatgcatgtgtgtgtatgtgtgtatgtgcatgcatgtgtgtatgtctgcatgtgtgtatgtgtatatgtgtgtgtgtattccatagcatgttgccctctgacatgctgtgcatttttcttgtttattgtattattattcatggcctcacttccccaccaggatccttgtttacgttgctcattgatacatcccaagtacctggaacagtgtctggtatatcgcggatgtttagtaagtcttgagaggctcactgagtgaacagtgttaattttcatggtttaaaactttatataaatggtaccatactcgctgccgtacttgctgtcgtactcgctgccgtactgtgcacttgcatttttgctccgcgttctgtttttggcatttatccacattgatccatgtagctctcatttattttaactgccatgtggtatttcgctgtatatgcccatttctttatcgcttctccccgtgttggatattcagggtgtgtccggtgctttggacacacagtgttgtgaggaatattctgtacgcatcttctagcacatgcatacttcttgtggtagtttctctctcacagtggatggcctattagaatgactagggaattcttagctattagtttgttcccagaagttctggttcaattgatctggtctgggttcagtgctgcagaaatgttttttcttttaaagacattcctggatgactttaacgacagccggggttgagaaccacggctcctggctcgaaggagcagatctatgtttgtgttcttgggcatatctagaaagagatatgctttctttctggcttgtcatctacttgcttcaattttcctaaaggttgctttcagagtggtggcaccatgcgtgatcccagcggtgaatgcagattcccacgttttcattaacattctttaagttgtttgacccttggggttttctgataggatgagggtgaaacgcatcctcttgttcccacagcgttcccctaattccgggggctgagtttattgatcgttcaagcatcttcttttgtgacgggaccgctgatgtccttgactcaaagatgttaaaaatacgtttagaaggatctttattttttcctgctgctgtacgaggcaccctttctggccccgtgtttccttgcccttctttccagcagcagattttactcagaacaacttcagtgctgtggacacaaagacgcaggccttggagaggcgggtcagccctgcctcggggctgctgagtgaggtgccagatgcgtttgttcctcatttactcatttgcgtttgttcctcatttactcgttcctcgcagactgggttgtaacaccatgtaccaccctctgaacccagagatcaagggctggctggccctgtagccccaaggagctccgtcaccggccaatggggaggcgaacccgtggtgacccactcagcggcaccgccaagggctgagcgtggcgccagcggcggaaggcccggggtcaccgtcccaggccggggctccgaccccgagtccgcagggtcctctccaggcaccttccatctggggtctggcttccactcccggccgcggcgtcctgatttccagaaaccaggcggccgctggaggggagaagggggagcgggcgcagcgggggagggaggagaagaaacgccggagaagggagagtagagcgaggaaggacgcgaggcgggcggagcgcggggaggtgcagggggcggggaaggggcggcgccgcgagggcggctcctggcggcgggactgtggctgtggccccgggagagccgggtggggcctcgggatgcagccgccggtgcccgggcccctgggcctgctggaccccgcaggtgagcgcggggctgggggctcgtctcggctcctgcgggggagcgtggggaccccggggctgggactacaggtccccggccggcccgggcggaacctgcgcggagacgcggcacggggtctggtccc

SEQ ID NO: 11801 - DNA, 2300 bp, Homo sapien
ggactccactggtcctcggagaaacacaggagccggcttgcttccagtggctccaaacggaagcatagtctccgtcgtaaagcaggggtgtggatggcgtccacagcacccactgcagacgccacccagggccagcgctagacgcagaggctctgggttggaaccaggggtgccgccttaacctcctgttctgccccagtgagcaccaggcttgcaagggctgaggatgagagaggcccctgtggctgcaggctcccagcagtcaggggaagaaaggccattcattctttcaacgcatggaactgctttttaggaagtgaaggtaagcagtggaaaaaaataggcctctatcttcatgaagctcctgttcctctccatgcagtgtgtgtgtgtttgtgtatgttcacgtaggtgtgtgtatgtatgtttagtgtgtatgtctgtgcatgtgtatgggtagtatatgtgtgtgctgtctgtgttgtgtgtatatgaacatatgtgttcatgtgtatatgtggtgtgtgtatgtagggtgtgtgtatatgtgtgtatatgtatgtgtgtacacgtgtgtagtatgtgtgtggtgtctgtgtgtggtgtctatgtgtatgtatatgtatatgtagtgtatgtgtggtatatgtatgtgtgtatatatgtgtagggtgtgtgtgtggcactgggtgcaatgaagttttgcaacatagaggagggagtgtagtctcagttcatatacacacctacagttcatacacacacacaaacatactcctcagagaggaggtcagggaggaggagacctcgagacagaagaaagggaggtaagggtggtacctgcccatgctggggtctgcagggggactggggggggacctgcccatgccggggtctgcagggggacttggggggggacctgcccatgctggggtctgcaaggggacttggggggggacctgcccatgccggggtctgcagggggacttgggggggggacctgctcatgccggggtctgcagggggactggggggggacctgctcatgccggggtctgcagggggactggggggggacctgcccatgccggggtctgcaggggaactggggggggacctgcccatgccggggtctgcagggggacttgggggggggacctgcccatgccggggtctgcagggggactggggggggacctgcccatgccggggtctgcaggggactggggggggacctgcccatgctggggtctgcagggggacttgggggggggacctgctcatgctggggtctgcagggggactggggggggacctgctcatgctggggtctgcagggggactgggtgggggagacctgccggtgccggggtctgcagggggactggggggggacctgcccgtgccggggtctgcagggggactggggggggacctgcccatgccggggtctgcagggggactgggggggacctgcccatgccggggtctgcagggggactggggggggagacctgcccatgccggggtctgcagggggactgggggggggagacctgcccatgccggggtctgcagggggactggggggggggagacctgcccatgctggggtctgcagggggacttgggggggggacctgcccatgccggaggtctggggtggggggctgtgtgtgcgtgtatgtgtccccgcccccctcgtgcgtctgcagcaggtgccttcggatcgcatctcaggagctggggctgggcgcgggattcctcccctgccagatcgttgtacgtgaacttctcttggcaaagttcgtccgcgagtcaatcgctcagcctcgctcagcgggcccgggccgcgccggcgaccttccttcgtctcttccgccaggcagcccgctggggtcccttccgctcagcggccaatccgcggggcgggggcgggggccgaggcctcgggggaagccgatccctgcgccccccgggtctccgccacccgccagcgccgtccctgccaaccccgcccctgcagggcccgggccagttgggagcaggggccgggccgcgggcggagcctcccggtccccgccctcgccctcggccaactggcggtcttgcaggcgggcggaccctcggccgcgctcggggctccggcgccgccgctcctcctgctcggcctgagctgcccgggctcggcgcgcgcttggggcgaggctcggcgggcgcggacgcgcagcatggcggtggaggacgaggggctccgggtcttccagagcgtgaagatcaagatcggtgagtgtccgccg

SEQ ID NO: 11802 - DNA, 2300 bp, Homo sapien
tgatgcttctgtggcttgcgtttttcccgggcccatcatcagacttctactgatggagacatttgcctcagtcactcatttttggttaactaggaatctcattaaatggatagaagtcgttgaaaatatggcttaaaacacacctcaccacatgcctgccccaagttaatgagcagagttgattactgcctgcttgcagaagtgggaaaggaggaggaaaaggaaatatacagggggacaaatttttaaacacaacttcaaaatattacccagtcatatatgtatacacacacatagaaaattacacggcagattacttacagtagcgtgagagaatttttgagtgggtgggattctttacagcaagtttttttttttttgcttctttgaattttttttactcttttaggtttttatatttataaaagttatatttactttttaaaagtgtcaaccttaatattgagattcagaaatatgattacatatagtgtgtatttgagcacagagcctgagaatggccacctggacaaatggggtcagcctttccaagtggagctcaggtctctcttaccaggcggagacagaagctccagcaggatcaccacagttctcatatgagaccaggggcacacgccgcagcggttccattggttagggatctctgtatttgaaggaagattgcgttataactccatgaggaggggtagtgatctgagggggtcttatctccggtgccatttggtctttattgtttacagggaaaaaggcagaagttacagctgggtgtggcatgacctaggccgcgtagccacattcccctcaaggctcaggtaattcaaagttccaacagcttcaagtttaaattattttaagtttgaatgatttaatttcacaaaaggtaatatatgcacattgactgaaattcaaaagcacaaaaagatatccaaggaagtacctctcccacttctaccatctctcatcttccagcactccttccagaggccttgcgctatgccggttttctcatttttccttcctgggacagtttagggatttttctacctatcattaaattcgtattttactcaaatgcaggcatacgataaacacgatcctatacttgctttttcccacatactatatcttgaagatcgttcaatgtccatgcaaagctgactgttcttttgaacagccagcgagtattccattacgtgagcgtatcatgacctatttactcagttccatacttcatgggtgtttaaattgtctgcaatcttttgctattacaaacgaaaccacaggtcattttgcacacatgcaaaaatgcaaatccatggtatatttcccaaaataaaaatcattaggtttaacagcacgaacacctttaaatttggaagatattccaattcgttcatcctagagagtataccaataccactcacaaaacttgagggtgcctgcttcccgacattcctgctagcagtgtcatcaacctttgtgatctttgttaacatatgaaaagtggtactctaattttaatttttattatgaattaagttggactttctttcgtatgttaaagtctatttgcatttctttccctgtgaactgttttttgcctgtctttctcctgagccattggtctcttcccactgacttattacatatatgtaaagggaatattggctctacattataaggaaattcgaattttgtgataggtttcaaatttttccctaggttgtctttgacttcatttgctgtttgtgcacacaattttttttttttgtaatgagagtgcgttgctcttatttttaaaatgttgactacattctggggaaagaaggctcagcagccacctgcttttttgcccgggtgggtggtccggccccgagccctcctgactctctcgccaatgcccagaggcgccgcagcgattccagggaggccgcgctctcgccccaaggcaaccagaagcccacgtgccaggagaggcatcggaaccaacaactcgggtccgttttcccgcgccagatgggattcgtttgctgtggacttccggggcggggcctgcctggagcggaagagcctgggcagtgcacggggcctgggtggggggtgcgggtgtgggtggggacctgcggccttcgagtccgcggccttcgagtcctggggcggcggcggcggctgcaggcacgggcacgggcacggggcggggtgcttagggtgcaggaggcgcgcgcctagcggcggagtgtggcgtgaggccgggcccgcgccgccatgaacctagagcg

SEQ ID NO: 11803 - DNA, 2300 bp, Homo sapien
ggagaaggagatagaaaaaaaagagagaaactgttatcttggatttccttaaaaattctaaacccaggttttggtctttttttgatctgagctaccacttcttttcttacatgattggacagttcagattacacataccccacagtgtggctgggggcactgtggaatccttagttatctctgtgttgataaggagttgaatttacgtatttgagaagaatttgacatggtttttgaaacaaaagtgttttctatttagttactagtaagtcagaaaatttaattcctggtcagtgtaggctttactgtactctagaatatttgtagaataagtgatttggtgttatactcaaagagaaaaatgtatgtaatcctttgcatttcatgatatacaaattttaaaatggtaaattagtttcagttttttttggtttttgtttttgtttttttgagatggagtctcgctgtgttgcccaggctagagtgcagtggcgcattttcagctcactgcattctctgcctcccaggttcaagcgattctcctgcctcagcctcctgagtagctgggattacagatgcccaccaccacgcccggctaatttttgtatttttagtagagacagggtttcaccatgttggtcaggctggtctcgaactcctgacctggtgatccgcctgcctcagcctcccaaagtgctgggattacaggtgtgagcctccacgctcggctgtaaattagtattaatactactacagtgtcatttatggcatgtatgtgttctaaaaaatgggttatctaggtattttttaaaagtttgaagctttaaaataaatagtaatcttttaatataatacagtaatcatcagtatttgcgaatttgcctactcattaaaatttatttgtaaccgccaaatcagttcctgaggtgctttctgagccattggcagacatgcccagggctgggagaaagctgggtctcctggcacacacacttccagctggagtctaagaaggcaacgctctgccttttttcccagttcaactataaaccagtgtacttcttgtggtctatttagtgccacagttttcacatttttgtgctttttgttgatgatttcactgttttgaaataatccccaagcttagtgaaatgctatctagtgttaattgtgatacacttttgtgttacagaggaaacacatgtattagagaagcttcattcaagcaggcatcagtatttatagtgctgctggccctgacttcaatattgatgaatcaacaatatgtatcaaataagacgtctttaaatagaaacacacataaaacaaggttacgcattgatcaattagagaaaatgtgaccagagaattgcaggaatctaactgtatttcccctggcagccgcggttcaatatttgctaactcagtgtacacagtgactttatagaacataaatactgtggttgggtgcggtggctcccgtctgtaatcccagcactttgggaggccgagatgggcatattgcttgaggccaggagtttgagaccagcatgtgcaacatggcgaaaccccatctctactaaaaatacagaaattagccagggatggtgttgtacacctgtaatcccagctgtgtcaggaggctgaggcacaagaatcacttaaacccgggaggcagaggctgcagtgagctgagatcgcaccactgcactccagcctaggtaacagagtgagactcttaaaaaaaaaaaaaaaaaaaaggaatataaatactgtatctcccaaaatcttgaaatcttgaactcttgatattaatgccgtaaaattaatcatttgtgacttaactttgaatttttataattatttccagcagtttaccccattgcattttagtactactagaaaggtaatcaaaaatttttttaaagtttatatttgctaatttcgaataatctgcaaccttttttcctttcattttagatggaaaacagccgaaaaatggtttcttgatgctttggaaaaaattaaagcaattgggaacgaggtattctttgtagtacctgtaaatatacacatatacacccctgagtgtttactgttaaatgaggaaaacaacacagaaatctcttgccttcgaagatagtaacctgatattttcataacaagcggctgttaatgtttgcattgtcagttaactgttttaccacatggtaagaaatgagttttttccctaagagggcaagtgttggcgtttgcttcttaaatgggctctagctttgaaacgtgagaggcatcagaat

SEQ ID NO: 11804 - DNA, 2300 bp, Homo sapien
tcagttaagcaaaagtaaagttacatactaaaagcccacatgaagaaggatttggagatatttcttcctgctttgctttggctgtaaagttctgtacatgtatcaaacagagcatttcaacaggctggctaatgtgtaggaagctagcttttctttgtgatataatttgtcatgtaaaatcataagctattttacaagtgtatttcattcactgtatcttaaaattcatatggttttatttaaagataatttcatcaaacagctgaattctaaaatcctacctttttttcaaaatcatttttcagaactttgcaataacaggaagtaaagaatcagaagggtgttaaaaaattgacttggggggaaaaacatttggacattttgctggctaggtttacgaaatatacacatccagcaaacatgtgagtccctttagggtacagtgcagtgaagggagaagtggaaatactcaaggttctggggaaggtcaaatgaagggtccctcacattggctgaggccaacctggcttcagaggtgtgcagaggcaccaggccgagaacagggctttgcagtggtgagggcaaaacatgaacacaagaaataccctaagttactgacctggttgtgcctggtgacagatgggaccagctcttttctccatttggtaattttggaaaatttggcagagttaataaagaaatccccttggtgcaagattgctacaataagaatctattatagatggcagatgtgaagttcacagtcctttttattatcctaacctagtaacatgactagaggtaaaattaaatattgagttagatgattgtttaatattttaaaaccagagggaagacatacaaatagattgagagcagtttctttctaaagataatcagaatatatctcctatattttaaacactgcaggaacagtcaaaattttaaaataaatggtttccacatttttttatccccatctctccccctgactatatagtaaaatattttatttggcaaccacgttttcctacttttaatcacacatcatcagagcttttcatcagcctaactagtcttcctactcactgagttgtgacgaaagcctggtctaggcacttttaccacggccatgtttttgttaagatccctgcagactgtgaactatgaaaaccagcccctggccccgcttgtgggtgctgcagagccgcgtgtgaactgctcctaggaaaccgcgtctctgggcagggtggctctcgggccgtggatccgcctaaaagcttttctgccagtgacgcccttggtctctggatgtgttcacgcctcagtgattttactctctggtttcttgtgtgtgcttgagattcttgagagaaagcgtgctgcagatgaaaaatgcagcctacatgaaaaagagaaggggaaagccattttaaaataacttccatgtaagttactgtaatcaaagtgctgctgcctgtgtgttcataaaaaaatatgtgcaagggcccggagcggtggctcatgcctgtaatcccagcactttgggaggccgaggtgggcggatcacttgaggtcaggagttaccgagaccatcctggccaacaaggtgaaaccccgtctctactttaaaaaaacaaaaaaattagccaggggtggtggcgcgtgcctgtaggtcccagccactcaggaggctgaggcagaggctgcagtgagccgagatcgcgccactgcactccggtctgggcgacagagcgagactgtctccaaaaaaattaagaattcaaatgtgaacccggctttcatggcgccccggccacggagagcctgggggagtgggataaaaacggtgctgggatgggagggcggcttgtccgcgaactcctcccaccacgcccggaccaaagccgccggcgccccgcttccggggccgccctaaaccgcggccgccgctccctgaggggccgcctgacccggcggaaagccaggctgtgtggccggaggtcaccaccccgaccccgactagtcccgcagcgcctgaccccttcgtgggcggccccgaccgccgcggctcgaggaggggcggggctggggcggccgagctctcgcgaggtttcgtcgggggctggcggctgcggctcggcggagagtgcggcatgcgctcggaaaaggagggggccggaggccttcgggcggccgttgccgcgcggggcccgagcgggagggagaagctgtcggccctagaagtgcagttccaccgcgactcgcagcagcaggaggctgagacgccgccaacttcg

SEQ ID NO: 11805 - DNA, 2300 bp, Homo sapien
ccacgtgttttgacactgatgagtgttttctttttctccaatgaggggtaaggactagaaagattgttaaaaaaataagcattagccaagctagttcctgtgactagaagcaaatgtgatgcttgaactgacctttgtgttcattgctcatttattcagtaacttactgagtttccctttttcacttaaaaaatattggtgggccgggcacagtggctcacacctgtaatcccagcactttaggaggccaaggcgggtggatcacgaggtcaggagttcgagaccggcctgagcaacaacgtgaaaccctgtctctactaaaaatacaaaaattagccaggcatggtggcaggcgcctgtagtcccagctactcggaagactgagacaggagaattgcttgaacctgggaggcggaggttgcagtgagccgagatcatgccactgcatcccagccggggcgacggagcaaaaaaatatgtatgtgtatgtacgtgtatgtatatgtgtgtgtgtgtgtaaaatatgtgtaacatggccaggtgtgatggctcactcctgtaatcccagcactttgggaggccgaggaatgtagatcagttgaggtcaggggttcgagaccagcctggccaagatggtgaaaccctgtctctactaaaaaaaaaaaaaaattagccaggcatcatgaggcatgcctgtaatctcagatacttgggagactgaggcatgagactcacttgaacccgggaggcagaggttgcagtgagccaagatcgtgttactacactgtagccttggtgacagagtgagactctgtctcaaaaaaaaaaaaagtcacaaaatttataccatactgttttccacagtgactgcgccattttaggttcccacctgtagtgagcaaggggccagtcgtccttgtttccggttatctttgttgtcgttgttttgttttttagagatggggtctcactatgttgcccaggctggtgtcaaactcctgagctcaagcgattccccccacattggcctcccaaagtgctgggctacaggcgtgagccgctgccctgccgttgtttttatggtctctggcctaagcctgtgcttttgatgtcatatgcaacccattgccaaatccattgccatggagcttttcccctgtgtttttttccaagtgttttatggtttcaggtcttatatttaggtttgatccatatcgagttactttttgtatatggtgttaggtaagggtccagcttcattcttctggctgtggatatccagttttcccagcaccagttgttgaaaagactttcttttccccattgaatggtctgggcacccttttcaaaaatcagttgaccaagtattacaaaggtttatttctgtgctctctattttattcccttggtggatgtgtctgtctacatggcagtaccacactgattactttcagctttggaatcagggagtatgtcatctgccattgaatgagtatccactgtgtgctaggccttgtgggtggagcggtgacttggacatcgtccctgctggtccagtgccctgccgtccccctgagtcttgactttattctggatagtggaggttggcacaaaaatatctcccagttaaaggaattataattcagtcacctgactattactgacaagtcaaaaaaaaatgactcagtgggtttagtaccaaggtagcagtgttccatttgatgattcagcatatagcaggttctcttagtgaacatttctctttgtgtatttgtttttcccccacatagcaacgaagttagtttctaatgacttccattctctacttttatcagaagcagatttcacctggaatattctataaaccctttgaaaccctctattttagccatggtgtcttctaagcaaagtaattttcttgaacttaaataacaaattgatagttgaattaaccttttaaaataaaatgtaaagtgtagctaagaaatcattatttaaaggtattccaacgataaattatttgggatggggctggggaggtcaggtatattgaggtgtaagttacatatggtaaaagtcacccttttaaagtgaacaatttgatgaattttgaacaacttcagttatgcaaccaccacaacatgatggattgttttagtaaatgttcttcttaccaggagttcatccttgtttaagtctggagtttgccgtgttaaggttgcaggtgcttgaaagtgtaataaaattgtaggttttttaatcttttttttaatctcttactggaaggatgaattatagtt

SEQ ID NO: 11806 - DNA, 2300 bp, Homo sapien
gaggcaggagaatcgcttgaactcggcaggcggaggttacagtgagccaagaccacgccactgcactccagcctggcgacaaagtaagactccatctcaaaaaaaaaaaaaaaaaaaattttaggcaattcatggcagattacctttttcttttctaagcttttggcctccagtggattcttctgcacaggtctgagaagcaagtgttaaatggaaatactaataagctgtttctggcaaggactctggagttgttgagttagtctggtgcatcggcctttagcatcggcctttagagcagacaggcctgggttcagctctgagacttctgtttacttgtgttctgttgcatggttgtgcgtattctgtctgataaataacatacttttatgatgtgtagaacactttcttattcagggtctaacgtactttgcccgtgatccctgtgggtgatagggcagacattttataggaagaggaaggtgggcaagcggagtctggggtcagcctccccacacatccaggtggtctcgcccggctcctggctgacaagttcaggctttccacagagcagagcagaaccctggctgatttgagataatttgcccattacaaagagctgaccatttacctgagccagtgtgctgtactcaccctgagccagagttcatggtcagcccagggacccctgggggagtgttctctgtggcaactgtgtctgccacgaaatgtggcatttgtacctgcatcagctcttccctacaaccactgtgcctggggcagggctcctgggacaatcggctcttccctacaaccacagactgtccctggggaagggcttctgggacaggtgccatttcatctatgatgtcagggtgtcaggggttctcagttccaagtgatggatccctggccagggcttctcctatgattcctgattcattcctggtcctcagaattccagagatgatgtgtcagttttcaggtacatccagggattcttcccagccctgtttagtctgagatcttacagacccacagagtagaccccgtcttcccccttcccatttgtgtccttgtgttggtgggatgtggggcctgtccatgtcagcgcaagtccctctgaggtggggcctgtggggcctctagcttgcctgggcacccacatccaggtcagatctgagaggtcgggcatgaaagcgaaggaccaagatagagtctgtagaaatgttcattccctagtagttggtgccttttctgcaatcagcagcgccatatggagtcattttctttttcttttcttttttttcttttttttttttttttgaggcagagtttcgctgttgttgcccaggctggagtgcagtggcgcaatctcggctcactgcaacctcctcctcccgtgttcaagtagttttcctgcctcagcctcccgagtagctgggattataggcgcgtgccatcacgcccggctaattttgtattttttcagtagagacggggtttccttaggttggtcaggctggtctcgaattcccaatctaaggtgatctgcccgccttggcctcccaaagtgctgagattacatgtgtgagccaccacgcccggcccatgtggagtcattttctaaactacaatccagagttgtatgtcttatcattgggattttatggagtatatattgtaagacattacaagaatccatgttattttaaaactgttgcttggagaacggaaaacgaaaaagttctcagaatatgcgatgtatcaaaataaatatatgttatttaatgatttaaggcacctacaaaaatatcatcttggaatattttaagcctcccttaagaatcaggaattagatgtctactatgtatgaaattgttgatactttcaaattacttgacctgacagtaatggaataaaaactcccctggagacagtgtgtaaatttaaaaagtaatgatatggttcccgtatttattttaaagattacattcaaaacaagtatttaaaatacatctttctttaggagttaaatacaatattacaatttttgtgttttagctagaagaaccacacctcttttggaatatattaaaaatagaaaattagaaaagcaggtaggtctggcctttacctgatgaacaccctccctgcttctgccattctcatccaggcagtttatacacacgctcttccatgtctttagagaattcgagaagagaagcgagaagaacggaggaggagagagttagaaaagaaacgtttgcgggaagaggaaaaaagaagaagaagagaag

SEQ ID NO: 11807 - DNA, 2300 bp, Homo sapien
tcagaatcattccggaaattaacacaggatcctaaattttgcatgaaagggaggtagagccaggcgctgtggctcacgcctgtaatcccagcactttgggaggctgagacgggcggatcacgaggtcaggagatcgagaccatcctggctaacacggtgaaaccccgtctctactaaaaaaatacaaaaaaattagccgggcgtggtggcgggagcctgtagtcccagctactcgggagactgaggcaggagaatggcatgaacccgggaggcggagcttgcagtaagccgagatggcgccactgcactctagcctgggcgacagagcgagactctgtctcaaaaaaaaaaaaaaaaaaaaaagaaaagaaaagaaaagaaaaaaatgtaaacacaatatagcaacttttgtgatacagcaaaagcaatgctaaagggggagtttatagctataaatacatcaaaaaccaagaaaatctcaaattaacaacctaactttacaacttaatgaactataaaaagaaaaactaaatccaaagctggcaaaaagaaggaaataataaagattaaagccaagataaatgaaatagaaaatagaaaacgatagagaaaatcaatgaaaccaaaaattggttctttgaaaatgtcaaagcattattcacaatatcttgaatagggaagcaagccaagtgtccatcaacaggtgagtggataagcaaaatgtggcatatccatacaatgggatagtattcagtgttaaaaaggaaggaaattccacaatgtgctacaacatggatgaaccttgaggatgttctgctaagtaaaataagtcagtcacaagacaaatactgtatgattccactcttatgagtagtcagactcagagacacaggaagtaagatggtgactgccagaaagtagaaggtagaggggaaccgagagttaacatgtaatgcatagtttgtttttcaagatgaaagaggtacagagatggatggtggtgttatgaatatacttaccaccactgagctgtacacgtaaagatagttaagacggtaaattctatggattttatttttatttttttgagacagagtctcactctctcccccaggctggagtgcagtggcgcgatctcgctgtaacctccgcctccccggttctatgggattctcctgcctcagcctccctagtagctggggttacacgcgcccgccaccacgcctggctaatattgtatttttagcagagacaaggtttcaccaggttggacaggctggtctcgaactcctgacctcagatgattcacctgcctaggcctctcaaagtgctgggattacaagcgtgagccaccgcgcccggccattctatagttcattttcaccacaaaaacaaaaatgaaattcacaacaagcaaaacttcagaagggtacaaaggtagagagcagtgtgagctaattttacagtctttcaaagcatacagactgatggcatcagcattagaggtgcatgcattttaattagaattgtggtggtaacattcataaaactgaaaacaaaaaacgaagaagataacttctgggaatcgggactttcagtggaggcggggtgatgagaaaaggaatatttactgtcatccaacaactttgtcttgtacttttgtcataggtattatgccagtaatatccctgagaatgtatggggcaggtctagctctttttttcctaataaattcattcacacaacaatcaaaacagcaagaaaaggaagagatatccgcacggcggcggcaggccggggccgttccaagggcctggccggaggccacaggccagacgcggcggaaccctcccggagccgcgcccgggcgcgcgcgggaagcggaggcggagtgggcacgtgcggcacttccggggcggggcgggcacgcagcccttccgaaggcccgcgcgagccgctagttttgcccacgcacttttggcacagccgcgccacgcgatcggcgatctgattggcccgcgcgggagggcgcgcggcgccaaacttgcttcccgtcagcccccgcccgtcccgcgggagcgcgcacgctcgcgcacccggatcccggctcctgcatccagtcgccattcgggaggccgctgcgctgcagggcctcgcggagccgcccgcgaccgcgagccgggccctccgcgcggtccatcgcccactggacgccgcccgcggccggaccggtgaggagcgagagcgagcgggggaggggcgtggttggggcctgcatccccgagccccgtgtcggccgc

SEQ ID NO: 11808 - DNA, 2300 bp, Homo sapien
attctaacatgtgttaggccctgctaaagcccaaggtggttagactcttgtgaaatagtttccctggggcaggcttttgctaaggagaacggaacacccagggcgtatttcaaagtagttacttttccccttccctgtgggaagcaggagggaatttttctctgatgtgcataagagcatctggcagagctctcggaggttcatgaaagtgtagggccccctaagactgggctcccttaattcttaattcccaagtttatgtgcatggagcctccagcgatttgttgtttacatgtaagtcttcccaccgtggttctggcttcagtggccagcctccgatcctgttaggctgggactcactgcctctcaaatttgggggataacggtttgccctgttaacctcaagtctctgatggatctaagaaaagttgttaattttcagtttgttcaaggtgttttttgttgttgttgtgaggacaggagtgacagcttccaagctggaaaacagaagtcacatttgggttttgtttcaagatatttttccaatgacagagaatgatgccacacacatttccatagatgtcttttgatgcagatgtgcatgcgtttctgttatcctaagagtgaaatacctgagtcctaaatgtgctcctttctagaacctttattcaatgccaaacacagtgtcccctccagcagtgatgagagttcttgttgctccagattctctccaacatttggtgttctatcttttacattttagccgttttggaggatatgttatcctgttgtgatgttaatttgcatttacatgaatattaagaaagctgaacacattcaagttttgcttttataaattacatgtttaagtgttttacccattgttctttctcttagtgatttttaagagctctttacatattgttgatgtgagccctctgtcagttctatgtgttcatagatctgtttccactctgcaacttgtcttgtcactttcttagtggtgtctcttaataaacagaaattcttaatttgaatatagtctaatttatcaatttattcccttaaaactatggctttttgtgatctgtttaagaaatctgtccccattcatggtcataaaaatcggctgggcatggtggctcacacctgtaatcccagcactttgggaggtcaaggtgggcagatcacctgagatcaggagtttgagaccagctggccaacatggtgaaaccctgtctctactaaaaatacaaacattagccaggtgtggtggcaggtgcctgtaatcccagctactcgggaggctgaggcaggagaatcacttgagcccaggaggtcaaggccgcaatgagcagtcattgtaccactgcattccagcctgggtgacagagcaggatgctctttcaaaaataaacataaaagtaaatctaatgagctctaggatttctaatttgaagatagaagcaataaacaaaatgagaaaccaaaatacattcgttttgattaaagcagaagtcagccataactctgaacctaaaaaggaggtcacctgaagcagctgtgagtaagcagggtaagaaaggaagcggagaaccgatgctcattgccagatcttagggaaaaaataataaattaggatgacatacttttgcaaaattaaagaaatcccctgagttgctaatacaaaatttcatttgtgaaagtctaataaagaaattcagctagtagtgggatctgtcatggactgagtttgattccaagaacagaagaggcaggaccagtgagaaatagcacagacatatttgcaaaagcagccctcccacgttaggaagaagggatacttttgcacagtgaacagcactacaactgctcatctctttcatgtactatcacacatggaatgactgagataatcctgtgtttcacacatagtcctccctgcccctactgaatagagaaacccaatttcaccttggctatctctagatcaattacctgttaataggtctgctgttttctttaccgttagtttcaagaagaactaaatatccccaaatggtatttcagcttccacttaatgaaacctgtcatctaaagccagaccctggcctcagcacaagctccagtgcagaccccagcacccactctgcctggtcctgctcttccagggcccttccctggtggccgtgtggtcaggctgcacccagtccttttggcctccactgtggacagctatgagagacgcaacaagggtgctgcccgagttatcgggaccctgttgggaactgtcaacaaac

SEQ ID NO: 11809 - DNA, 2300 bp, Homo sapien
gaaatgttgaacctaaagaagcttctctcaccaaataatgaaaaacgtgcgatttccaatggccccaaaaaccagtcaatgaagaagagcaagaaaaacaaggtgaaggaagcgaggatgaatgggaacaagtgggcccccggaacaagacttccatcaccagccaggcggattttgttcagactccaatcaccacatttttggtggccacatcaggtctgtggtttaccaacagagtgcaaaagaatctgccactttgcagccatttttcacgttgcagttggatatccagtctgacaaaatacgcacagtccaggatgcactggagagcttggtggcaagagaatctgtccaaggttataccacaaaaaccgaacaagaagttgagaaaagtcgaagagtgactctggaaaaactccctcctgtcctcgtgctgcacctgaaacgattcgtttatgagaagactggtggtgccagaagcttatcaaaaatattgaatatcctgtggacttggaaattagtaaagaactgctttctccaggggttaaaaataagaattttaaatgccacagaacctatcggctctttgcagtggtctaccatcacggcaacagtgcgacgggtggccattacactagagacgtcttccagatcggtctgaatggctggctgcgcatcgatgaccagacagtcaaggtgatcaaccagtaccaggtggtgaaaccaactgctgaacgcacagcccatctcctgtattactgccgagtggacctgctgtaaaccctgtgtgcgctgtgtgtgagcccagtgtccgctttgtaggacaccacctcacactcactttccgcctctctttattggctctttagagagaaactctttctccctttgcaaaaatgggctagaatgaaaaggagatgccttggggttcgtgcacaacatagcttctgttgactctaactttgaaatcaaaatcatttggttgaaacagactgtcgcttgattttaaaaaacacacaaaaacccatatttctgaaataatgctgattcctgagataagaaagtggatttgatccccagtctcattgcttagtagaataaatcctgcaccagcaacacttgtaaatttgtgaaaatgaattttatcttccttaaaaaagaaatgttttaatccatcacatttttcttccctaccctttagtttttgataaatgataaaaatgagccagttatcaaagaagaactagttcttacttcaaaagaaaaataaacataaaaaataagttgctggttcccaacaggaaaaaaattagtaattgtgctgagggaaactgcttacatagacattgcagatcaaatatttggagttaaaatgttagtctacatagatggatgattgtaactttactgccattaaaaagatttcagattgcattcatgcttctgtgtacacataatgaaaaatggacaaataatgaagatctctccttcagtctgctctgtttaattctgctgtctgctcttctctaatgctgcatccctaattgtacacagtttagtgatatctaggagtataaagttgtcacccatcgataaaaatcacaaagttggtttaaaaaaaaagaaatagtcatagatgatggtataggtggagaggggttgctgggctttatgtaaagtgctattcaaagcttcacatataggtttcattcaaactttaagaagaaaaaaatgaacaatcagaaatgggtgagatgtggggatataaatagatattttgtacataagacttctgcatccccaaatattagcttgttgtggaattctgtcatctattcttgtttcagtcaaaacaagcaaaaaaaaaaaaaacagtcagaacagtatgaacaacaatcatctagttccaccaaaaacttttcactcagcaagcaagcaagcattgagtccctagctgaagatgcaaagaggagcaagaaatattctcttccattgagacggtcattgtctaaaggaaaatgtagataagcaaccagacattcagaatgacctgtgttacaagcaataataaagctgagcgctgggtactatggggcacttgggaaggctgcctaagccagagagcttcacagggagccttgatgtctgagtaagaattaaccaggtgaagcagaaggggaaataggctctaggaaaagagagctttgagcgcaaaggcaggcagagtgtgaggagaggaggccttacttccttgtgactgcagcatgaaggtaaggggagggctgagagaaatgaggctc

SEQ ID NO: 11810 - DNA, 2300 bp, Homo sapien
agcctggaggaaattgctcagccccccagctggggagagagtccaggaggccaggctttctcttgcttcctggctcaggggatcacagaggaacaaggaaatttagtgtgtgtgtcttctttttgtttcattcaaaatttaatttagtatcaagcaagaggagctttagcttaaccctgcatatcaggcaagatttcagttacaaaatagtacctttttttttttttgcacttgtgattggcttttcctctacttcttttggtaagagcaggttggtgtccaggctcagaatccatttttcctcccacaccaaagcacctgtggtgtgggtgaagcagactggagcctggctgcataaagctttgcagcaggagagtcctggcaggagcattgaggtgccactgccctggtccagctcagaggccagcaccagggaggctcagtgtcttgttctcaggatctgcacgtggggttgcctttctgcatctccccatcagtggtaggtgctcctccaagccccctcttgctggcctggacacagcggcctgcaccttgaccctattgcatgccagtggagcagagccccccaggccagaagccccacagatgttggccctggcttggacaggcagggggcaccggggcaggagctggctgcgatcctgtggccccaaatgccccctcgctgatggcctcgtgttctgggtgtggagcaaagaggagcaggtatcgaaggcacctcaggcaggtgctgggctcagtgggcgtcttgtgctccatgattttttttttcaaattttattattattatactttaagttttagggtacatgtgcataacgtgcaggtttgttacatatgtatacatgtgccatgttggtgtgctgcacccattaactcgtcatttagcattaggtatatctcctaatgctatccctcccccctccccccacacaacagtccctggtgtgtgatgttccccttcctgtgtccgtgtgttctcgttccattcccacctgtgagtgagaacatgctccgtgattttgaggccatttgcagccagctccgccagccggtgctctgagctgcagcagcggccatgcacaacagcaccaccaggagtgtcctgggggctttcttcagaggaggctgtcagcatcctcaagttccagccccttagccccagtcctgcttcaagaagctttttctttcaccagaggcttctcaatggcctgaaagctcggctgactcccaggaagtttgccgggaaacaccaggctgtcagtgacattcgtggttccaaggcttatgcaggttgcacgcatcggccactgtctgtgccacgtgtactgacaccaccagagatgcgcacgccgcacgccgcacgcgcacgccgcacgcgcacgccgcacgcgcacgccgcacgcgcacgccgcacgcgcacgccgcacgcgcacgccgcacgcgcacgccgcacgcgcacgccgcacgcgcacgccgcacgcgcggcagtggcttggctggcttgtaacggcttgcacgtgcatgccgtgcgcgcacaccggacgcgtataacggtttggctggcctgtaactgcttgcacgcgcatgccgcacgtgcgtaatggcttggctggcctgtaatggcttgcacgcgcatgctgcacgcgcgttaacggcttggctggtctgtaacagtcggcatgcgcacactgcacgtgcgtgacggcttggctggcctgtagcgcttggcttggctttgcgttctttgcttggcttggcgtttgtcgcttggattgacatttcttccttggactgacgttttttctgtcacgttactttgctggacttgaccttttctcttctgggtttggcattcccttgggtgggccgggtgttttcttggggggtggggttggcccttcctggggtgggcgtggggtcgcccagcgtgggtgtgggctttccccaggtgggtgtgggttttccctgggtggggtgggctgggctcccctgctggggttggcaggttttggtcgggacttttctcttcaaacagattagaaacccggagttatctgctagttggtgaaactggttggtagacgcgatctgctggctactaccggcctcccctggctgttaaaagcagatggtggctgaggctggttcaatgccggctgcctcctctgtgaagaagccatttggtctcagaagcaagatgggcaagtggtgccgccactgcttcccctggtgcagggggagcggcaagagcaacgtgggcacttctggagaccacg

SEQ ID NO: 11811 - DNA, 2300 bp, Homo sapien
tattcccactgccactgggaacatgaacatttacaaaatggcttttattaaaaaaaaaactgccaacaattaatgttatttcttacgggaaaaaaattaagctaaacaaatgaaaaaagcataacaccaaaaaaaaaaaaaacaaaaacaaaggccaacatattaaaacgagtaattgagattcctaactttatttatttcactatggacaggtgaaaaccttgtaatacattgatgctactccaaggatgtatgacaaggaaaccatagctgactactgcaaaagcttcctttgtctcctggtttctttacatagtaaagaaccttccatcaatcccagcaaactataggctacagactaaatccaatctgcattatggcattgtgagtaaagttttataggagctcagtcatgcctgtttgcttacatataattctggtggctttcacactacaacagcagacaacagcagggttaagaagacatgacagagaccacatagtctaaaatatttcccacctagtcctttacagaaaaagctttctaacccattttacaccataaccagaagccttaatactcaaatttaatcttgtgactcccctgctcaaatttctccaatgagcccctgcagcacacattgttggctccctatcaatagccattccttattctttcttgcagaagaaacacaagtctattgggatatttattatcccaatccccctcctcagcctcagaaagagaaatgtttattctaagctaatcatgtattttccttcccagtgcctggtttgggaatgagcaggtactctgacctagccaatgaaatattacaggaagcccttgcatgcttctaagttttctcccagttacgtgaataaaacactgccaacagcacagctgaaagagggacaagtgggatcctaggatatcaatgaacaaacaaaacaactctggttcctactgttttagccaccgctcatctagtatttgcagtccaaagcattctacctggtaaacttcccatggcccatggggtaaaacctactcatttctatagtattaaaaagtctatcatgaacttgccttagctgagtattcacctcattcccaacctctcgtatctcacacttttggtattagcaaaagtgaattgctcagaatccctgcaaagttcactcaagcatcttgtcttttgcacttgctgctctttctgccaaacagacaatctcattagatgttccttctggcaaacacacaacctcgttgcatgttccttctgccaaacattattcttctgcttctttacctagaaaaattcttctctctctgcatgcttaccttaaatcatacctacttttttccaaaattttcattcctcatcacatatgtctggcacataatcaatatataataaatcataattataagcttccagtgggcatctagcacacagtaagcactgaataaagtagtcaaataatgaaaatgacaatgataataacaagctcctgtctctacttttaattgtttgtgctctgtagcattagaaaaaatggctagtatctaaaagacatttgatagttatctgttaagtggacaagtgaaaatagaaatgttttctttgtaaattctgttgaaaaagcacagcaatgaaatggagacagctctattatgagcaccttaaagatgaaaactacatctattccatttttgtctcctgcaacttataaaacctaacttacagaagctctttgataaatagatggctaaattaaaggtgtcctcatacagtttggactatacaatgtattaggtgtctacaatcaggtagcatactagcatttttgttagtgtgaaacatttttctacttttatgataatctgctgagcctagagttgggcaatttgcatatttattatgacactcttttggcaaatggtagcagagcatcttgttctaacaaaattactgttatcatgacaattaaccagcaggtagaagaacacatcttgttccaaaaaagtcaatatatctctttccaacttcaaatgaggaggaatgaagtcagtaatagtgagaccttattgggacaagcatatgtaacatgacctgtgcttcagtgttcttttgtgatcaaaaattccttacttttagttttttatctatggtagaaccacccagagcaggggtcctcaactcccaggccacagactcataccagtccacggactattatgaaccacaccacacaggaggaggtgagcactaggcaagccaaggaagcttcacctg

SEQ ID NO: 11812 - DNA, 2300 bp, Homo sapien
gtaacatcaattattggattatattattaagcaatagaattatgaacaatgtaacactgatggtccctgagctggattcatggttaaagagtaatcatggccagtgattgaaaatctgcagttttatattgtcagtcactgatactaaggttgtggtctctcattgacctcagtgtttctgttcagggagggaaccaggtcaaaaaagcaacccaactgcctattaaaggaatcatatcttgcagaatgggacctttggtgttagtgcacaaacacaataacattctaatttatttcagttgcagaaaatcaggacagattaaaatttttatctactgtcattagtacatattagaatatattagaactggacttaagcagataatctagatacataacactatcatattacagtatataatttcaattaaaatttaagaatttgcatctctttctgtttggtgttgatttcggctcctaataatttaaagtgtgcctacaatccagttaggaatcttttaaaaaagcacttcagtgcactgtgggggctcactagttagggtttcatgaggtaaactcttttcaagtgaggaaggttttgcaacactacaaatgatctgctgattcatttttggtagatttaacacataacaagttaagtttagtccgaacaaatagtgaccaagttaagtttgctggttcatgtttttcttctccctttggctaaggtgaattatttttcacatgttagaagccagtgatgtggcagtagctaaacatagattaaaaagttaatcttaattttaattattatttatttttttaagtttaattttaattattttctaatttttattgtccatacttgattacttaagaataaaattattttaaaaacatgtgctccaaaagaggagacatcacagaaatacaacaagcaaattaaccttctgtttttgcatctgcaggaaatgtctcaagaaccagaaataaataagggtggtgatagaaaggtatacttttatattcaaatgtttgtgttgaattagatttttacattatgttgtttaacaaagtgtagtaagtgtaggcatacgtgatcctatcatgtaagtagcataaatcatcagtgaaaaatttaatacttaactcagaattctatacattgaattttaaagagatgcaaaccctagagatattctttcattattatggaatagtcccgaatggtgccataaaatgctaagtaatgccactttaggagctttggatcaataattttatctttcttggttttagtctgattatcaatagaaaatgtggctaaagtagataattttttattctgtgtattttccagctagaaaattttatggctatcgaatgtgaaatttggggagcaactcattttctggaattccatgattgtacctctgcagtttcactctgctccttatgttgtgggaaactttggttcccatgtttcagtgagcaccttcgtgtttttgatatcctaggaacctaatgaaaaaagaatgctcaaaggcagtgggggagaagaatatcttagtgcagaaaagggtcatcttccgttctattcctgaagccccacggtgtctcatcctctaaaatgactgtttaatgtaaaatctaggtggtaaagagggatgaagacacatttttcatctttgtctttttatttatgtgttcccaccagtcaaatgggggtaaatacatatataagattctgaagagtgattgagaataaaagcacaaaataaaggagggccctttttgaattttggaaaattctgttttactcattgaaacagaaatgaagcaaactttacaaaaatttctgtgatatattagtgatatgataagtacatcttaaaattatatggtaatagttctgtgtatatgatccaatttaagagtgaaatgtttttaatgactaaaataatgataaactggtcaagtgataaaatcaattaaaaatattctttctattcaataaagggataactatccttaatatcaaactttcattcaaggttgaagaagaaatgaagaagcacggaagtactcatatgggattcccagaaaacctgcctaacggtgccactgctgacaatggtgatgatggattaattccaccaaggaaaagcagaacacctgaaagccagcaatttcctgacactgagaatgaacagtatcacaggtaagtctgtggcaacattgaacaggagataactctatgctgtgaatctaattcatgatgaacaaattttatactttta

SEQ ID NO: 11813 - DNA, 2300 bp, Homo sapien
cacaagtttcagtgcaacaactttgccacaaatggagccatatagaggaaacaagaagcaggttcaggagaagcgtgtaccctgcctttggggctccagtccatgcctcaggtgtcacatggcactgcgggcttcttggttgccaagaggcagaccacaggccatcttggggaggactttatattcaagtgcagaaagcagccaggattaccatccaggggaaccttctatagccctggccagaccttgcagaggtgtctggttgctctttgagccagcttggcctccctggcatgcacaggcgccaggtgctaacacactgctccgagtgtgcttgtcctgccttggctgccacctaattcctgatggagcagaggccttaggaaaagcagatggcactgtggcccacctttagggtagaagtgatgtaccatgtctggccgttagttggtgactggtgcacctgctcctggcacacccttgcagaggtggctggttgctctttgagccagcttggccttgcccagcatgcacaagcttcagtgcaacaactgtgctacaaatggagccacagagaggaaacaagcagcaggctcaggaaccaggtgtgcgctgcctttggggctccagtccatgcctcaggggtcgtatggcactgcaggcttcttggttgccaagaggcagaccacaggccgtcttgatgaggactttacgttcaagtacagaaagcagccaggattaccatccaggggactcggccttctgtggccctggccagacatagaatttgtgccaaggcaggacaagctcactcggagcagcgtgtcagtcactggggcctatgcatgccaggcaaggccgagctggctcaaagagcaaccagccacctctgcaagggtgcgcctagagcaggcagagcatccagcacctcagccacacaaggaagtggggatggccagcttcccacagcttgattggctgccacctaattgctgatggaacagaggccttaggaaaagcagatggcactgtggccctacctttagggtagaaaaagtgatgtacatgtccggctgctagttggtagctcgtgcccttgctcctggcacacccttgcagaggtgactggttgctttttgagccagcttggccttggccggcatgcccaagcttcagtgcaacaactgtgctacaaatggagccatatagaaacgagcaacaggctcaggagcagggtgtgcactgcctttggggctccagtccatgcctcgggtcgtacggtactgcaggcttcttggttgccaagaggcagaccacaggccttcttgaggaggactttacgttcaagtgcagaaagcagccaaaattaccatccatgggactgagccttctgtggccctggcgagacttaaaatttgtgccaaggcaggacaagctcactcggagcagcgtgtcagtcactggggcctatgcatgccaggcaaggccgagctggctcaaagagcaaccagccacctctgcaagggtgcgcctagagcaggcagagcatccagcacctcagccacacaaggaagtggggatggccagcttcccacagcttgattggctgccacctaattgctgatggaacagaggccttaggaaaagcagatggcactgtggccctacctttagggtagaagaagtgatgtacatgtccggctgctagttggtagctcgtgcccttgctcctggcacacccttgcagaggtgactggttgctttttgagccagcttggccttggccggcatgcccaagcttcagtgcaacaactgtgctacaaatggagccatatagaaacgagcaacaggctcaggagcagggtgtgcactgcctttggggctccagtccatgcctcaggcatcatatgtcactgcgggcttctttgttgccacgaggcagatcacaggtcctcttgtggaggactttacgttcaggtgcagaaagcagccaggattgccacccagggcactcggccttctgtggccctggccagacttagaatttgtgccaaggcaggacaaactcactgggagcagcgtgttattacctgaggcgtgcgcatgccacggaagcccaagctggctcaaagagccaccagccacctgtgcaagggtgggcctggaccagttggaccagccaccaagctcacctactcaaggaagcagggatggccaggttgcaacagcctgagtggctgccacctgatagctgatggagcagaggcctgaggaaaatcagatggcacatttagctcttt

SEQ ID NO: 11814 - DNA, 2300 bp, Homo sapien
tcatcttgttagtcatcttgtcattttgctgtgtcccatcttcgtccttgcaatttttcctttttcccattttggcatgtattgagaggagtgttatgctgatgaaatgccctgtcctgaattgctatctgattagaacttccctcaatttttaaaatgcttcttgacatggtttggatttgtgcaccccccacccccaatctcatatggaattgtaattgtcagtgttggaggaggggcttgctggaaggtgactggatcatagaggtggtttctaatggtttagcctcatccacctcgtgctgtctgatgataaagttctcctgagatctgcttgtttaaaaagtgtgtagcacctcccctgactcttttcagccatgtgaatatgtgcttgcctccttttcaccttctgccatgattgtaagtttcctgaggcctccctataagcataagtctgtacagcccacagaactgtgagccaattcaatcccttttctttttcaattacccactctcatgtatatctttatagcagtgtgagaacagattaatacactcctcctcagaaagcattcaatttagctgtgtctaaagtatgccaggtgttctagggtgttatcttagccaataattcttcctcttcagcaagatctatttgcctatgacagcttgacctacatttcctaccatacttgtcagtaacaagtagcccataacatctgaatggacttcattgaaatcacagaggttctttagttctctactttattagcaggcattcgggaaacacatcaactttctaatttaataaggtgcctgttgctttgaaaaactgctcaaaagaagataggagaggcttacttaaagatatcactataggcatggcatgctggttcacacctgtaatcctagcactttgggaggctgaggagagaggatcacttgagtccagaaggtcaataccagcctaggtgacatggcaaagccccatctctacaaaagaaaacaaaatccaaaaaatatttaggcatggtggcatgtgttgcattcccagttactcaggagactgaggtgggagaatcactgagcccagggaggttgaggctgcagtgagccatgatcatgctgctgcattccaatctggggacagagcaagagcctgtctcaaaaaaaatgttatcactgtactatctataactattcttaattagaataactaggtttttttcaacagtggaaactcaaaacagacaaaattgttgtacctcaaggtgtgttgtcgtagtcatataattcctttgcttgtaactgcccaataaatggatgaggactcacttcacccataaataagaaaggtgaacagcacatggggcctgtagatgccttttgcagggccctctttttctcttcctaaagttgcaatttgagtatttctctagatgggcacatcatagaaactgtcgtcctagatcagagcctggggagagagatacaggtgtcatgcttacatctgcagagtgggaacaagcccagaaaaatcaagatgattaagcagagagcttccatactggagataaaccagctgtgtaaaaaatcattgcaccaaaaaagcattgcaccatcgacataactgctttaactaagaagtaaaggaactgatgccccagcagagcacagagagccacagagacaggagctgcatttcaaacaaggtcattgctgttgtccccaccctgagttaagtatctctgcttcacccttccttaccaaagttctgcttgatcatccttttgttttgttttcttttttctgtacttcacttctttgagaaaatataaaccaaaaccttacataaaacaggaattgagcttttgacaatgttagctcttgaaacaaccgaacaaaaaggtttctattatttctcatctctgtgctacccagtacagtatccaatagccacagatgactattaaaattaaaattaattcaaagaaaacaaaatttacaatttagttggtcagttgtactagccacatttcagttactcaatagccacatgtggctagtggctactgaactggccagcacaaatgtagaacattttcatcatcatagttctctaggccatggaaaaattactgaactcaatttccagtgtgcacatttatttgcgtacctaggagctttttgaccctgtgttgagatgcctaaacagcttcctgattgacctcctgatatttctgcaaatgtggactaagaggccaggattcctcaaggcccaggtgactcaggttattcca

SEQ ID NO: 11815 - DNA, 2300 bp, Homo sapien
actcagtggtgagcaagactcaggaccccttaggggcgagggcctgggttacaccaccagggggtcacctggaccctcagcagaaggtgaaggggtgatcattacctttgcgaccctgaaatgggtggcagccacaggacacagggttcattgaacccaccttgtgtaactattgcccaggaaaaggcccagaatttaataaagacaaggcccctggcagtgcagtgttggatggggcgcaccccctggggcacccctgaccctcccccagggccttggctctgagctttgattatagacacacgtatgccatggccccttcagactgctcccttcacctttgaaaaaccagacaggatgcttctgttcctggaaacacgaatgcccttcatgtgtttttttctttgactagaaactcaacttcaaccaaaatatagactcccacacaataataatgggagtctttaacatcccactgtgaacattaggcagatcaatgagtcagaaagttaacaaggatatccaggaattgaactcagctctgcaccaagcagacctaatagacatctacagaactctccaccaaaatcaacagaatatacatttttttcagcaccacaccacacctattccaaaactgaccacatagttggaagtaaagcactcctcagcaaatgtaaaagaacagaaattataacaaactgtctctcagaccacagtgcactcaaattagaactcaggattaagaaactcactcaaaaccgctcaactacatggaaaccgaacaacctgctcctcaatgactactgggtacataacgaaacgaagacagaaataaagatgttctttgaaaccaatgagaacaaagacacaacataccagaatctctgggacacatttaaagcagtgtggagagggaaatttatagcactagatgcccacaagagaaagcaggaaagatctaaaattgacaccctaacatcacaattaaaagaactagagaagcaagagcaaacacattcaaaagctagcagaaggcaagaaataagtaagatcagagcagaactgaaggaaatagagacacaaaaaacccttcaaaaaaatcaatgaatccaggagctggttttttgaaaaggtcaacaatattgatagaccgctagcaagactaataaagaagaaaagagagaagaatcaaatagatgcaataaaaatagataaaggggatatcaccaccgatcccacagaaataccagctatcatcagagaatactataagcacctctacgcaaataaactagaaaatctggaagaaatggataaattccttgacacatacaccctcccaagactaaaccaggaagaagctgaatctctgaagagaccgataacaggctctgaaattgaggcaataattaatagcctctccctgggaatgggcgggcctgggtccagtccacagggcccctcgcgggccctgacgcaggatggagttgaggtgggggcagcgctggaccccagggcccctgcctgcctcctggggagcccggtgacccaggcagccctggtgaggctgtgggtgtctgggccatagcgaggcccccgggctcccacaggacagatgcggacagtgaggccggggaggccctgctgccctccggactgtccctccagcccccagctttctgtggttctctggaccccctctgcagaggggcaggggagcacaccctggatcctgagacgccaagcttgaggaaccccagagctctagcgaggctgcttgctttgcggatggtggaactgaggtccagaggagggcaggggcaggtcccgggtgctccctaggcaaagggagccgatctcggggagggggtcacagggagcgtccctgcgacttctagggcccgaaagctggggaggatgagagaccaggggtctttcgtcgccccctggggctgggcagaggctcagcctgtgttgccacccaaagctgcttctggcaagtccgagccgcgtccctttaagagggggtggagcttcaacctggcacgagggatgctgccagcgtgcgtgtccctacggaagctgagactgcacttcctgcgaggcccctgcagcagcagcggcgtggtcagagcgagcttcggagaagcagtggtgggttccatgtgatggtggagtaggaggcaggtctccgcggtaagtggcgggggcgtggaccccaccgggaaccctcccggctccttccctgcctctccctgttttcgtgctttcacttcttcgtgggcatctgggcccga

SEQ ID NO: 11816 - DNA, 2300 bp, Homo sapien
tctgagcaagaaggtgggaagtgagcaagaaggtgaagaagtgatacattcccacagaacattacaagtttagcggaagctattattgaatgtaaagagaagaatgccccagaattctatgtggattgtcgggacaatactcatttctgtaatcaggcctactttcttttaaaaagtttatcatatcaaacctcacaaggacaaccagaactctgcgatatccactctacaaacctcagacccctacagtgtagtaaaggtggcagccaagatagaaagacagaaacacactgttggatgaccagtctttggaagttgagacagcaaatgtggatttactcagattattttcctgttagcacctccaggtgttattttgatggtactttgcattgggctgatgacacaatggggaaacataaactgctgacgctggacttcagcagtacagtaacagccatgtgcaaggccattgaaaaagtaaagactggtggttacattgccacgtgtttttctgcatggcatcatcatcttaactatggactttatgtgctttcacagcaagatgtttctagtatttagaaatggaccttatgcattgtatacttcctaagagcttggaaagctctcacccaggtactaccaaatgccagacatctctctatgtgggccattttctgccacagccagaattcattctgggtgacatgctgttcttggctgctaaggaagtgatgtgggggagccaggtgtctctcgctgtctgtgagtctatgggaaaaaggagaatactgaaaggcactaagtttactgccacgtttagaggagctttgtcaaggcaacacaagagtgttgtagtcctttgtggccaacaccaacctgagtttttacagcagttgttgcgtaatgatcacagtcacattcaagttcactttctaaatcttaggttctacaaaaactctgtctgataatgtcctatagacctttcggtagctaaaatcaatgagtttgaaaaataatttgaatttggcttgctcaccttttcagcagaatgcacttgtgagtcctgctctgtcattgtattttacatgtgtggctgtccctcttgctgtgttggaagtcagtgttccagaatgttaacttctacaaatacctatgtatagagcaaagagaaaactcttcaagtcaaaagagtgtatattatttcagggcagctctctagccttggatttgaaactatagtatttgttacacagagagaagatggttcttttttgtattttatttttaatgtttgtgggtacatagtatttatggagtacatgagatgttttgacacgggcattcaatgtgaaaaaaagcacatcctagagaatggggtatcccctcagtgattctttgagttacaaatattccaattacactctttatgttattttcaaatatatgattaagttattattgactatagtcacctgggtttgctatcaaatagtaggtttttattatatattatttcttttttgttttttgtatccattaacaattcctgcctccccctcactctctcactacccttcccaagctctggtaatcatccttctactctctatgtccatgagtttaattgtttttatttttagatcccggaaataagcgagaacacatgatgtttgtatttctgtgcctggcttatttttcttgacataatcatcttcagttccatccatgttgttgcaaatgacaggctttcatttttatggctgaatagtactccactgtgtatatgtaccacattttcttcattcatctgttgatggacacttaggttgctttcaaatattagtaattgtaaacagtgctgcagcaaacctaggagtgcagaaatctctttgatatactcatttcctttcttttgggtatataccaagcagtgggatttttggatcatatggtagtatatctgttttttttcaggaaactccaaactgtccaaggagatagttctgttgtgattacttcattgagaaatttaacttatgagccgttgaaaggaatgcaagttgctgcaaaatccgaatgaagagtgcaaaacgactaagctacaatgttttgtcattattcactctgatgtgaaaaaggcagtgaatttaatagaaaataacttcgtagagcaaaatctcaggtgtgtttttttagtgccgcagtcttggatgatgggttcctagaagctctcaacatctcttcttaattggagaaagtgttaagccccaaagtagctggagcagtacatcttcaat

SEQ ID NO: 11817 - DNA, 2300 bp, Homo sapien
cccttgaggggagtgaaagcattttcatttggcctcatgcccagctgcagccagctctttcacttctggagctgggctggttgtgataacctggaggagggggaatgagttgggatgactcacttgccccagcccatcaaccctggcctaggcttgtggccagacacctggttaaccaccccaagagagcttcctttctcagggaaataatgattattgattattgatcctctatatccacttcccaggacactgtcaggcacaccacaggcccttgggcatttttgtggcatcatcagccttattcctggatcaccatgtcaagctttcccaatagcagttggtggcaaactccaactcctactgtcagaaggcatcacaaggcccagatatgctgggcctcccagctcaggcaagcccagctgtcagggacacagaaacccctgacactgagccaagatcttttccccctgtcttggcttgaaattcagatatattgatgttgagccctcctggcccgcagtgggacccccccttagccttacagaggtaatgcctatatcatggcctaggtttttccaaaaagccagactctgggaagaacctggagtggaggaaaaaaccaggcagaggtaaccccatgaggggctctggcatgtgactccctgctggaaacgtgcccctaacagggcatcaaagccaggcaggcaggggctcctgctctgccagaggctggaaatcaggactgcagcttcccaccttactctggggatgcaggtcaactattttccctcagatgagagatgctgaagttccaattttataagatgagaagaagggctgaggtgatgcccattctgccactttgctgagtccagagctgtgatgaagagggagaagtcacaggacaaagaagggggctcagggaccccggagttttccttggcagaagtcaacttgccccgcccctgagaaaactctgacctcagctgccagggaggaaagcagggactggggaggaggggacaaggagagggaatagtctggtgctctgtgctctgggagagaagtctgatggcggcagtgactcaggaagggttaagaatattcctaaaatagccaagccacagcctaagccagttcatgaatgcctcttccagagagcagatcagtagcaggaaaattcagcctgatcttcgccccactgcctgccgcctgcccctggctactagttaagcctcccaccctgtccccttcaccaactcctgtcctagtggggatggggtaggagtagtcagaggggccaaatctccccagtcaacagggaactccagctgggaccaggagtactgggccccagtgcccgccaccaccccccacccccatccacactcctggtctgagtcaggtaggaggacttgggacagacaggcaaagtgcaggccttgtacatgggatggaaggtgccagaagagagcagccaaattctcccacccacacacatgcatcaccagccatgatcaggtgggacctccaagatcatcctcaaatactgccttctcctagctctgtgttcccctttacttagggcatcttggagtgagatgggcagggaggggtcgagtgagtcccttcatgaacaaaccttatctttgtttcagggacaggactgggtacataatttgcaggacccggtgctaactgaaaatgtggagtctgttcaaaaattgttaagaatttgaaggcagtgacaacatagcactaaaccaagttcaggtcccctctgacagtggggcttttgccactgcacaggtggcacctctatgaagccagccttgtgcaggggtttggtttaatgaacatttacttagcgcccactgctcagctcttctggctctgtaatatggtgtggctctgtgtctgcacccaaatgtcattttgaactgtaatccccacgtgttgggggaggggccttgtgagagggcattacatcatgggagtggttcccacatgctgttctcgtgatactgagtgagttcccacgagatctgatggttttataaggggactttcccctcttctgcacttctctctcctgctgccacgtgaaggatgtgtttgcttccccttccaccatgattgtaagtttcctgaggcctccccagccatgtggaactgtgaattaaacttctttcctggagtgtgaaaatgaactaataaactctgtgacctcagagactccctctcagtgaccctgttctcaaatgtatgaagatgggtgctcaaagatctctctctaa

SEQ ID NO: 11818 - DNA, 2300 bp, Homo sapien
gtgtccctgacagctgggcttgcctgagctgggaggcccagcatatctgggccttgtgatgccttctgacagtaggagttggagtttgccaccaactgctattgggaaagcttgacatggtgatccaggaataaggctgatgatgccacaaaaatgcccaagggcctgtggtgtgcctgacagtgtcctgggaagtggatatagaggatcaataatcaataatcattatttccctgagaaaggaagctctcttggggtggttaaccaggtgtctggccacaagcctaggccagggttgatgggctggggcaagtgagtcatcccaactcattccccctcctccaggttatcacaaccagcccagctccagaagtgaaagagctggctgcagctgggcatgaggccaaatgaaaatgctttcactcccctcaagggctgcagagggggcccttgcaaagggagggtcaccgagctgcaatttcttctgcctccaatccagaaagagcctgaaggattgctcaaggtgtcctgggaaagattttgatttcaaagagacaatctcccccaggaactccaggagaattttgtgtggcgtttaaagggtaagaagctgctgggtgtggcagctcacacctgtaattgctgtgctttcagagctacaggcaggaggatcacttgaggccaggagttagagaacagtccgggcaacacagtgagacaccccccactacaaaaaacaagaagacccctctttttacccctaattgagaggcgtgactagaaggcagaaagctggctgttgaggtgggagtctctctcttcaggcagaggtagggccgcttcctggggcagaggcgtgggtggtgtgtctggctctgcagttcctgatgaagacatactggggtgcccaggctaacctttggcaaaactaggagctgaactcaggagtccctgatgccagcctttctgatgcggtccccctcccctcccccatgtgtctcgctccatagctccaggccaggagccccaactggctggtggaggatgtcttgctcctcagcagctgggatttgtaagtatttgtaggaacatggaacagatcagtggctgacaggcccaggaagcagacagtccccttcccataggtcaccagcttcacttccccttcctgcaccccatcctgatttgagggagcccaggatgacaaagagggagtagttgagcaaggtatggagtggcagcctctacaggagctcaaaggatgcatttgtccatctgccctgggctcagcttccacactcagagtcactcacatccctccaccgtcgccacagctcacctgtgtgcccacacggccaaggtcacactgaccccaaacgcacactgtttcaactctcagcacttcactgtcacactcgcgtgtgtacacacatgctttctaatttccacagccacatggatgctcacacactcacacctttgcacacacacacaagctggctcacagacacactgggggcccagatcctggtcattccccacaggtcttaataaaggttcatggaaggaaacctgtttcctaaggtagggtgggagtgtgtgtgagtgtgtgggggggagagggtgagagtgagtgtgtgcgtgtgttagtgtgtgtgtgtatgtaaggagcaggagtgactgggtcctgagtttagggagttgggaagaggaaggagagatggagacaagcctggaccaagagccactcagagctgcctggaagggaagccaggctgagataaaggcaaggcaaagaaataagacactgacaaggatcaagccagggttgggtagggactgggaacagagtctgcctccatgagaagctgtcacattgctgctctggtgccctgtgacagcggcaccatctccagctggagactcccctctctggatcttgtcattgtgactttgctttgttggacaaccaggagtggtgacaggcagggaatatggtgcccagggcagctagccatgccacgccagtccagctgccaacccacccgtcactggccatctcatcacctgccagagggagtggggtggtgcagatgaaaccagcgatcagcttggctgcccttgcttcgtagtgccacagtagaggctaggggagcaactggctttcctccccaaaaggcgggcagggttatccacactttgcccaggtccctgaagcctgcggctgagctcggggataacaggggccaagtcaccggtcccagacacctaggaactattagagacaggaaccagcatat

SEQ ID NO: 11819 - DNA, 2300 bp, Homo sapien
tgacttttccctgagaaagagtatctgtttaacctgcatgatctcactctttagtatttgcttctttagtctacgtttgtttcctagttttgaatataatcatgatatggagagacaagtgaaatcaccacaattttgttttccaaaatgtgagactatgcaaatgctgaaatgagaattaatacatccaaaatatcgaaccacaattatggctttgctttactttttgcccgtaagagacatgtggcctagaataggtggcaggtattcctaccacaaccttgcttagcatagtggttgactaaatataaattttagagatgaaggttgttctatacccagatttcaatgtgattgctatgcccacttcactttctctaaaatacatatttttcttacttctcactttctttttcttcttggttgacattttttggctcagggattttttttttccttatgatctcaataaatttttctcatataaaaagacataatcgtgctgggagcggtggctcatgcttgtaatcccagcactttgggaggctgaggctggtggatcacctgaggtcagcagttaaagatgagcccggccaaaatggtgaaacctcatctctactaaaaatacaaaaatttgccaggtgtggtggcaggcacttgtaatcccagccactcgggaggctgaggcaggagaatcgcttgaacccaggaggcagaggttgcagtgagccaagatcatgccattggactctagcagggtgacaagagcaaaactccatctcaggaaaaaaaaaatcataaattttcccatattaaaaaaataacacaagatccggaatacagagaggagcataatgctttgcaggtcatagatgtaatctttcttccaggaaaaatgtatttcagatgagaccagaattggaaacatattctgtgccgtcagatagcactggcttaggagatgaatgaggaggagcctgcaggctacctcaaggataagaagcaggcaaaaggcaagcacaggggtggcatgcactcacactggggctgctccttcctgggcaagtttcagaaactcactgacagttagagctagcagctcccgtagagatgaatgcccatgttttcccgaagggagaactgatgtttagaaaggctgaatgacttgtctaagactctggggccagaacagggatcttattccagtatttcttgcatgaagccattctacttccacgtttctaatttataacttttaaaaggtcattttaaaaacgaaatagcataaacatcaagtctggaggctagtggtgggattattcacatttatttttccacttgacatttgagggcaatagtgatgcttaagtaaaaccaaaattatcctgggagtatagaaaataatatatctgtttacattttggtgtgggatgagtagaatcttgttttcaaattccttgcttgaaaggctattaagaagaataaatcctcacttaacagttttctaaatccttggtggtgtcctctgtcctttggtaacacgtgaaagtagagcacacttttctacttttgttccttctgcacccctcataaggtgaagcatgcatagagcactcccagggtcagtgtgagcccagcagcagctcaggctgccgatgctccagagtcggattccaccttccacttaaatggcagccacaggtagacgtgcccatcacaaccaactctgtgcgttcataatttctgtttattctacaggtggtttccacaagaaaaatggcacaatgtttctcagaagacaattacataagaatcagcatacttcaaattcacagcaaataatcagacaattgatgaaaatacttacccaaacactaattgtagactatgccttctgaatatgtttgtcataaacttggagtaaggaatcctcacaggcactggacaattcaaaaaacgtaaagttgtttgttagaatactggtgcttttgggtagaaaccctcatccatatcctggtaaggcttgaagttgcacaggagttttcatttgtcaaaacccagaaaaccataagctttagatttgtgaattttatattgtattatatgtgacctttctttttaaaaaatgagctgtaagcagtctcccagacagtagctcagcctccagaactctctttctgcatagttgaagacccctcttcacacaagatggtagcaacaaatcataggtgcaattgcaccaaattcacagaagatcaattgaaaatcctcatcaataccttcactcaaaaaccttaccc

SEQ ID NO: 11820 - DNA, 2300 bp, Homo sapien
cagcccttgaggggagtgaaagcattttcatttggcctcatgcccagctgcagccagctctttcacttctggagctgggctggttgtgataacctggaggagggggaatgagttgggatgactcacttgccccagcccatcaaccctggcctaggcttgtggccagacacctggttaaccaccccaagagagcttcctttctcagggaaataatgattattgattattgatcctctatatccacttcccaggacactgtcaggcacaccacaggcccttgggcatttttgtggcatcatcagccttattcctggatcaccatgtcaagctttcccaatagcagttggtggcaaactccaactcctactgtcagaaggcatcacaaggcccagatatgctgggcctcccagctcaggcaagcccagctgtcagggacacagaaacccctgacactgggccaagatctttgccccctgtcttggcttgaaattcagatatattgatgttgagccctcctggcccgcagtgggaccccccttagccttacacaggtaatgcctatatcatggcctaggtttttccaaaaagccagactctgggaagaacctggagtggaggaaaaaaccaggcagaggtaaccccatgaggggctctggcatgtgactccctgctggaaacgtgcccctaacagggcatcaaagccaggcaggcaggggctcctgctctgccagaggctggaaatcaggactgcagcttcccatcttactctggggatgcaggtcaactattttccctcagatgagagatgctgaagttccaattttataagatgaggagaagggctgaggtgatgcccattctgccactttgctgagtccagagctgtgatgaagagggagaagtcacaggacaaagaagggggctcagggaccccggagttttccttggcagaagtcaacttgccccgcccctgagaaaactctgacctcagctgccagggaggaaagcagggactggggaggaggggacaaggagagggaatagtctggtgctctgtgctctgggagagaagtctgatggcggcagtgactcaggaagggttaagaatattcctaaaatagccaagccacagcctaagccagttcatgaatgcctcttccagagagcagatcagtagcaggaaaattcagcctgatcttcgccccactgcctgccgcctgcccctggctactagttaagcctcccaccctgtccccttcaccaactcctgtcctagtggggatggggtaggagtagtcagaggggccaaatctccccagtcaacagggaactccagctgggaccaggagtactgggccccagtgcccgccaccaccccccccccatccacactcctggtctgagtcaggtaggaggacttgggacagacaggcaaagtgcaggccttgtacatgggatggaaggtgccagaagagagcagccaaattctcccacccacacacatgcatcaccagccatgatcaggtgggacctccaagatcatcctcaaatactgccttctcctagctctgtgttcccctttacttagggcatcttggagtgagatgggcagggaggggtcgagtgagtcccttcatgaacaaaccttatctttgtttcagggacaggactgggtacataatttgcaggacccggtgctaactgaaaatgtggagtctgttcaaaaattgttaagaatttgaaggcagtgacaacatagcactaaaacaagttcaggtcccctctgacagtggggcttttgccactgcacaggtggcacctctatgaagccagccttgtgcaggggtttggtttaatgaacatttacttagcgcccactgctcagctcttctggctctgtaatatggtgtggctctgtgtctgcacccaaatgtcattttgaactgtaatccccacgtgttgggggaggggccttgtgagagggcattacatcatgggagtggttcccacatgctgttctcgtgatactgagtgagttcccacgagatctgatggttttataaggggactttcccctcttctgcacttctctctcctgctgccacgtgaaggatgtgtttgcttccccttccaccatgattgtaagtttcctgaggcctccccagccatgtggaactgtgaattaaacttctttcctggagtgtgaaaatgaactaataaactctgtgacctcagagactccctctcagtgaccctgttctcaaatgtatgaagatgggtgctcaaagatctctctctaa

SEQ ID NO: 11821 - DNA, 2300 bp, Homo sapien
tctgagcaagaaggtgggaagtgagcaagaaggtgaagaagtgatacattcccacagaacattacaagtttagcggaagctattattgaatgtaaagagaagaatgccccagaattctatgtggattgtcgggacaatactcatttctgtaatcaggcctactttcttttaaaaagtttatcatatcaaacctcacaaggacaaccagaactctgcgatatccactctacaaacctcagacccctacagtgtagtaaaggtggcagccaagatagaaagacagaaacacactgtttgatgaccagtctttggaagttgagacagcaaatgtggatttactcagattattttcctgttagcacctccaggtgttattttgatggtactttgcattgggctgatgacacaatggggaaacataaactgctgacgctggacttcagcagtacagtaacagccatgtgcaaggccattgaaaaagtaaagactggtggttacattgccacgtgtttttctgcatggcatcatcatcttaactatggactttatgtgctttcacagcaagatgtttctagtatttagaaatggaccttatgcattgtatacttcctaagagcttggaaagctctcacccaggtactaccaaatgccagacatctctctatgtgggccattttctgccacagccagaattcattctgggtgacatgctgttcttggctgctaaggaagtgatgtgggggagccaggtgtctctcgctgtctgtgagtctatgggaaaaaggagaatactgaaaggcactaagtttactgccatgtttagaggagctttgtcaaggcaacacaagagtgttgtagtcctttgtggccaacaccaacctgagtttttacagcagttgttgcataatgatcacagtcacattcaagttcactttctaaatcttaggttctacaaaaactctgtctgataatgtcctatagacctttcggtagctaaaatcaatgagtttgaaaaataatttgaatttggcttgctcaccttttcagcagaatgcacttgtgagtcctgctctgtcattgtattttacatgtgtggctgtccctcttgctgtgttggaagtcagtgttccagaatgttaacttctacaaatacctatgtatagagcaaagagaaaactcttcaagtcaaaagagtgtatattatttcagggcagctctctagccttggatttgaaactatagtatttgttacacagagagaagatggttcttttttgtattttatttttaatgtttgtgggtacatagtatttatggagtacatgagatgttttgacacgggcattcaatgtgaaaaaaagcacatcctagagaatggggtatcccctcagtgattctttgagttacaaatattccaattacactctttatgttattttcaaatatatgattaagttattattgactatagtcacctgggtttgctatcaaatagtaggtttttattatatattatttcttttttgttttttgtatccattaacaattcctacctccccctcactctctcactacccttcccaagctctggtaatcatccttctactctctacgtccatgagtttaattgtttttatttttagatcccggaaataagcgagaacacatgatgtttgtatttctgtgcctggcttatttttcttgacataatcatcttcagttccatccatgttgttgcaaatgacaggctttcatttttatggctgaatagtactccactgtgtatatgtaccacattttcttcattcatctgttgatggacacttaggttgctttcaaatattagtaattgtaaacagtgctgcagcaaacctaggagtgcagaaatctctttgatatactcatttcctttcttttgggtatataccaagcagtgggatttttggatcatatggtagtatatctgttttttttcaggaaactccaaactgtccaaggagatagttctgttgtgattacttcattgagaaatttaacttatgagcagttgaaaggaatgcaagttgctgcaaaatcagaatgaagagtgcaaaacgactaagctacaatgttttgtcattattcactctgatgtgaaaaaggcagtgaatttaatagaaaataacttcgtagagcaaaatctcaggtgtgtttttttagtgccgcagtcttggatgatgggttcctagaagctctcaacatctcttcttaattggagaaagtgttaagccccaaagtagctggagcagtacatcttcaat

SEQ ID NO: 11822 - DNA, 2300 bp, Homo sapien
gactcagtggtgagcaagactcaggaccccttaggggcgagggcctgggttacaccaccagggggtcacctggaccctcagcagaaggtgaaggggtgatcattacctttgcgaccctgaaatgggtggcagccacaggacacagggttcattgaacccaccttgtgtaactattgcccaggaaaaggcccagaatttaataaagacaaggcccctggcagtgcagtgttggatggggcgcaccccctggggcacccctgaccctcccccagggccttggctctgagctttgattatagacacacgtatgccatggccccttcagactgctcccttcacctttgaaaaaccagacaggatgcttctgttcctggaaacatgaatgcccttcatgtgtttttttctttgactagaaactcaacttcaaccaaaatatgactcccacacaataataatgggagtctttaacatcccactgtgaacattaggcagatcaatgagtcagaaagttaacaaggatatccaggaattgaactcagctctgcaccaagcagacctaatagacatctacagaactctccaccaaaatcaacagaatatacatttttttcagcaccacaccacacctattccaaaactgaccacatagttggaagtaaagcactcctcagcaaatggaaaagaacagaaattataacaaactgtctctcagaccacagtgcaatcaaattagaactcaggattaagaaactcactcaaaaccgctcaactacatggaaaccgaacaacctgctcctgaatgactactgggtacataacgaaacgaagacagaaataaagatgttctttgaaaccaatgagaacaaagacacaacataccagaatctctgggacacatttaaagcagtgtgtagagggaaatttatagcactagatgcccacaagagaaagcaggaaagatctaaaattgacaccctaacatcacaattaaaagaactagagaagcaagagcaaacacattcaaaagctagcagaaggcaagaaataagtaagatcagagcagaactgaaggaaatagagacacaaaaaacccttcaaaaaaatcaatgaatccaggagctggttttttgaaaaggtcaacaatattgatagaccgctagcaagactaataaagaagaaaagagagaagaatcaaatagatgcaataaaaatagataaaggggatatcaccaccgatcccacagaaataccagctatcatcagagaatactataagcacctctacgcaaataaactagaaaatctggaagaaatggataaattccttgacacatacaccctcccaagactaaaccaggaagaagctgaatctctgaagagaccgataacaggctctgaaattgaggcaataattaatagcctctccctgggaatgggcgggcctgggtccagtccacagggcccctcgcgggccctgacgcaggatggagttgaggtgggggcagcgctggaccccagggcccctgcctgcctcctggggagcccggtgacccaggcagccctggtgaggctgtgggtgtctgggccatagcgaggcccccgggctcccacaggacagatgcggacagtgaggccggggaggccctgctgccctccggactgtccctccagcccccagctttctgtggttctctggaccccctctgcagaggggcaggggagcacaccctggatcctgagacgccaagcttgaggaaccccagagctctagcgaggctgcttcctttgcggatggtgaaactgaggtccagaggagggcaggggcaggtcccgggtgctccctaggcaaagggagccgatctcggggagggggtcacagggagcgtccctgcgacttctagggcccgaaagctggggaggatgagagaccaggggtctttcgtcgccccctggggctgggcagaggctcagcctgtgttgccacccaaagctgcttctggcaagtccgagccgcgtccctttaagagggggtggagcttcaacctggcacgagggatgctgccagcgtgcgtgtccctacggaagctgagactgcacttcctgcgaggcccctgcagcagcagcggcgtggtcagagcgagcttcggagaagcagtggtgggttccatgtgatggtggagtaggaggcaggtctccgcggtaagtggcgggggcgtggaccccaccgggaaccctcccggctccttccctgcctctccctgttttcgtgctttcacttcttcgtgggcatctgggcccga

SEQ ID NO: 11823 - DNA, 2300 bp, Homo sapien
agcttggccttggccagcatgcccaagcttcagtgcaacaactgtgctacaaatggagccatatagaaacgagcagcaggctcaggagcagggtgtgcactgcctttggggctccagtccatgcctcgggtcgtacggtactgcaggcttcttggttgccaagaggcggaccacaggccttcttgaggaggactttacgttcaagtgcagaaagcagccaaaattaccatccatgggactaagccttctgtggccctggcgagacttaaaatttgtgccaaggcaggacaagctcactcggagcagcgtgtcagtagctggggcctgtgcatgccaggcaaggccaagctggctcaaagagcaaccagccacctctgcaagggtgcgcctagtgcaggcggagcatccaccacctcacccgctcgaggaagtggggatggccaggttcccacagcccgagtgtctgccaccttattgctgatggagcagaggccttaagaaaagcagatggcactgtggccctacctttagggtaggacgctaattggtgactggtacaccggctcctgctacacctttgcagaggtggctggttgctgtttgagccagcttgtccttgcccggcatgcacaagtttcagtgcaacaactttgccacaaatggagccatatagaggaaacaagaagcaggttcaggagaagggtgtaccctgcctttggggctccagtccatgcctcaggtgtcacatggcactgcgggcttcttggttgccaagaggcagaccacaggccatcttggggaggactttatattcaagtgcagaaagcagccaggattaccatccagggggaccttctatagccctggccagaccttgcagaggtgtctggttgctctttgagccagcttggcctccctggcatgcacaggccccaggtgctaacacactgctccgagtgtgcttgtcctgccatgactgccacctaattcctgatggagcagaggccttaggaaaagcagatggcactgtggcccacctttagggtagaagtgatgtaccatgtctggccattagttggtgactggtgcacctgctcctggcacacccttgcagaggtggctggttgctctttgagcccgcttggccttgtccagcatgcacaagcttcagtgcaacaactgtgctacaaatggagccacagagaggaaacaagcagcaggctcaggaaccaggtgtgcgctgcctttggggctccagtccatgcctcaggggtcgtatggcactgcaggcttcttggttgccaagaggcagaccacaggccgtcttgatgaggactttacgttcaagtacagaaagcagccaggattaccatccaggggactcggccttctgtggccctggccagacatagaatttgtgccaaggcaggacaagctcactcggagcagcgtgtcagtcgctggggcctatgcatgccaggcaaggccgagctggctcaaagagcaaccagccacctctgcaagggtgcgcctagagcaggcagagcatccagcacctcagccacacaaggaagtggggatggccagcttcccacagcttgattggctgccacctaattgctgatggaacagaggccttaggaaaagcagatggcactgtggccctacctttagggtagaagaagtgatgtacatgtccggctgctagttggtagctcgtgcccttgctcctggcacacccttgcagaggtgactggttgctttttgagccagcttggccttggccggcatgcccaagcttcagtgcaataactgtgctacaaatggagccatatagaaacgagcagcaggctcaggagcagggtgtgcactgcctttggggctccagtccatgcctcaggcatcgtatgtcactgtgggcttcttggttgccacgaggcagatcacaggtcctcttgaggaggactttacgttcaggtgtagaaagcagccaggattgccacccagggcactcggccttctgtggccctggccagacttagaatttgtgccaaggcaggacaaactcactgggagcagcgtgttatttcctgaggcgtgcgcatgccagggaagcccaagctggctcaaagagccaccagccacctgtgcaagggtgggcctggaccagttggaccagccaccaagctcacctactcaaggaagcagggatggccaggttgcaacagcctgagtggctgccacctgatagctgatggagcagaggcctgaggaaaatcagatggcacatttagctcttt

SEQ ID NO: 11824 - DNA, 2300 bp, Homo sapien
attatattattaagcaatagaattatgaacaatgtaacactgatggtccctgagctggattcatggttaaagagtaatcatggccagtgattgaaaatctgcagttttatattgtcagtcactgatactaaggttaaagatatattctgccttgtggtctctcattgacctcagtgtttctgttcagggagggaaccaggtcaaaaaagcaacccaactgcctattaaaggaatcatatcttgcagaatgggacctttggtgttagtgcacaaacacaataacattctaatttatttcagttgcagaaaatcaggacagattaaaatttttatctactgtcattagtacatattagaatatattagaactggacttaagcagataatctagatacataacactatcatattacagtatataatttcaattaaaatgtaagaatttgcatctctttctgtttggtgttgatttcggctcctaataatttaaagtgtgcctacaatccagttaggaatcttttgaaaaagcacttcagtgcactgtaggggctcactagttagggtttcatgaggtaaactcttttcaagtgaggaaggttttgcaacactacaaatgatctgctgattcatttttggtagatttaacacataacaaattaagtttagtccgaacaaatagtgaccaagttaagtttgctggttcatgtttttcttctccctttggctaaggtgaattatttttcacatgttagaagccagtgatgtggcggtagctaaacatagattaaaaagttaatcttaattttaattattatttattttttaagtttaattttaattattttctaatttttattgtccatacttgattacttaagaataaaattattttaaaaacatgtgctccaaaagaggagacatcacagaaatacaacaagcaaattaaccttctgtttttgcatctgcaggaaatgtctcaagaaccagaaataaataagggtggtgatagaaaggtatacttttatattcaaatgtttgcgttgaattagatttttacattatgttgtttaacaaagtgtagtaagtgtaggcatacgtgatcctatcatgtaagtagcataaatcatcagtgaaaaatttaatacttaactcagaattctatacattgaattttaaagagatgcaaaccctagagatattctttcattattatggaatagtcccaaatggtgccgtaaaatgctaagtaatgccactttaggagctttggatcaataattttatctttcttggttttagtctgattatcaatagaaaatgtggctaaagtagataattttttattctgtgtattttccagctagaaaattttatggctatcgaatgtgaaatttggggagcaactcattttctggaattccatgattgtacctctgcagtttcactctgctccttatgttgtgggaaactttggttcccatgtttcagtgagcaccttcgtgtttttgatatcctaggaacctaatgaaaaaagaatgctcaaaggcagtgggggagaagaatatcttagtgcagaaaagggccatcttccgttctattcctgaagccccacggtgtctcatcctctaaaatgactgtttaatgtaaaatctaggtggtaaagagggatgaagacacatttttcatctttgtctttttatttatgtgttcccaccagtcaaatgggggtaaatacatatataagattctgaagagtgattgagaataaaagcacaaaataaaggagggccctttttgaattttggaaaattctgttttactcattgaaacagaaatgaagcaaactttacaaaaatttctgtgatatattagtgatatgataagtacatcttaaaattatatggtaatagttctgtgtatatgatccaatttaagagtgaaatgtttttaatgactaaaataatgataaactggtcaagtgataaaatcaattaaaaatattctttctattcagtaaagggataactatccttaatatcaaactttcattcaaggttgaagaagaaatgaagaagcacggaagtactcatatgggattcccagaaaacctgcctaacggtgccactgctgacaatggtgatgatggattaattccaccaaggaaaagcagaacacctgaaagccagcaatttcctgacactgagaatgaacagtatcacaggtaagtctgtggcaacattgaacaggagataactctatgctgtgaatctaattcatgatgaacaaattttatactttta

SEQ ID NO: 11825 - DNA, 2300 bp, Homo sapien
attcccactgccactgggaacatgaacatttacaaaatggcttttattaaaaaaaaaactgccaacaattaatgttatttcttacgggaaaaaaattaagctaaacaaatgaaaaaagcataacaccaaaaaaaaaaaaaaacaaaaacaaaggccaacatattaaaacgagtaattgagattcctaactttatttatttcactatggacaggtgaaaaccttgtaatacattgatgctactccaaggatgtatgacaaggaaaccatagctgactactgcaaaagcttcctttgtctcctggtttctttacatagtaaagaaccttccatcaatcccagcaaactataggctacagactaaatccaatctgcattatggcattgtgagtaaagttttataggagctcagtcatgcctgtttgcttacatataattctggtggctttcacactacaacagcagacaacagcagggttaagaagacatgacagagaccacatagtctaaaatatttcccacctagtcctttacagaaaaagctttctaacccgttttacaccataaccagaagccttaatactcaaatttaatcttgtgactcccctgctcaaatttctccaatgagcccctgcagcacacattgttggctccctatcaatagccattccttattctttcttgcagaagaaacacaagtctattgggatatttattatcccaatccccctcctcagcctcagaaagagaaatgtttattctaagctaatcatgtattttccttcccagtgcctggtttgggaatgagcaggtactctgacctagccaatgaaatattacaggaagcccttgcatgcttctaagttttctcccagttacgtgaataaaacactgccaacagcacagctgaaagagggacaagtgggatcctaggatatcaatgaacaaacaaaacaactctggttcctactgttttagccaccgctcatctagtatttgcagtccaaagcattctacctggtaaacttcccatggcccatggggtaaaacctactcatttctgtagtattaaaaagtctatcatgaacttgccttagctaagtattcacctcattcccaacctctcgtatctcacacttttggtattagcaaaagtgaattgctcagaatccctgcaaagttcactcaagcatcttgtcttttgcacttgctgctctttctgccaaacaggcaatctcattagatgttccttctggcaaacacacaacctcgttgcatgttccttctgccaaacattattcttctgcttctttacctagaaaaattcttctctctctgcatgcttaccttaaatcatacctacttttttccaaaattttcattcctcatcacatatgtctggcacataatcaatatataataaatcataattataagcttccagtgggcatctagcacacagtaagcactgaataaagtagtaaaataatgaaaatgacaatgataataacaagctcctgtctctacttttaattgtttgtgctctgtagcattagaaaaaatggctagtatctaaaagacatttgatagttatctgttaagtggacaagtgaaaatagaaatgttttctttgtaaattctgttgaaaaagcacagaaatgaaatggagacagctctattatgagcaccttaaagatgaaaactacatctattccatttttgtctcctgcaacttataaaacctaacttacagaagctctttgataaatagatggctaaattaaaggtgtcctcatacagtttggactatacaatgtattaggtgtctacaatcaggtagcatactagcatttttgttagtgtgaaacatttttctacttttatgataatctgctgagcctagagttgggcaatttgcatatttattatgacactcttttggcaaatggtagcagagcatcttgttctaacaaaattactgttatcatgacaattaaccagcaggtagaagaacacatcttgttccaaaaaagtcaatatatctctttccaacttcaaatgaggaggaatgaagtcagtaatagtgagaccttattgggacaagcatgtgtaacatgacctgtgcttcagtgttcttttgtgatcaaaaattccttacttttagttttttatctatggtagaaccacccagagcaggggtcctcaactcccaggccacagactcataccagtccacggactattatgaaccacaccacacaggaggaggtgagcactaggcaagccaaggaagcttcacctg

SEQ ID NO: 11826 - DNA, 2300 bp, Homo sapien
gctccctgtgagcctggaggaaattgctcagccccccagctggggagagagtccaggaggccaggctttctcttgcttcctggctcagggggtcacagaggaacaaggaaatttagtgtgtgtgtcttctttttgtttcattcaaaatttaatttagtatcaagcaagaggagctttagcttaaccctgcatatcaggcaagatttcagttacaaaatagtaccttttttttttttttgcacttgtgattggcttttcctctacttcttttggtaagagcaggttggtgtccaggctcagaatccatttttcctcccacaccaaagcacctgtggtgtgggtgaagcagactggagcctggctgcataaagctttgcagcaggagagtcctggcaggagcattgaggtgccactgccctggtccagctcagaggccagcaccagggaggctcagtgtcttgttctcaggatctgcacgtggggttgcctttctgcatctccccatcagtggtaggtgctcctccaagccccctcttgctggcctggacacagcggcctgcaccttgaccctattgcatgccagtggagcagagccccccaggccagaagccccacagatgttggccctggcttggacaggcagggggcaccggggcaggagctggctgcgatcctgtggccccaaatgccccctcgctgatggcctcgtgttctgggtgtggagcaaagaggagcaggtatcgaaggcacctcaggcaggtgctgggctcagtgggcgtcttgtgctccatgattttttttcaaattttattattattatactttaagttttagggtacatgtgcataacgtgcaggtttgttacatatgtatacatgtgccatgttggtgtgctgcacccattaactcgtcatttagcattaggtatatctcctaatgctatccctcccccctccccccacacaacagtccccggtgtgtgatgttccccttcctgtgtccgtgtgttctcgttccattcccacctgtgagtgagaacatgctccgtgattttgaggccatttgcagccagctccgccagccggtgctctgagctgcagcagcggccatgcacaacagcaccaccaggagtgtcctgggggctttcttcagaggaggctgtcagcatcctcaagttccagccacttagccccagtcctgcttcaagaagctttttctttcaccagaggcttctcaatggcctgaaagctaggctgactcccaggaagtttgccgggaaacaccaggctgtcagtgacattcgtggttccaaggcttatgcaggttgcacgcatcggccactgtctgtgccacgtgtactgacaccaccagagatgcgcacgccgcacgccgcacgcgcacgccgcacgccgcacgccgcacgcgcacgccgcacgcgcacgccgcacgcgcacgccgcacgcgcacgccgcacgcgcacgccgcacgcgcacgccgcacgcgcggcagtggcttggctggcttgtaacggcttgcacgtgcatgccgcgcgcgcacgccgcacgcgtataacggtttggctggcctgtaactgcttgcacgcgcatgccgcacgtgcgtaatggcttggctggcctgtaatggcttgcacgcgcatgctgcacgcgcgttaacggcttggctggcctgtaacactcggcatgcgcacactgcacgtgcgtaacggcttggctggcctgtagcagctagacttggctctgcgacctttgcttggcttggcagcgtgactgctgggatagacattccttccttggactgacgttttttctgtcacgttactccgctggacttgaccttttctcttctgggtttggcattcccttgggtgggccgggtgttttcttggggggtggggttggcccttcctggggtgggcgtggggtcgcccagcgtgggtgtgggctttccccaggtgggtgtgggttttccctgggtggggtgggctgggctcccctgctggggttggcaggttttggtcgggacttttctcttcaaacagattagaaacccggagttatctgctagttggtgaaactggttggtagacgcgatctgctggctactaccggcctcccctggctgttaaaagcagatggtggctgaggctggttcaatgccggctgcctcctctgtgaagaagccatttggtctcagaagcaagatgggcaagtggtgccgccactgcttcccctggtgcagggggagcggcaagagcaacgtgggcacttctggagaccacg

SEQ ID NO: 11827 - DNA, 2300 bp, Homo sapien
gcaaaactctgtctcaaaacaaatacatatatggaagcaaactaagtgtctatagatggatgaatggatgaataaaatgtggtatatatatgcagtggaatgctattcaaccttcaaaagaaggaaatcctgccgtttatgacaatgtggatgaacctggaggacatatgctaagtgaaataaatcagacacagaaagacaaatatcatgtgatctcacttctctgtggaacctgaaaaagtagaattcacagaaacagagtggaagggtggttaccagagggcagggagcgggggaaatgggaagttgttcgtctaagggtagaaactttcagctgtaagttctagagatctaaggtagagcatatgactatagttaataaaaatacatcgtatacatcccagcactttgggaggccgaggtgggcagatcacaaggtcaggagatccagaccatcctggctaacacagtaaaactccgtctctactaaaaatacaaaatatatatatatatatatatatatatatatatatatatatatatatatatatatatatatatatatctgggcatggtggcgggcgtctgtagtcccagctactcgggaggctgaggcaggagaatggcgtgaacccgggggtggagcttgcagtgagccaagatcgcactgctgcactccagcctgggcaacagaacgagactccttctcaaaaaaaaaaaaaaaaaaaaaaaaaagggccaggtgcggtggctcatggtctaaaaagccatcagggataaaggtttctctgagtgctgctaaaagaaaccaagactggggcccagtgtggtggctcatgcctgtaatcccagcactttgggaggccaaggcaggctgatcacttgatgtcaggagttcaagaccagcctggccaacatggcgaaaccgccctgcccctgtgtctactaaaaaatgcaaaaattagccaggcatggtggtgcacacctataatcccagcacactaggaggccgagggaggtggatcgcttgagcccaggagttcgagaccagcctggccaacatggtgaaaccctgtctctactaaaaataccaaaattagtcaggtgtggtggcacgtgcctgtagtcccagctactggggaggctgagtcagaagaatcacttgaacccaggaggcggaggttgcagtgagctgagattgcgccactgcattctagcatgggtgacagaatgagaccctgtctcaaaaaaaaaaaaaaaagaaaatatacaatgcctggatttcctttaaaataatccagggaggggagaaagggtggagactatagatgagataaaactgcccatgaactgatacttgttgaagcagggttaatagtacattatatcattctttcatatactattattttgtattttttgtatccaatagttttcataatcaaaagttaagttttcataatcaaaagttaattctaaaatctgaaagaatatgcacaaaaatgtaggaagtcaatgtgaaattacactaacacatgaatactttcctccttttcttctttttttttttaaacggagtcttgctttatcacccaggctggaatgtggtggcttgatctcggctcactgcaagctccgcctcccaggttcaagtgattctcctgcctcagcctcccaagtagctgagactacaggcttgtgccaccaggcccagctaattttttgtatttttagtagagacagtatttcaccgtgttagccaggctgatcttgatctcttgacctcgtgatctgcccgcctcggcctcccaaactccttttcttctttttctgtagcaatgagcatgcataatcagaaagaaaaataatgtttaaaagtgggtttaaagtctctgtacaagttgtggctaaaaggggcaccaaaagtagccacttgtgggcaggatgctccctcctccctccgggagaaacacaggtgctgctttgtgcctttagctcctggatcctggggctgagctgggagggagtaaaggagagggggatgggagggtgtgtactggggcctgtattctacgctgggcagagtcccagccactcctcatgcagcttgtgaggaagcctttggtggtcatcttttaacaggtgagtaaactgaggctcagagagatcagtggagtcatctgagagaatgtgcgttgatgcatgttccctgctgggcacttcctctctcatctaatccctgaggccagccctgtggggtgggtatcattctccccaatttatagaggaagaaacagcac

SEQ ID NO: 11828 - DNA, 2300 bp, Homo sapien
atgaggaaatgttgaacctaaagaagcttctctcaccaaataatgaaaaacgtgcgatttccaatggccccaaaaaccagtcaatgaagaagagcaagaaaaacaaggtgaaggaagcgaggatgaatgggaacaagtgggcccccggaacaagacttccgtcacctgccaggcggattttgttcagactccaatcaccgcatttttggtggccacatcaggtctgtggtttaccagcagagtgcaaaagaatctgccactttgcagccatttttcacgttgcagttggatatccagtctgacaaaatacgcacagtccaggatgcactggagagcttggtggcaagagaatctgtccaaggttataccacaaaaaccgaacaagaagttgagataagtcgaagagtgactctggaaaaactccctcctctcctcgtgctgcacctgaaacgattcgtttatgagaagactggtggtgtcagaagcttatcaaaaatactgaatatcctgtggacttggaaattagtaaagaactgctttctccaggggttaaaaataagaattttaaatgccacagaacctatcggctctttgcagtggtctaccatcacggcaacagtgcgacgggtggacattacactagagacgtcttccagatcggtctgaatggctggctgcgcatcgatgaccagacagtcaaggtgatcaaccagtaccaggtggtgaaaccaactgctgaacgcacagcccatctgctgtattactgccgagtggacctgctgtaaaccctgtgtgcgctgtgtgtgagcccagtgtccgctttgtaggacaccacctcacactcacttcccgcctctctttattggctctttagagagaaactctttctccctttgcaaaaatgggctagaatgaaaaggggatgccttggggttcgtgcacaacatagcttctgttgactctaactttgaaatcaaaatcatttggttgaaacagactgtcgcttgattttaaaaaatacacaaaaacccatatttctgaaataatgctgattcctgagataagaaagtggatttgatccccagtctcattgcttagtagaataaatcctgcaccagcaacacttgtaaatttgtgaaaatgaattttatctttccttaaaaaagaaatgttttaatccatcacatttttcttccctaccctttagtttttgataaatgataaaaatgagccagttatcaaagaagaactagtttttacttcaaaagaaaaataaacataaaaaataagttgccggttcctaacaggaaaaaaattagtaattgtgctgagggaaactgcttacatagacattgcagatcaaatatttggagttaaaatgttagtctacatagatggatgattgtaactttactgccattaaaaagatttcagattgcattcatgcttctgtgtacacataatgaaaaatggacaaataatgaagatctctccttcagtctgctctgtttaattctgctgtctgctcttctctaatgctgcatccctaattgtacacagtttagtgatatctaggagtataaagttgtcacccatcaataaaaatcacaaagctggtttaaaaaaaagaaatagtcatagatgatggtataggtggagaggggttgctgggctttatgtaaagtgctattcaaagcttcacatataggtttcattcaaactttaagaagaaaaaaatgaacaatcagaaatgggtaagatgtggggatataaatagatattttgcacataagacttctgcatccccaaatattagcttgttgtggaattctgtcatctattcttgtttcagtcaaaacaagcaaaaaaaaaaaaacagtcagaacagtatgaacaacaatcatctagttccaccaaaaacttttcactcagcaagcaagcattgagtccctagctgaagatgcaaagaggagcaagaaatattctcttccattgagacggtcattgtctaaaggaaaatgtagataagcaaccagacattcagaatgacctgtgttacaagcaataataaagctgagcgctgggtactatggggcacttgggaaggctgcctaagccagagagcttcacagggagccttgatgtctgagtaagaattaaccaggtgaagcagaaggggaaataggctctaggaacagagagctttgagcgcaaaggcaggcagagtgtgaggagaggaggccttacttccttgtgactgcagcatgaaggtaaggggagggctgagagaaatgaggctc

SEQ ID NO: 11829 - DNA, 2300 bp, Homo sapien
actttatgtcctgttagaggaaagatttgaaagcatactggctggagaggcagaagatctgggttctggtttctacttagtttgaactttcttggacttagtctctgtatctgtaaaatgaaggactgaattaagttatccttacagccttttctaactcttaaattttaggattgattcttaatggtttaagatgtgttaacaatggaattaccctaaatgtcaaatcccattgttttttaggtaataaaaattatactgaaatcatttgaagatatatttagtcattgtagaaaggcaattaaatacccctgctttacataattgaaaagcaagtagtgtttccttcactaggaatatagagtataaaatctcttaaaaattattcttaatgtgcaccaaaattatttattactgtttttttgagatggagtcttgctgtgttgcccaggctggagtgcagtggcagcatcttggctcactgcaacctctgcctcctgggttcaagtggttctcctgtcttggcctcccaagtagctgggattacaggtgcatgccaccacacctggctaatttttgtatctttagtagagatggggttttaccacattggccaggcttgtcttgaactgacctcaagtgatctgcccgccttggcctcccaaagtgctgggattacaggtgtgagccaccgtgcccagcctcgtgtgcaccaaagttaaaatgtctgagaaagaggatgaaaaattttaaagttttagggccgggtgtggtggctcacgcctgtaatcctagcactttgggaagctgaggcgggtgaatcatgaggtcaggagatcgagaccatcctggctaacacggtgaaatcccgtctctactaaaaatacaaaaaattagccgggcgtggtggtatgcacctgtagccccagctactcgggaggctgaggcgggagaatcgcttgaacctgggaggccgaggttgcagtgagccgagatggcgccattgcactccagcctgggctacacagtgagactccatctcaaaaaaaaatttttaaaacatccctccctattttacagctaacgacatagattttataggttacaatacaaactatttcctttatgttggaaaatgatttgaggaaatgattttatgtatattcatgatttctgccttgaacgttttacttctttgttagtttcacagaatcagcttgaagctgtaattaaaactaaaaaagtaaagcaaaactgccaggaatattacatgacactttaaaagatttattcagaagtttaatatattcacaaggtacaaactttaaagttacaaaaaaggcatagagtgaaaagtctaccccagttccctggtcactcatttttgctccagccactcacttctgctctttgtaagcgatagtcttgccagtgtcttgtgtctctttccagagactatgtagaagcaaataattttttatttaaaaatgtttatatttgaataggtgatacatatagatggcaagaaaattcaaaagggcaggcagtgaaaattttcttcgctcacccacagttccccagtttctgtgtttccctctgcagagacagtcatcctttcttatatatccttctggatgttgtctataaatatggaggcattgttagtgtagagcatggtggtttttatgagccatcccaagtgtagtatttattaagatagtgcattaaaatgataaaattaatcatacatagaaaattactgcaaagtttggaaaagattgagtaaagtagctattgtactacatggctttcgaaatttcaaacaacacaggtgtgcacttcttaaactctcttctttatggagtattataatcttagtataaataagtaggaagacatgaaacaagaatatagaaattaagctgaggacattttgtttccaggatctgggaaagaaagaagtttatgaactcacaagtgattgtagagcatctctgtggaaataaatggttaagtcggtttgaagcaaagcccttctggggcagaaaagcctccagaacgccagatgtcgctgtggttccgcggtgagagagggcgtgcgtctctgtggttataaagttgggggtggagtggccgggagatgatggctgatgaagaggaagaagtcaagccgatcttgcagaaattgcaggtggggccgtagattaaattctgtatgtgtttttgttactccgaatgaagcagggagtccagtttatgtactgcccgtgaattcctcggcacacacgcgaagctgcgtg

SEQ ID NO: 11830 - DNA, 2300 bp, Homo sapien
atttatatttattttgtacacggtggtgattagaaaccaatcaatactctaaacttgattgagcaataaaggattttctaccgaaaggaaaatcatcttgatggcttttatgtgaatatatctttgcccactttggtttgagtggggatggtttatcttgttatgagcatgtgtttaatgctgggaaggagtgacagcagtggcccagaacaaccaagtcatctttgtattcacaggggcagaaagggcatgctttcagtgtttacttagaaaatgtgtgctggatatgcccctgaactcatggtgttgagggcatattttagtattaagttaggaaaagctgaaatgtattttaggatgtaaacatgcaaaataaaaaaggaagcctttgggaatttctccaaagctgttttagtcttaagaggcttagttccggttttttaggtggaagttttgtgagttgggaaaacattacattctttccaatggaagcatgcttttgttaataagacttcataatacattggagtcttcattgttaagtaggaaatgaggggaagggggaagcaaacctgtgtcttttttgcttgaaggacaatatggccgggcgcggtggctcacgcctgtaaccccaacactttgggaggccgaggagggtggatcacctgaggtcgggagttcgagaccaacctgatcaacatggagaaaccccgtctctactaaaaatacaaaattagccgggcgtgttggtgcatgcctgtaatcccagctactcgggaggctgaggcaggagaatcgcttgaacccgggaggtggaggttgtggtgagccgagatcgcgccattgcactccagtctgggcaacaagagtgaaaaaaaaaaaggacacaatatcttggagttggaagggcccttatgagtactatatgagtgacctttctggcttctgggttattgtgagaagtgtgactttttgttgttaaatttgtttttattgtagattcacggggtacatgtgcaggtttgtttcagggtatattgcatgatgctgaggtttgggcttctattgatcctgccatctaggtagtaaacattgtacccaataggaagtttttcagctcttgcccctctctctcttttcctccttttggagtacctagtgtctattgttcccaactttttgttcctgtgaacccagtatttagctccctacgcaagatttagctcccaacgcaagatttagctcccacttataagtgagaacatgcaatacttggttttctgtttttgcataaattcgtttaggataatggcccccagcagcatccagcagctccagttgctgcaaaggacatgttttttgttttttttttttttatggctgtggaaaagtgtgaaatttttaggcagaatatttgcctttctactcactagctggttgagcttgggcaagacatagaaataacatattaaacatttaactccatgccagctacagtgcaaaatgtatttattacctcagtcttcacggaagttttaagaggtatgtagtatttgtcctcattttacagaggggacagctgaagtttagagaagttgcataacttacccatgggcacagcaaatacatgagagagccaggattaaaatctagtttagtatgatttcaaaatctattattttagggaatattaattagtgcagctatgatggaaaacagtatggaaatttctcaaaaaattaaaaatagaactaccatataatccagaaatcccatttctgggtatattcaaaggaaataaaactagtatgtcagagatacctatactcccatgttcattgcatcattattcacaaaagccaagatacggaattgacctaagggtccatcaacggatgaatggataaagcaaatattatacatatgtacagtggaatactattctgccttaaaaaggaaggaaactgatagtgagtgggaaataaaacttggagtctgttctgatagcagtaccttatataactatctctaaaggaaaactataccaagctattagtctagtatttacttcctatgaacaaaattttgtgtgttcattttgtttcaggttgaagatgaaatccactgaggagggaagtccagcaccctgtgtgccagtccagaactggcccatctgtagaccccctgaaaatcatatgggcttggatttggatattctcaacagaaagggttaaaggctgatggtacctaaagcctggtacttgaattttgatcaagataagctgccttaagttctcttc

SEQ ID NO: 11831 - DNA, 2300 bp, Homo sapien
gatccagtcacctcttgaaggccccacttctaatgaggattaagtttcagccactttagggattaagtttcaacatgaattttgtaaaaggtgaaagatttatgcgatatgaagagaaactagagtgacaacatgaattttgaaggggacagtcaaaccatagcaactgggatctgaatcctgactttaccacttgctaaatagacaaattccttaatctctataactctgtttccttttttttttttttttttttggtgaaatagttataatgaaagtgcttacattcttgggttaatgtgaagattaaacaaggtaatgaatattacatttcttgaatatttatagtaaacattcaagaaatgttttgactctagaagttacaataaatcaattatgaaataacaaattagcatttgatgctaaatgttgggaaatttggggcaggtaaactctaaagtggattggaataggtaatttctagtaaggtggaagcagggtggataggatgaaatgattaaaaaatgagaactactatgagttagagttgtatcatttctccatataacttgaatctttatacttcaaacatttgcacattacatgtatatttgtacatataacacatacttgtatatatattccctattactataatagtatttattaagaataatgatgaatattgtgccggggagtcctctaattatggcttaaaaagaaatctttcagcttgggcaacatggcgaaaccccatctctacaaaaaaatacaaaaattagctgggtgtgatggtgcacgcctgtagtcccagctacttactgaggcaggagatcgcttgaacctgggaggtcaaggctacagtgagtcgagatttcaccactgcactccagcctgggacacgaagtgagaccctgtttcaaaaaaaaaaaaaatttaacagagtaagaacctatactttaactggagggcgatgtgaggagtcaaaataattgattaatcaattatgtcctcagcattgaaagtcattgtttttgtctggagatgtgtaaaacgtacactttgatctccagttgtttatagtctacttgggaatataaatctaacaagaaatatgtaataacaataataacagctaacattgttgagtactgtgtaccgggcattgtactgagtacattatataaattattttacttaatcctcataaccatcagagtaggaagatttcatcttttttccctctttttatagttggaactgaggcttagatgtgtgcaaataagtggcaaggttcagattcaaaatcagctaaattttatttgaagcctaaaacacttaacccacctaccttttatctactaagcctgttagttcaaagattacctgaaggtaaattttatcaggccagctttggatctggggggaaaaaatgaaggtaaattttaacttgaatcgatctagactgtttataatggaatctgttgcctagcataagttaagcatgttgaggtcacaaaggataagaaattacccttaagggatgaaaattctttagaatagaatgcagtaggcccacgcaaacaacaacgtgtataaatagcttaaattagcctgtttttgcctaagtacattaactcaaaaggaaactcggtttaagaagttcactccaaaaatagtgcaagaagcatcactggtccataaagaggggtggagtgggttacgtcatttcagcaccttttaaggtaaaggaggagggaatcctcttgaactcattagccaatcaggttctgaagacacttcccaaggcgacttcctgtctctccactttctttccctctccgttttggtgggctggtgagtgtgcgcttaattttgctctctaattgttttgaatttctcttccatttgagttatatacccaggtggcaggcctttatttcaagtcggcataggagtgtgtgtgagtcgcaaggagattaatttcggctgtgtggaggttgggagaaggcagtgaaatgctcttcctggcttgtttccacgtgggcctctgcagtactgggtttgccttccgtctccgagtcctggtgacccaggaacaatagactgtgcttcatgtgcacagtgcgtgtgttcttggaaaacgccggcttcattttgcttggcgggaaagatattatcatcctaatgctgttttgatttatatctccctgggtgaggtcagatttcgggagaaggcgttcagctcagtagagtttaattctccggtgagtgtctagagggcccaggtccttactggg

SEQ ID NO: 11832 - DNA, 2300 bp, Homo sapien
ctgtggggtaatttattttaaaaaagaaatttattttttgcagttatggatgctgtgaagtccaaggttaaggactgcctctgggttgcatctgaactccttcttgctggaggggactcgctgtgatgttccaaggcgtggcaggaaatcacatggccaggatgctgagactgctaacatgctatccttaagtctctttgccttttctttaaagccactagttcccctcccatgataacctattaatccatgaatagattaatttatttatgagggcagaaccctcatgatccagtcacctcttgaaggccccacttctaatgaggattaagtttcagccactttagggattaagtttcaacatgaattttgtaaaaggtgaaagatttatgcgatatgaagagaaactagagtgacaacatgaattttgaaggggacagtcaaaccatagcaactgggatctgaatcctgactttaccacttgctaaatagacaaattccttaatctctataactctgtttccttttttttttttttttttttggtgaaatagttataatgaaagtgcttacattcttgggttaatgtgaagattaaacaaggtaatgaatattacatttcttgaatatttatagtaaacattcaagaaatgttttgactctagaagttacaataaatcaattatgaaataacaaattagcatttgatgctaaatgttgggaaatttggggcaggtaaactctaaagtggattggaataggtaatttctagtaaggtggaagcagggtggataggatgaaatgattaaaaaatgagaactactatgagttagagttgtatcatttctccatataacttgaatctttatacttcaaacatttgcacattacatgtatatttgtacatataacacatacttgtatatatattccctattactataatagtatttattaagaataatgatgaatattgtgccggggagtcctctaattatggcttaaaaagaaatctttcagcttgggcaacatggcgaaaccccatctctacaaaaaaatacaaaaattagctgggtgtgatggtgcacgcctgtagtcccagctacttactgaggcaggagatcgcttgaacctgggaggtcaaggctacagtgagtcgagatttcaccactgcactccagcctgggacacgaagtgagaccctgtttcaaaaaaaaaaaaaatttaacagagtaagaacctatactttaactggagggcgatgtgaggagtcaaaataattgattaatcaattatgtcctcagcattgaaagtcattgtttttgtctggagatgtgtaaaacgtacactttgatctccagttgtttatagtctacttgggaatataaatctaacaagaaatatgtaataacaataataacagctaacattgttgagtactgtgtaccgggcattgtactgagtacattatataaattattttacttaatcctcataaccatcagagtaggaagatttcatcttttttccctctttttatagttggaactgaggcttagatgtgtgcaaataagtggcaaggttcagattcaaaatcagctaaattttatttgaagcctaaaacacttaacccacctaccttttatctactaagcctgttagttcaaagattacctgaaggtaaattttatcaggccagctttggatctggggggaaaaaatgaaggtaaattttaacttgaatcgatctagactgtttataatggaatctgttgcctagcataagttaagcatgttgaggtcacaaaggataagaaattacccttaagggatgaaaattctttagaatagaatgcagtaggcccacgcaaacaacaacgtgtataaatagcttaaattagcctgtttttgcctaagtacattaactcaaaaggaaactcggtttaagaagttcactccaaaaatagtgcaagaagcatcactggtccataaagaggggtggagtgggttacgtcatttcagcaccttttaaggtaaaggaggagggaatcctcttgaactcattagccaatcaggttctgaagacacttcccaaggcgacttcctgtctctccactttctttccctctccgttttggtgggctggtgagtgtgcgcttaattttgctctctaattgttttgaatttctcttccatttgagttatatacccaggtggcaggcctttatttcaagtcggcataggagtgtgtgtgagtcgcaaggagattaatttcggctgtgtggaggttgggagaaggc

SEQ ID NO: 11833 - DNA, 2300 bp, Homo sapien
taaatggagataataacatatgcctcatgaggttgttgtgagaattaaataatgtatgtaaagctcatagcatagtaagaactaaataaattctggctattattcttatgaagattaaatgaggttatgcatgtaaagcattagctcagcctctagtacacaagaaagttctactaagtattagctatttttaataaattttcatttcataaaggcttatatttttcctatctccaaagtatttccttttagacctagtctaatttatttgtgtcataattaagtcagatgtaacaggctttgtaccgctgaaacaggttaagcaatcctatccaacaacatttattgagcacttacattttgttagatttatttccaactacttgatatgctttggtgttattgtaaatgctaccttatccaaaaattttatttatagttgtttgaagctcttttataagcatggaatttattttcacacgctattttctatcagtcttgctaggctttgtattaaggtaaaatttttatcctgtagtttcttctagcttttaaaatattcataatcaaattacatgcaaataatgagattttgggttttttctttctaaactttacatcttttgatgaacaaaaattaaaatgtatcaatttttttttctttgtttttttcagacggagtctcactctgtcacccaggctggagttcagtggcgggatctcggctcactgcaacctccgcctcccgggttcaagcgactctcgtgcctcagcctcccaagtagctgggattacaggcgcccgcgaccacgcctggctaatttttcactttttttttttttttttttgtaatagagacgaggtttcgctattttgctcaggttgctctataacagatactatgctatcctaacaatatgtttctaaatgatattagtgccaaaaccaggattacccagtgattttgttaatacaggcttattgaatcggagggtctggggtggggaatttgcttaagtatgcagtccccatactcggtgattctcatgaagccaaacatttgggcgcccctcacctgatgtcaccaagaaccagaagaccaattagaattttcgtgggcttcctgccccatggttccctctgttcccaaagggtttctgcagtttcacggagcttttcacattccactcggtttttttttttttgagactcgctctgtcgcccaggctggaatgcagtggcgcgatctcggctcactgcaagctccgcctcccgggttcacgccattctgcttcagcctcccaagtagctgggattataggcgcccgccaccacgcccggctaatggctaattttttgtattttttttttttagtagagatgggggggggtttcaccgtgttagcctggatggtctcgacctcctgaccttgtgatccgcccgcctcggcctcccaaagtgctgggattataggcgtgaaccaccgcgcccggcccggtttcgttttgttttttttttttttttttttttccaaaaatgggcggaggagagtagtctgaattgggttatgaggtcccctgcggggtacctcacctcagccattgaactcacttcgctggccgtgagtctgttccaagctccggcaaaggaggcatccgccgggcccctccccgaagggcggggtccacggcatctcctgcccagtctgacctcgcgcggagccccgttctctgggaactcacctccccgaagctcagggagagccctgttagggccgcctctggccctagtctcagaccttcccaagggacatgggagtggagtgacaggacgcactcagctcgtggccccactgatgagcttccctccgccctatgggaaaaagtggtctcatacagaacttataagattcccaaatccaaagacatttcacgtttatggtgatttcccagaacacatagcgacatgcaaatattgcagggcgccactcccctgtccctcacagccatcttcctgccagggcgcacgcgcgctgggtgttcccgcctagtgacactgggcccgcgattccttggagcgggttgatgacgtcagcgttcgaattccatggcggcgcggcggcgacggagcaccggcggcggcagggcgagaggttcggagctcaatatcgcgggacggcatgcggggggcgggcagtcagaaaggaacgatgccacctactgtgacccccttccccttccagctccctataacctgcacttggctaccaaaccagttggggtgctaaattttgtaaatt

SEQ ID NO: 11834 - DNA, 2300 bp, Homo sapien
cctgacctcaggtaatctgcccaccttggcctcccaaagtgctgggattacaggcgtgagccaccgtgcctgaccataatttaattttaaatataaacacaaggcattttatgcgtagttttaatacacactgaactttccagggatgcaactaccatgaaaatcatgggatgatcataccttgttttgtttgaaaatctgccaaaagctatttagtattctggaaaatcataccacatcagtaattctgttcatggtatttgaatcgccattataatgcctgtatcattctgcatttgtagctgttacattccaggtgattttatatacagatgcatatatctgagtaccacattgtgtcttcttgaatgttatacacaaacatttacatatctaaacatatagtatttaattataagtcatattctttctagtattccttttatctcccatccaagtactaaccaagcccaaccctgctcagcttccaagatcagaggagatcgggcgcgttcggggtggtatggccgtagactcctttatatctctttaagagattttactaattttttggccaggcatggtggcttatgcctgtaatccaagcactttgggaggccaaggtaggaggactatttgagccctggaggtagagagcctgggcaacatagcaaaaccctgtctctactttttgtctttaaattttggtttaaaattgtgcgtgggggtaagttacattctttacgaattatgtttcagaaaaataaaaagagctttaaaatatttgttataaaaaggaaatgttttagttcaggttgctataacaaattaccgtagaccgggtggcttaaacaacaaatattatttctcacagttctagagaatggaagtccaagatcagattgccagcatggtctgcctctgaagatgagggtcttccttgggattgcagatggctgttttcttgtatcctcatatcgtggaaaaagagctagctagctcttccgtctctccttatgaggccaccaatcccatttatgagtattctaaactccatgacctaatgacctcccagagatcccaccctaaataccatcgcattgggattagggtttcaatatataaattttggggagacacaaacataaagaccattgcagggagtgttgggactggtggcaatagaggtttctaaggaaggaaaggggtactggctcagttaatagaggacagaatgccctcaattctgagcggaagctcagctgttacctgagactcaagggtacctctctaaggaaagcaatgatattttccagaagacagctaatctgctttatataaaggcagaaagcatatttctcctgctactatgtttggtcctctctttatgaagctaggattattaacctaagggtcacttgtctctttcctaagcctggttccatcttcctggaaagggttcagcattaatcattcaggatggctccagatagattctgtgtgatccacggatctctcttctgatcaacaggaggggaggcacttgctctcagttcagcgaactttgattgactgatgtctacacttggttacaggcggttgctttccgctttccgtctccttttaaggagttcctcaaaggaactttaggatgaattgagtctgaccgtctttgatattaggaaggagaggtgtacagctaggcagcgagcatgctaaaatcttttccaggaaacggtgtttgaagagttaatgggagaaaaaaagacgaaaattagccagaggagacgaatttggtagagggggaagccctagggacaggagaaaataggaccagaaagggaaaaaaaatagaaacaataacaaactaaactcgggccccagaaaaggcggcaggggtcctgggcattcgcgtcgcagccctggcatgtcgtcttgcccggccctcggctcgctgcccttccagcagctgctgcgccccgcccgggcccgagagtctccgcccgcaccgtctcttctcagatccgcatccggctcctcccccggctgccacccttcccaccggcagaatccagagcgaagtttctgcttcctgctgcgggaatcggacgccccaggtcaggcacccagggtttccagccccagtctaaggtagggtccgagcgcaggcagaacttgccctggccctgggtctagggcgctgggctctgaggctgagagctgggtgggaagtgcctggcggggccggttaggaaccacccgagactcagctaggggtgcatccaccctgctcctcccgg

SEQ ID NO: 11835 - DNA, 2300 bp, Homo sapien
ggctctacccactccatctcaatttctgaggcactgaaccagtattttctttgttctatctgagtcatgggaatgtcaggaacaaagatggacttatctgaacctaaaatactgtagaccagaaaacccccaacagagtttgtaacattgcaaattttggcagcatgatcagaacattagatggcttatcattatcagactttatatctgattataaagattaggaatttctacttcaggaaaggaatgaatgggattgaaaaggattgaaatcttcaaaataatgaatatctgaaagctcttgcattattttgaagcttattttttctataaatcttagcaattgaaactaacagttgctgggtatggcaactcatgcctgtaattccagcactttgggaggtcgaggcgggtggatcatctgaggtcaggagtttgagcccagcctggccaacgtggcaaaaccccatctgtactaaaaataacaaaaattaatttgatgtggtggcaggtgcctgtaatcctagcaactccggaggctgggcaggagaatcacttgaacccaggaggcggaagttgcggtgaaccgagatcgcaccattgcattccagcctgggcaacaagagcaaaactccgtctcaaacaaacaaacaaacaaaaaacaaaaaaaaacaactaaaggacactacctgatttattattttggggcaagtacatgttttgtttttatattactgggaatgattatgtagactttgttattctaagagtttagaaatataaataactttaaaaaatactttgtaaattatagaaggtattttattttatcttatttatttatttatttatttgagatggagtttcgctcttattgtccaggttggagtgcaatgatgcaaccttggctcattgcaacctctgcctcccgggtccaaactattcttctctactcccgagtagctgggattacaggcacccgccaccatacctggctaattttttgtgtttttagtagagacgggatttcaccctgttggtcaggctggtcttgaactcctgacctcaggtgatccacctgcctcggcctccctaagtgctgggattacaggcgtgagccaccatgcccggccagaaggtattttaaatttataggtgaagctaaagttgtttgggttaccttatatgacctttttaaggttgggattggattcttttccaacagaacacttgattatcattagaaatagttcagcattgtccccagctcatgaaagggttgtgtcgagaagatgaggcacatgtttcccatgaaaatgatgcagaaacttcagcaggtagagggcaagtagttggttgaggcctgaaggatgacatacaaggtcagagacttgggttgtggaaagtataatggaggctacaagagttgatgaaaggagcagtgacggttttgtcttcctcttctcttttaatgtttgcttaggtgtaagaaacagggagggtgattaggtggagaggagtggatagcagaagcagaaaggcaggatttttccttcgcctttgttactgtctttttgacagcagattaagatctgtatcagaaagggaagaaatccctaacagcactgggaagggaaagggacttcttaaggttcgtaggaagccctcggtgttataagtctgcagaatatgtgtcagtaagggacagatattctctgtgctaaaagttggtcacatatgaagaacggccttaatacaaaaaagtggtggtgggtgcctgtaattccagctgcttgggaggctgaggcaggagaattgcttgaacctgggaggcagaggttgcagtgagctgagatcacgccattgcactccagcctaggcgacagaacaagactctgtctcagaaaaaaaaaaaaaagaaaagaaaaatggccttaagtgaattgccattgctgacttggctgggccattagtctgactccatatgagatttttgagttcttcagctctgcttcttggttctaaataccactgcccagctgcatacggtggttcacacctataatcccagcactttgagaggctgaggcaggtagattgcttgagaccaggagtttgagaccaggctgggcaacatagtgagacccccatctctacaaaaatataaaaataagccacacatggtagcccagctactcaggaagctgaggtgggaggatcctttgagcctaggaggtggaggctacagtgagctatgatcacaccactccactccagcctgggagacagagcgagaccct

SEQ ID NO: 11836 - DNA, 2300 bp, Homo sapien
ggaggctgaggcagaagaatctcttgaactcaggaggtggaggttgcagtgagccgagatcgtgccactgcactccagcctgggtgacagagctgagactgtctcaaaagaaaaaaaaaaaaaaaagatcacgaaagggtatgaggtagatactacttgcattgagacctgaaggctgagtagggtaagaagaagagcatttctgaaagttgaatagcctatatagaagccggaaagagtagatgtgaaaatgtggaagataggatgcttggggaaagtgaaaggactcttactacatcactaaaactcctgttgctttctttaacttcctacctacctttgctacagaaaatccctgtgatctctgacctatgttcattttctaggattccttccaggtgatacagccaggcatcaccgagctgttatcctagacctgctgcaggaggcactaacagagtctggattaacctcccaggatatcgactgcattgcatacaccaagggtatggctgggagagtggtcaacgatggaggaatatacctgcaacctggctaggtcaaaatagccaacaccttacctctgccaccatcactacccctaccccacctcacatcccttatgtcccccactattgtttttttccaatctctaggattataacttccatttctatctccctaggccctggcatgggtgccccactggtttctgtggctgttgtggcccgtactgtggcccaactgtggaataagccattggtgggtgtgaaccactgtataggccacattgagatgggccgcctcatcactggagccaccagcccaaccgtgttgtatgtgagtggaggaaatacgcaggtatttagagggctctacccactccatctcaatttctgaggcactgaaccagtattttctttgttctatctgagtcatgggaatgtcaggaacaaagatggacttatctgaacctaaaatactgtagaccagaaaacccccaacagagtttgtaacattgcaaattttggcagcatgatcagaacattagatggcttatcattatcagactttatatctgattataaagattaggaatttctacttcaggaaaggaatgaatgggattgaaaaggattgaaatcttcaaaataatgaatatctgaaagctcttgcattattttgaagcttattttttctataaatcttagcaattgaaactaacagttgctgggtatggcaactcatgcctgtaattccagcactttgggaggtcgaggcgggtggatcatctgaggtcaggagtttgagcccagcctggccaacgtggcaaaaccccatctgtactaaaaataacaaaaattaatttgatgtggtggcaggtgcctgtaatcctagcaactccggaggctgggcaggagaatcacttgaacccaggaggcggaagttgcggtgaaccgagatcgcaccattgcattccagcctgggcaacaagagcaaaactccgtctcaaacaaacaaacaaacaaaaaacaaaaaaaaacaactaaaggacactacctgatttattattttggggcaagtacatgttttgtttttatattactgggaatgattatgtagactttgttattctaagagtttagaaatataaataactttaaaaaatactttgtaaattatagaaggtattttattttatcttatttatttatttatttatttgagatggagtttcgctcttattgtccaggttggagtgcaatgatgcaaccttggctcattgcaacctctgcctcccgggtccaaactattcttctctactcccgagtagctgggattacaggcacccgccaccatacctggctaattttttgtgtttttagtagagacgggatttcaccctgttggtcaggctggtcttgaactcctgacctcaggtgatccacctgcctcggcctccctaagtgctgggattacaggcgtgagccaccatgcccggccagaaggtattttaaatttataggtgaagctaaagttgtttgggttaccttatatgacctttttaaggttgggattggattcttttccaacagaacacttgattatcattagaaatagttcagcattgtccccagctcatgaaagggttgtgtcgagaagatgaggcacatgtttcccatgaaaatgatgcagaaacttcagcaggtagagggcaagtagttggttgaggcctgaaggatgacatacaaggtcagagacttgggttgtggaaagtataatggaggctacaagagttg

SEQ ID NO: 11837 - DNA, 2300 bp, Homo sapien
accctacagaactctatgcatgatgatgtcatttatttaacataacaattacagcattataattttctgtggtttgctcagcttaatcatgaatatctcaaagcattgagtattttatttatctttgtattcccagtgcccaagtgcccagaggagtgaatgctaaacatacatatatatttctagtgagtatctgtcacaacatcacctgttcagggaggcttttcagatacatgcaagtcagctgccctctcctatgtatgcaagtgtttgaggggagagtagcaagatataatagcttatttaaaatatcaattaaaagttgtaatgtgttttgtactttttttttttttgagacagagtttcactcttgatgcccaggctggagtgcaatggcaccatctcggctcactgcaacctctgtctcccgggttcacgcaattctcctgcctcagcctcccaagtagctgggtttacaggcatgcgccaccacgcccagttaattttttgtattttttagtggaaacatggtttctccatgttggtcaggctggtctcgaaccccgacctcaggtgatctgcctgccttggcctcccaaagtgctgggattacaggcgtgagccaccacgcccagccgtgtttggtactttcatctaatcttcaagacctaatgatacaggtattattcccattttaaaaacaaagaccaggcccgagcggtggctcatgcctgtaatttccacactttgggaggctggggtgggcggatcatctgaggtcaggagttcgagaccagcttggcctggtggaaaccccgactctactaaaaatacaaaatttagctggatgtggtggcgcacacctatagtcctagctacttgggaggctggggtagaagaatcgcttgaacctggaaggcagagattgcagtgagccgagatcgtgccactgcattccagcctgggcgacagagcaagactctgtctcaaaaaaataaaataaaataaaaaataaagaccaaatgtccaaaacaaaaatatttaatatgaatatagcaaagccagccagttctgtctgacatgtaagccgggagtctttccactctcatctctctactcatcctagaatatttcaaaaaataatttttttttaaaaagggagtgtatattcagggcaactggaatctatactcctgctaagcgttttttaaacagaatatttcgagtccatctctattatactgtttatcatgctgtagtataaacatctatttatatgtctgactccacagcagtataacatctatttctgaatacttagcacataaaatgcgctcagtaaaaggtaaatgaactcatcagatccacgtccaagtgcctgtaactcttctagtcatcagccttgtgacgttaataatgtcacataatttcaatgagactcggatcgaaagctgcacctcactagtatttaggaagatggaaggctgattctgtgcggggaagtgcgcggaaaactcttaagtcccctactcaccaacctgtgccaggaggcgtgacgtaagtccgccgcgggttcgccagcaccttgccatcccgcaccacgcccacgccaatcttattggcgctgccttcaaaacccagcaccgccggcatggcggaggctgggagaaaacgccgacaggactcctggcaatgtcaggagctgtggaggtcctcactagtccgcgctgggccgcagctttccggagcgcagaggaagctggccagcctgcagatagcactgggaaagacaccgcggaactcccgcgagcggagacccgccaaggcccctccagggacctgtcttcctaactgccagggacgccgagccaactctgtgccttacattcgtatccgttttcctatctctttcccgtggtccagcccagccttctccactgtttttttccctcttgcacatagttagaatcttaagtcagtgtcacacaatgtgctgtgcatctggcacaacgataaacagcccgagggagggttggggacctaagtgtcctagagaattagaggagggaggcgaggctaagcgtctccgtcacgtggtgtcagacagaccaatcacgcgcattcttcggccacgacaagcgcgcctctgatcacgtgaccaggtccgctacccacgtgggggctcagcgtgcacccttctttgtgctcgggttaggaggagctaggctgccatcgggccggtgcagatacggggttgctcttttgctcataagaggggcttcgctggcagtctgaacggc

SEQ ID NO: 11838 - DNA, 2300 bp, Homo sapien
ttcaggaacttgcgaaaggcttcatcccagcgctgccggtactccagtcgtaccagacctcggcctgcattaggtacatatgctgttaccagcacaaacgagtcaaattcagccacaatcacccggccttcctgatcatgctcctcatcgcctatagaaatgaaacagaattagcataaaaaactataagaaaagggaaagcaatcaagaggtggggcagagatagagaattagcaattggttttgaagagttcaggcattaggcatcaatagggtctcacctatgccgtaagaaactttgagtgggcactggcgggaaagcaggcccacgccactgtacccttccttgtccgaaggagctgaccagtattgatgagagagtccaggcagctcctgaagttcagctggtagtttgttctctgaacatttggtctcttgaaggcacagtatatctggggcttcttcctttacccactgtaagtgaaaagaaaggtggaaaacgtattatcaattcagcagaacatttattgaataatctatatgctaagtcatagatacgcacgggttaaacagtctcttggcctaaggagttcgagtcaagcagcacaatattcaaacaattctaagctagataaatgaaaacaaatatagagaggtaagaaagtcttacatgctatgccaaggagatgtgttttttctataggcagtggatagcaagctaagatttttaagctatggttaatggaatggaggacatgcttcatatggaatgcaatgcaggaagataaaatggaggaagtatagtgaagaggtttttgcaacattctgggaagaggagagaacactaaaaaagaaaatggcaatggaagtgaaggaacagacatttaggaaatacaactggcaagactggggaagccccacagaaaactacgggcaggagaaaaataaaacagcctgaaggctaaacggagaaaaggggtgactaaaccctaagaccattcaatactaaaaaatgtctctttccctcaaattccactcacatctaatcctttcttcttaatccaggctcgaagcccatccacattccaagagcagatcttgagtgtggcaggtttgccactgggtgaggttttctgatctggggggtcctcatacagggctgggccctctcctgctgcctctttgtcatttttctttgcggccgtcttactcttcttggcctctggctctataaaatgagtaatatatactgacaaaaagctggtggtttccaactgcgatccggcgttaactatagacccaacgaaagcctacggttcctgcgacttcttcacaaacccctgcaaaaatgagtcggcccgtacttaccgtacatcaagggaatgacaaacacccccgccgcagcttctaggaagaagggctgatttcattcccttacctgtcctgagctcatccccgtcttccgccaccgctccctttttcccacgcttcggcattcccgttacgaacgcccttgggcagctgtaccgcgtcacccaccgaagcaatatttttaccgcgttgcctacagacgcaaagaaatcatgaaaccagctaaggctggggagaagactcctcccaagagcgtccccgcaccaggtcccgcctttcaaaccacgttatctctaaatcctttccccgcctccgtgcatcataggcccttcagcccctcacccacgaaactagatcatttcatagtgccttgtaccctactcgcgagatctgccctccagccaattgaggatcttaattaagggtcctgactcaagcttgccgttcagactgccagcgaagcccctcttatgagcaaaagagcaaccccgtatctgcaccggcccgatggcagcctagctcctcctaacccgagcacaaagaagggtgcacgctgagcccccacgtgggtagcggacctggtcacgtgatcagaggcgcgcttgtcgtggccgaagaatgcgcgtgattggtctgtctgacaccacgtgacggagacgcttagcctcgcctccctcctctaattctctaggacacttaggtccccaaccctccctcgggctgtttatcgttgtgccagatgcacagcacattgtgtgacactgacttaagattctaactatgtgcaagagggaaaaaaacagtggagaaggctgggctggaccacgggaaagagataggaaaacggatacgaatgtaaggcacagagttggctcggcgtccctggcagttaggaagacaggtccctggaggggccttggcgggtctcc

SEQ ID NO: 11839 - DNA, 2300 bp, Homo sapien
catgcacaatactcatttttctttatgttttagaagttttctctggctgctctagctagaagtgatctcttcttttcttgaacttgaattacattgtttaattcttttattatgaagcatgtgctgtatcatgaatttctagtattgatatttttccatgtaataaaatactagtgctgattttcttttttttttttttttttttgagacacgatcttgctctgttgcccaggtttagatcatggctcattgtaaccttgaactcctgggctcaagcaatcctccacctcagcctcccaaaacaccgggattacaggcatgagccaccactcctgacctgatatgttatactgtcaatgtttacactattctgtctccctacccagagtgtaagcttttttaaggagtgtctttcacaaagtgtagatatttaaaaaatatttttaggacagtttttggaatatatgtgtaactagggcgcaaataatggatcctactccaaccccagacaatgcttgagcatctgtgtgccacaaacagcagaaaaagcagcagactggcctccctctatggagctacaacctcttccctattttgtatctggagcttccttagttctttaagtgtctgttaggggctcttatctaactggtcgaaggttactagcttccaagtagaagttggcctgagaaaaccctgtctaaaaaaatcaggacctaggtgaagtctccagcccctgtagcagccaagtgctgggacatctgcagttcctttgttattacatatttggggctggctgtactttctttgatgcacttcctttcttagtggagagtctgctagccaaactgataatggacctcctcggggtttattgtttttatcaattccttgttgcttcccatatttaaagcagtcccagtttgggctatgacttgggaaaaaatccaggtgtggttcaggcgcccataaagaccacacgagacttcaggtaggggaggaggcactgcccctttgctggaagcaaagttgagacaggcctaaagactgtcccatctgtcaaataaggtgacgaaaataaccttgtatttgattaatccaatctacaaacttgtgcgtatgttaaaggttggtggtcataaaactgagtaaaggcacggtggcttgtccctgtagtcccagctactgggaaggcttaggcaggagatcaaactcaggagtttgagtccagcataggcaagaccccatctctattgaatttttttttttttttttttagtaaaacgatgaaatcttctagtagtggagacactaatgaaaagataatttaacaatttgatcagcaatggggaaagacggggctctgtaaggacagcttccaggaaaacccagtcttgtgtcctgtcctgaaagtgactctagcgacaaaggctggagtgataatcttaactttttaatccatttccttctggtacctcattactctgactttttaaaggtacttctttgagtagaacagctaactttgtctactgttccccaccgtccattttctccccgctcagaagatcccaagcttccgcactcctttattgcacccgcccagcctcctttaaaatgcataagccacgccccccatgttctggcgctaagttcgggccaatgcagttgcgccgctaggatcacaggacgaaagaagtaaagtcaccagccaataggaaaccagctacaacgcaaagccggagaaaagtgttttagtggtgtctttgaaccaatgaggagcagagcaacagggaccgtgcagcttccagaaacacgtgaccagttgagcagacgcagcctagccctacctcctggtctggaggtagcgcgatgggcgtcgctcccaatagcttgcagaacctctagtcacgtgcaggttttgcaagcccagcagcatctggcaggtcatgtgacagttgacgtttgtgcgtcgctccccaatggaaaaggagagctgccttcacaggaccaggaattggtttatctacgcgaataatagcatgacccgggcggggatagcctatcacgtgctgctagacggaacggggcggggcaggccactggttgcggagtgagctgggcgcgcggcgcgcaggcgccctggggacccggtagcggcggtggcggtggcggcggtggcggtggctgcggcgacggcagaggcgaagggagccggatcgccgacctgagcgggaggcggcggtggcggccatggcggcagatggagagcgttccccgctgctgtctgagcccatcga

SEQ ID NO: 11840 - DNA, 2300 bp, Homo sapien
acctaaacatgtaaaaggtattctgtataatccttgcaaaaatactaagattattgctattttacagatgaaaaaattgaagcataataagaattttacttgcctagaatcacacgagtaaataaggggtgaagatggcattcatacacaggtagttttattagagcccattcatttacactacatagattcaggaatgaggtggcatggagtgactggggccatggttcccaaactgtgccaaagtacaagctcacaagggtattgtggaatatttttaattttcagaggaaacacagcaatattttatatttcttaaacactgtgtgacctattaacttgaggtgattcacagttggaacattagattgtgctacattccttttgatgacaatatatctggccaggtgtggtagctcatgcctatactctcagcactttgagaggccgaggtgggcagatcagttgaagtcaggagttcaaggccagcttggccaatatggcaaaaccccgtctctactaaaaatacaaaaattagccaggcatggtggcaggcacctgtaatcccagctactcgggaggctgaggcaaaagaatggctcaaacccaggcagcagagattgcagtgaggcaagatcgtgctactgtactccagcctgggttacagagtgaaaccctgtctcaaaaatatatatatatataaagacaacatatctttacaaaagatggttttagaaggtccctctgataaaaattaagtattaagtaaaaaaaaaaagtactgtgtaaaaatcagcatggaacagaaaatgagggtggcagcattggattcctgcatgtgagaagttgagtagtgccaaacagatgtacatatcccgtaagtaactgtttgtggttatttaagaacgaaatttttttttcaatttgtgtgcattgttattttcaaagtgctagtaagttctcaggaaccagctactcactctgttgcccaggctggagtgcaatggtgtgatctcaggtcactgcaacctccacctcccgggttcaagccattctccctgcctcagcctcccaagtagctgggattacaggcgcctgccaccacgcccagctaattttttgtatttttagtacagatggggttttgccttgttggccaggctggtctccgacacctgacctcaggtgatccacccacctcggcctcccaaagtgctgggattaccggcgtgagccaccgcgcctggcctttatatataaatttttttttaattttttaaattaaaaattaaatgtaaatttaatgtaaaaatgtaaattaaatgtaaaaattaaattgtaaatgtgggcagaagtaatagttgtattctaccaaagacacgctatttatgttatattctggtacccgtgtattccgataacagaattttcttcgtgggaggagtcctctagttacctgaattgcttggatcaatattgcgcagatcaagggattatctgtgtccctacccaccaaatccatccttatcctttctgtcggcatctaggaccccggaattcttgcctgagaactttttcttctcccggtctgggcctggatgtgctctcctaaaccctgtatcctccaagttagcactgttgccgggggcgacccagcttcccttgtccagggagcaactcagacacagtctcgcttcatttttattctggggttgtacaatctaaggtatgaaatttttcctttttgaatctctcacggtttgctattgacacagctggaatgaggttgcaaggagagggctgggggctctcctccctacttctagccctatttccgcataggccttcttgctgggaactcctgccctgcggactggaatgggtaccgagatgaaatgctgggtgcgctccggctccccccgcccgccccggggcagaaggtttagggctgggaagaactctgattaggtttacagcccaggttcagccgattgaattagggtgtgtcaccatggagacagggccggcccgcgtgctcgcttgccattggctggggactccagggcaagggatataagccagagcctagaccagtgagccaactgtgcgaaccagacccggcagccttgctcagttcagcatagcggagcggatccgatcggatcggagcggatcggagcacaccggagcaggctcatcgagaaggcgtctgcgagaccatggagaacgggtgaggagggcaccaggcccgcaggacccttggggaggggcaggtgctgtgacccgggaacctggcacac

SEQ ID NO: 11841 - DNA, 2300 bp, Homo sapien
cgtgatccgcccacctcggcctcccaaagtgctggggttacaggcatgagccaccgcgcccagcccctaaacctggttttaaaatcaaaattacatgggcttcagaatctgttttttgtgggggttttgtgtgtgtgtgtgtgtgtgttttttatagggtctcactctgtcaccaggctggagtgccagaatctgtttttctaacaagcttctgctgagaatttgtgtagtcagtcctggtttaacctttgacaaccagtactgtggactgggtctgcttttttgtacagcagtttatctagttttttgtctggaattaacccccttgtgatccagggagctaagaatggcacgtagacctctaccaggggtggtcccattgtgttttattggttaaaacaaaaaagaaatgtagcccttaagtctttggctgaggaaggaactggaggaatgagggttcaaaaggaaatttgagtttatctctgccttcatagtagttggtcttaattacattttgaatgtctttggggaacaggtaaggtaataagggggattttactaggtgggcaccaccctcaggaagggcttaatcccattttgagtactcttcttgggctccctcctggccaagcccttttaccctccctaatttgattatttccttgcacttccccgtacactctggccccttcctctctaaacctttgtcataaggataagtatgcagcttgccagtgttcagtggatccaacactggagttgggcctgttagtagaaacaggctttattaacttttgccaggctctagaatggaggtagtttcatatcagacttgtagtgggcttgattcagaaagaagggtggctgagtagatggaagagcatagtatggcctttccctctgtgccagcttctccgtccctgctgcctcagtatacctgccagcctttttgcaccgaaggtcatttgtctgtgatgcccttggaatgggagcagaattcaccttgatattttttctcccccagatacacctatgaagattataagaacactgcagaatggcttctgtctcacactaagcaccgacctcaagttgcaataatctgtggttctggattaggaggtctgactgataaattaactcaggcccagatctttgactacggtgaaatccccaactttccccgaagtacaggtactggcaagggaaagtggggaatgggactgagggatgttcttggaattctgtggaacacaaccaaggaggccaatgtttctactccttgacctagcatttcactgaagacaaatgttgtaagagaggagaaaagcccaccatgagtcagagtgactttaggagatgcctctagcagacatcccataagagacaggacatgtgtgtgtcagtggactgaggctaagactcagaagagggccaggtgacaggggccaagtaaagggcaagggttgtttatttggtttacgtaatttctcaaataactaacttctgttggtttatttattaatttttaagatttctatcttcttttccctggagagttaagaatttttttttaagacctgtcagcaggaaaagacctttaatagctatttttttaaactctttaacacaagactggaagagcagagggagaaggtgagggaaatattaacagagggtgtgtgaagggcatacttctctaagggagatagtagtgacgctggctccactggccactcctacccccagtgagaagggcactgcattaaatgataagtgggttagtttttttaagcttatcaacatgtttattttttatactccacttgggtttcctttgtcaactttattactgtttttgttttgtttttttgcataagctcctctatctttgagaatttctcagctcttcctcttggttctagtccctctcccattccctaagggataggttggccgtctattagaagtgactgccagataaaagaaatggtaataatggctgttatgtctgtggggagttatctttgcactcccacgcacccctccgtgggcatgtgttcccataggactgttccgtgggtcataaggaaagagacacttgcatgcgttcaaattctttcccccttgttcagtagcctcttctttaagaagccagagtaagtatactatgagcttgcttgctggactgaggaggcaggtaattaagttagggcaatagataagaatacatgttttgagaactttgaaaaatttgaagaggtctataattactgcattcactgtactcactttatttt

SEQ ID NO: 11842 - DNA, 2300 bp, Homo sapien
gttctgagtaatgtgatgaaatctctcaccgtctcactccatcctgcctgggatgtgaaccatccctttgtccagcgtgtccatgttgtagacaccacccacccattagctacttagtggccaatatcagatgcaccgtcacagtatctcagcgcctgtgttcacataacccttattttacctagtaatagccgcaaagtgcaagaatgatgatgctggcaattcagacacgtcaaaaagaacccgtaaagtgctccgtttgagtgaaaaggtgaaagtgtctcaacttaataaggaaaggggggaaaaacatgctgcaattggtaaaatctacagtaagaaagaatcttttatctgcaaattttgaacagtatattgttataattattctattttattagttgttgttaatatatattactaatttataaattaaacttatgtagatatgtatgtataggaagagaacagtacatatagggccttagacattcactggggtcttggaacatattccctgtggataagggggactgccataatactcttatctactacagagatcatacttttatcaattgcctcaataatgttcttcatagcaattttttttttttctggcagggaatgtgtctctttgttaaggggatgagactggcctagcaagacaaagatgcatgctcagctctccttaggatcttctttttttgagacagaatctcactccgtcacacaggctgtagtgcagtggcaccatcttggccttctcacgggttcaagcaattctcgtgtctcagcttccccagtggctgggactactggtgcgtggcaccatgccggctaatttttgtatttttagtagagatggggtttcaccatgttggccaggctgatcttgaactcctacctcaggtgatccacctgccttggcctcccaaagtgctgggattataggcagaagccaccaagcctggcctccttagaatctttatgagtaggggaacccccagcaggtcaattgtttgattttctttggtttcattcttattccatttcttccctgagagtataaacctaatcagcaagactactcagatgttaagagatctttaatagtagaaggaatctggcttaacaagatgtagctttagcaggggcctgagatgtaaagttggacatcttccctccagcctcagcttaggagtaagaatggactgtggtactttttctattcctttttatcttttgtggggaaggtgggtaacaagaagagtaatagatatttgaataagcaaaagcaaatttgggttaaaaataaagagatggtcttctgtggtaaatctagtcctatattgacaataaggctttctacaagaatttccctaaaggagagtgtgacactgtacacgcttgtcttctcaatcattctctggttatttggcacaaatttctgtttaagaatcaattgatgtcaggggcatggtggctcacacttgtaatcccagcactttggccaaagtgggatgattaattgaccgcaggagtttgagaccagcctgggcaacatagcgagactcgtctcaaaaaaaaaaaaaaaaagagctgggcatggtagtgtgtgcctgtgatcccagctacttgggaggctgaagcagaaggatcacttgaccctgggagattgaggcttcagtgagctatgatggtgccactgtactccaatctgggtgacagagcaagatcctgtctcaaaaggaaaaaaaaaaaaaaaagaatcaattgatgtcaactttcctcactgatttcccatatgtaaattacctcagaactgcttcccttggtcatctccctactcttcaagagaagaaacatgaggaaacttccacattttattacacagcaacagggaatgtggtagggaggaacaagagaaatgggaatggaaagagaaatcgctgccttgaagagggtagagtaatgtgcagaagacacaggagaccccagatacaatgctgtagggcttagtgagattacagtctctactagagccaattttgatctcaaagtcacgttcttccatttcccgcttcctctccaggcaaaatgaagctgaatctggtgcagatctttttcatgttgctgatgctgctgctgggcctggggatgggcctggggttgggacttcatatggctacagcagtcttggaggagagtgatcaaccgctcaatgaattttggtccagtgactcacaggacaaagctgaggccactgaggagggagacggcacccaaaccacagaaac

SEQ ID NO: 11843 - DNA, 2300 bp, Homo sapien
gtcagccgaggcaacactgtgagaccatgactcttaaaaaaaaaaacagtaaaatgataataagtaaaacagtatattattggcatatcaaaacacaataaactgttcagaaacagaattattaaatatagaaactagcttttaaaattagggatgagagaatagattttttcccaaataattgatgatgagattatgtataaaccatgtgaaaaaagaccacactaacttcttactatctattaaaataaattccagatggtgaaagatttctaaaaatctataaaagtaacaaaatacagtatttaaaaaattcacatactttgagatgagaaaggattttgagaagaatgaaaccaaaagttgaattcataaatcaagaattaagaaggttgcagatttaaaaaacaaaagagtattctggacaggccctgtgcatgttctcgggaagtagaaagggcagggccacagctgcctgaattctgcttttcacacgtgtactgtccatgttctctccagatcaagatgttgcagaggctccgcgttcttgtgagagtatgttccgagctctctgacctgtcaccatgggatcactcttttgaagagacttcctggaggacactgatgacagtgtgaaagcagggatgggaggaaaagcagggaggggagggacagtgtggcacatggccgccccagagtgcccattctcacatcgccattttaggcaactttttcttttctttcccattctctgcactcctatgctcaactttcctgtctctactttctgatgtgttccccaacacccacctttctttaattccatcattctctaacctttctacacacatatatacaaacttagtatccagcctagaacaggaggctgtccatctccatcactgatagatcaaggtctccaggtaatgactgttagagaatcactcaggttgccaccaagtaggacttcttttacaacgagcctggtaaggtaagaaaactcaggaggttgcttctgcaattaaataattggttcttcatggagcatggaccaatttgtcaaagcactctaggggctcaaattccgttttagcactggccatttcagtagtcattgtgtttgacagcctagagagagagatacagtctagccttaagaagggaaaccagactgatagaggccatagaatagcagctaaggacagatgtgtggaatttagacaaaaataggcttgaaccaggagtctgccggatctaatgtgagattttaagcaacttcccttcacggagagatgttaataactttacacttctttttgcaactttcattgttataataacaacaatgctaaaaataatatatttattatagggttgtttggatgatggtgataatgtacttagagtgcttagtctagtgcttggcacttaactcctcattatgctagctatgactgtgtatcattgtttttactttagggtgacttcaagaatgtatttatcccagctgctcaaacttgaaccttccttgaccccttccccaagggcatctatggtcaaataagggcaagaggagaaagaaagacatggttaaggaatttttcttatcaaagtggaatgttcgaaaggggagggtggctcttttcagagcaagttctcaactcctggaaagggaaaagatgcatttatttcagacgaaaggagcatgtgagcctcctctctgcaccctccctttctccccactgctgtcttgatttcctttctccttccctctctccttaatctctctcttgctccatttcttccttgtttccttttcttcctccttacctttatttctctccctttctcattctccttcctttcaccttttcttctcttaccacagctctagactgactgtaggcctagtaaggtcatttttgtcaataatttagaagtattcagatcgattatgagttggtaatttaaaaatggtccaaaatcttagagcccagaacagcaacatgtggcataactgtgccccacacaggaaatggaagcaagcacattatcacaatagaacatatcccgttatctcttttagtgtctgcaggaaaaatgatgagaactctcatcaccacacacccactgcccctgcttctattgccgcagcagctgctgcagctggtgcagtttcaagaggtggatacagattttgatttcccagaagaagataaaaaagaagaatttgaagagtgtttggaaaaattttttagtacagggcccgccagaccacctaccaaagaaaaagtcaaaag

SEQ ID NO: 11844 - DNA, 2300 bp, Homo sapien
atttttagtagagatgaggtttctccatgttggtcaggctggtctcaaactcctgacctcaggtgatctgcccacctcagcctctcaaagtgctgggataacaggcgtgagccactgtacctggccttgatttcagtattttaaaacaatcaaaattaatgcaaaaatcttggatgctcgccgggcgcggtggctcacgcctgtaatcccaccactttgggaggccgaggcgggtggatcacgaggccaggagatcgagaccatcctggctaacacggtgaaaccctgtctctactaaaaatacaaaaaattagccgggcgtggtggcgggcgcctatagtcccagctactccggaggctgaggcaagagaatggcgtgaacccaggaggcggagttgcagtgagccgagatcgcgccactgcactccagccggggcggcagagtgagactccgtctcaaaaaaaaaaaaaaagaaatcttggatgctcaaaatatctatcacaaaattttgaagatccaatctgacaaggctaggatcagggtaagatgagttatgtgagaaacgtagtgcagggccagatcctggtatttaaaattttaacatttgttcatcagggattattttgcattaaatttattttctggccaggcgtggtggctcatgcctgtaatcccagcactttgggaggctgaggcaggtggaacacttgaggtcaggagtttgagatcagcctggccaacatggtgaaacctcctctccactaaaaatacaaaagttagttgggtgtggtggtgcacgcctgtaatcccagctgcttgggaagctgacacaggaggagcgcttgaacctgggaggtggaggttgcagtgagccgagatcatgccattgcactccagcctgggcaacagagcaagactctgtctcaaaaataaataaataaatattttctaaaattgttgcattaaaatattatttatcttgattattgagttttgtggcactctcttaaattttggtcttagagtgagtgtctcattaacctcagcctaatcctagctctgcttctagctgtagaagcaacagaggtcacctcttagggtcttttttaaagatagcatatacaactcaggcagcatctgttcctgttcagcagctccctttgtgtcttgaaataaagaaaggagcctgactggtctgaaaccatttcccttaaagactttagagagacacagataaggatttcccagggagggattgagactttcagagctcagtgacctcctctttgtgtctccagaaggaacagagaggactttgagccggactactaactcttttctctttttagttcttacaattggacttactgcttagtttccccacattcagctatgggcatagtatccttacagctagaaggagaaggacgagaaagagagatttctaattctggggatttcatgaagtcctcttcttctctattcattagtttccttgtctgtaaagtgaggatcttgaattagataatctttcaagttctttccaagtctattagtctataattctatttcttaagtagtacagaaaatggctatattatagccattgttggaggggagaatttgtattgtgaggtagtaagaaataaggggcaattggcaaataaaggccagattatgttgtcactaattctgagctatggcatttcaatcctgtatgtgagagctagagactcatacagtgacctagagcaggcatgggtgggtcacaggctttggagagcactctctgtcctgatcttttcagttgagagacttcagctgttcattgctcatttggacttagttcaaggtcatgtcaaagaagaaggtgcacttacgctagttgttagctctgtcttttgtaaccatcaagttccatgcgattgatcagatttaggagggggcgttgggggataatcgtaagtgaaggacagtttgcaaccttgtgagtaggcaacgcttactcatctcatggcttcttccatcttaggtggccgtttttcagctgagtttcattttctagttctctgtggtaattctgttgtcattgttgtctccatagaattttgggtgtcaccaggtaaacagagccctcagcatctgaatagaaactgaacaggaacaggtaggtggtccctagcacatgatttgttgggccttggtagcatcattttttgggcaaaactttgaagtggatgaaatgcatcctttaggttcctacatctattttctgaattctgattcctttttctatccc

SEQ ID NO: 11845 - DNA, 2300 bp, Homo sapien
tccttctccttctagctgtaaggatactatgcccatagctgaatgtggggaaactaagcagtaagtccaattgtaagaactaaaaagagaaaagagttagtagtccggctcaaagtcctctctgttccttctggagacacaaagaggaggtcactgagctctgaaagtctcaatccctccctgggaaatccttatctgtgtctctctaaagtctttaagggaaatggtttcagaccagtcaggctcctttctttatttcaagacacaaagggagctgctgaacaggaacagatgctgcctgagttgtatatgctatctttaaaaaagaccctaagaggtgacctctgttgcttctacagctagaagcagagctaggattaggctgaggttaatgagacactcactctaagaccaaaatttaagagagtgccacaaaactcaataatcaagataaataatattttaatgcaacaattttagaaaatatttatttatttatttttgagacagagtcttgctctgttgcccaggctggagtgcaatggcatgatctcggctcactgcaacctccacctcccaggttcaagcgctcctcctgtgtcagcttcccaagcagctgggattacaggcgtgcaccaccacacccaactaacttttgtatttttagtggagaggaggtttcaccatgttggccaggctgatctcaaactcctgacctcaagtgttccacctgcctcagcctcccaaagtgctgggattacaggcatgagccaccacgcctggccagaaaataaatttaatgcaaaataatccctgatgaacaaatgttaaaattttaaataccaggatctggccctgcactacgtttctcacataactcatcttaccctgatcctagccttgtcagattggatcttcaaaattttgtgatagatattttgagcatccaagatttctttttttttttttttgagacggagtctcactctgccgccccggctggagtgcagtggcgcgatctcggctcactgcaactccgcctcctgggttcacgccattctcttgcctcagcctccggagtagctgggactataggcgcccgccaccacgcccggctaattttttgtatttttagtagagacagggtttcaccgtgttagccaggatggtctcgatctcctggcctcgtgatccacccgcctcggcctcccaaagtggtgggattacaggcgtgagccaccgcgcccggcgagcatccaagatttttgcattaattttgattgttttaaaatactgaaatcaaggccaggtacagtggctcacgcctgttatcccagcactttgagaggctgaggtgggcagatcacctgaggtcaggagtttgagaccagcctgaccaacatggagaaacctcatctctactaaaaatacaaaaatcagccgggcgcggtggcacatgcctgtaatcccagctacttgggaggctgaggaaggagaatcacttgaacccgggaagcagaggttgcagtgagccgagatcgtgccattgcaccccagcctggataacaagagcaaaactccgtctcaaaaaaagaaaaaggaaacactgaaatcaaatatattcatctaggttactaggtttttggtcttctggtgccctcttaagttttgcacctcaagtgagtggctcattccctttatcttaatctcagtcctgtttctcatcaaaggacctagagataagggacaaaaaatggaaacacatgtagaatttatggtttaattcagtaaagattattttattgaagcagaataaaacaatcccaacccagcaatacaggaaggataaattaattaccagtggcttccccttccgctcaaggcattgccccatgtccacggtccaggtctgcctcaggcacagccagctccaatgccattgagagaagagatctcagactcgggagctgatcttgagttatttaacatagccaaggaaactatctggcctcaagtcatcacaagtgacaagaacaaacccctctgtgggggaatagtggtacctgcaggcagggtatcttgtgccttcaatgagctgacagactgtcattttgaactttgtctcactctgaaagcagaaaatggccgaaaggttttggcaagcaaccttcttgggagaaatgcaaataccattgatttttcgaggcctctcatggatgaagacatgctcctttttacaagtgtggtcaggttccctgataactctttgtatgatcatgtggttgcagtaccttgcagga

SEQ ID NO: 11846 - DNA, 2300 bp, Homo sapien
gctaatctacatataaatctaaaaccacaaatgtggttttaggcattacaaatattttcttccaggctgccacactagttaacatttggactcagtctcaactccttttgcagtgtgataccctagggataggtttagttgcctcctttggggaaaatctttgtaacggggattacttctctgcctgtacacttagtaaattatctgtacttcagctacttggaagttctggcaggaaataatgaacatgttacagtacatagatataattctctgtatacattggaaatgtttctgcaagatgtacaaaatcaaattttgttaattgaaaatcatgtcaaaaattaagcatgcacttatatctttgtggcattgggtaacacatatccaaaacaggatagtctgaattctgaaagggcacccagaatggacatttctggaagtaaatatattctcctggttgctcattttcacaatttgaaattttgctttcgtttttgtatagaaagaaaagcattctttgaaggcttctccaggattctgtttttcctagataattttttacgctgcgattattttcttcctgccaattagaaagacacagatatgcacagaggagattttgtacctgtcgctccaaaagagaaatgacttcagggcatgaagtagtaaaactaagtccatttgcccgttcctatatcaactaactgggagatgatagcaacaaaaataattctctggtctcaatactttgaaccactgtgttttagctaagcctttatccactaatctcccatgtgggtttcccatgtataccatggttcagtggttccccttataacttttgctatatattagaatcacgtggggatcctttaagaatccccaacccagatcgcacacaatatcagttaaagcagaatgtatcaaggtggaagccaatacttttttaaatctcccgttgattccaacgttcagcagtttgggaactgtctccatactcctcagaagcccagggctttatcaagattaacgttattacaagggaattgtttttgtcctgtgctggacgccgggtggaaatgaaactcgctaaaactggaattcgagtgtttggcactgaaaggatgggactcttgctttccttctcacttcccatctccaccttaaccttttctacaactcatttatttgtcaatgaaatgaaaaatttcatgtatttgtcataaggactgattgaaaatttagaaaggagacagtactgtggctggcacacattggccttcactaaatgttctgaaaagtcctcacttgtttaatgaggacacattcaggacctgccttacccgactgtcctgctggaggtaacttctcttcctccccagcggtgcccaagcacaccctgtgcgggtccctcctttctgctctttctactttggccctccccacattcaacaacaggctctctatcagttattgtcagggaacagcaagacacaagcgattttgtcaaattcatgatcaaaaggctatgttacctgtgacagtgaccagaaaaatgacaggtgagaggagctagcacagagccaagcaggattgacagagggagggacttggaaggaattgggaagaatagatgagtagaaggtactaaaatcatgtgcaattgggtggatttaaggttgagaaaattacgggaaagaaggttattcagcaatatgaataaccttgaccactttctatatgtctagctctgtgttgagcacttcgaaggatttgagaaataggagatgtggtatctgctgtcaaagaacttgtagaacaaaacaaacacaacaggaataatttagagaacagctcagtaccaaactctgagagctggcatgttcagaaaaggctttcttggggaactatgcctccagctggatcttgcaaggtcagtgtgattttaattagtggagagaaggaaataaaatattccaaggatgggggagcagccaggggttggagcaggaggaatctgactgtcctttgctactttctatcttcccttactcaacagcagtcaaagccaaagatgcgaagtcactcttacctctgatgataataatggtgataattttcttggtgcttctgttctgggaaaatgaggtgaatgatgaagcagtgatgtcaactttagaacacttgcatgtggactaccctcagaatgacgttcccgttcctgcaaggtactgcaaccacatgatcatacaaagagttatcagggaacctgaccacacttgtaaaaaggagcatgt

SEQ ID NO: 11847 - DNA, 2300 bp, Homo sapien
atacagcattacatttactcaatatttattgagcaaacagttgttgaacatttattgtattccaggcactgtgcttagaacagagatttctacaggaaagcagacagatgttgtctctgccctcaagaaacagtcagacaattttttaaagctaagaaatataataaatttattatgttagtgataaggaccgcaagggaaattacagggttttatgcaagcaaaacagactacttcacttgttctgggttttctgggaaggcttgtctaaggaaaggaaggatgcataggttcaccaggcagaatggggaaggtgagtggagtaaggaacactccacagtgagagaaccagactatgtggctgcagcatgagctgtggtacccggtggcagaggcgctgcttggatgcgccccagtggaaacatgggaggcagtggacaggtctcccacaagtgtgaagaaggcactgaagcaactggaagctcacaccaccaagaaggggtgcaccttcgccagcagagttggatgggcatttctgactgcactacgtgaagtatacgctcagtccctgcgggacatggcacagctaaaggaccttcaggcctaagttgggtctctgggggcccaaatgcacagcttggagcaaaacctgggtgtaaaggacctccaggtgcaagcagggtgcttacaggctcagataaacagcctggagcaggagctggaaataactgttggcatgaccttgagcccatcctccaggccggacactcgcgcttggtctgatcctgaggaggaggctcctctgctgtgggcttgtcctgtgatccatcagaaggtagaacatgagcagctgatgggaccctaggggagagcccagaggccccccgcagtggtggaatacacctcctatagtgcttctctttccactgagttttgggagttaggtaagcaatgcaaggagcacccaggggagccccccctgcctggctaccccattttggggatgagggggctgacagcgtttcttgctctgcctccgagatggagaagctggcttctatcataactcacccctcccttcatcagtggctgcagctgtgccgatggttggcacaagggcaaggtgatcacatgttaattgagtggctgatggcagccatatggactgttaggaaggatgctggagagataccagaaattatgagtcaatggcaatcatagctgatttggtacaggtactcctggagatgggcatgcggcaggctatgttggatctgaatccctagaggccagatgatgaacattttatctcccacgtgagggatcttgtgctgactggcagcctctgagtgcttttggctctctagctgctgttcttactccatatgtggggtgccacatacatgaagtgactactgctatggcagcccttgaggaggcagaaggccatcagcgggattggggaatccgcgccataaagaaggggaaggtgcccccttcacaggtaaccaccccacgaaataaaaagggaccccagcgggtgacccgcatgcagatgtggatggatttacttgcagccggggttgctcgggaggaaactgagaggaaacccaatggaatgctgttggctctgtggaggcaattgtacccccagcagcaattccggaaaatacccgagggggcaaaatactgttgctcaacccagccccgcggggacacggcagctcaaggatgatttgcagactggtgaagagactgggcccttcctgtttgattagggaactggccgaggtgcttggcttggtggggggcgccggacgactggaggcctcatgtggaactgggaatccactagtcccccaccagtgtacagcaggtcctagcactggtatatactggtgcagactgcagtcttgtttatgggaacccggataagtttccaggaaaagctgcattcattgatggttatgcgggccagtcagtgaaagtgaaacctgtgtctctgcatcttggaattggccgcttggcttccagcctgtacgctatgtatgtttctcctatacctgaatatattctgggggtggacattttgcatggtctggacttacacaccacggccagagaattcagactccaggttcgtgtagtaaagccggtactgcgtgggcatatacatatcaccagccccaagttctgccacaaccccgacaggttacctccattcatcaataccgtttgtcagaggggcatacagagataaccaagacgattaagaagttagaggaggtgcaaatagtgcc

SEQ ID NO: 11848 - DNA, 2300 bp, Homo sapien
ggagtagagatcaaggttccacttctgaaacgggaagagccagcaatggccgctccggccaggcgtccagaagagagatgcacgttgtgaggcaaggtttcatgtgccagtggggttttgggaaattaagggcccgactttaggggcgagacttgggtcactaaatttgattttaacgcagagaaatgtggccttccttttgaatgagctgcaaatattatctccaaaagcgaattcacacagaaacattgggtttgcccagatgtcctctatttcaggggttcccaacccttgggccgcgcacctgtccatggcctgttagggacccggctgtacagcaggaggtgaactccgggctagctaccagtaccgcctgagctccgcctcctgtgagatcagtggtggcattagaatctcacaggagcgcgaaccctattgggaactgcgcatgccagggatctaaactgcactccttatgagaatctaagtgatgcctgatgatctgaggtggaacagtttcatcccgaaaccatcccccaactcttccccccgcccccgcggtccgtggaaaaactgtcttccacgaaaccggtccctagtgccaaaaatgttggggaccactgctccattccacaccctctccctcccgtgtctgtggacgtgtaagcggaagagccgagattgggagggaagcgcaggaagtgaggacatcagggagcccgggcctaagcctggaggcccgccctctccggcgttcacagttgcgcagtcagaattgtgtgcgtcccaccgcctcagcccccagttctccgacgcccaggtgccggtccccaccctacacacaaacacacgcatccacgctcgcgaggcccctgggtccgcgcccagtgaggccaacagccctcgggcgcccagaggatgagcagcctcggtatgcccgagtttcaggggcgcctgctctgcttgggagcccctcagtgaggcaggggaatccagatttagaaaggttgtcctcagaacctcggacgcaggactgtcttacaagctggctttgtgactctgcagtaattactttccgggtataaagagatttctttctttcccgtctctggttaaggatgtctcgagtagggatttttaggagagttgtttccgtgcttccttcgatagctcagctggtagagcggaggactgtagtacttaatgtgtggtcatccttaggtcgctggttcgattccggctcgaaggagacgctgctgttttggggtttacggttgctcttcgtttgtgcaaaaaatctctgtatcttgacgtgatcaaatctgtttctgtctctcacccttgtccgaaggaaacagcttagccgcgaggtgggctgcgttaatcgcgtcttgaaaagttggttacctttctgaaagatagtagacccgaatcgtcccaccgttgggggaaggcactgttgtcttaccgaagtgtgttatattttggcttctacgttaagtccaaaggccggcagatatatacgtatcgcgcgtctgtcctggggctcagtaccctacagccttgcaaccgagctcagctctggccctcgatctctatttcagccccctccaggttccctccaggccctagcgggcttaaatcgctccccgggctcagtgagacacaagcatgtgacctaaagtctaaaaagctgccttccttcaccccatcctgcatctggatcgaggagaataagccagagaataagccacacttgaaacttggtgaagatggaaggaataactaaataaggcctaagggaaatgtcacaacagaggaaaagaaacaaaacaaaaaaccttcagaacagcaggcggaaaagagaaattcagagtgataggaagcaccactcagctacagtggctcgttggtctaggggtatgattctcgctttgggtgcgagaggtcccgggttcaaatcccggacgagccctcgtggctactgtttttccacccccttttgtcaactactgaaaaaaagtctccgttaaatttgaaacacaaactgtctcgcgatgggctgtcctgccaaagaaagcagcagcgaataagtacgtggcagatggtgctgtcgaccagtgtcaagaccaagtttcatgggttcctggacgctcagccaggggtagtctctgaagggccgcctggcaattgggagcagaagccagtttcccgccatctgctctccgtggaggcagtgctctcgcggctgctgcccgttggggtccagctgaggaaggagcgcggatcccaggctcgtt

SEQ ID NO: 11849 - DNA, 2300 bp, Homo sapien
tgtccccactgtccttcaatcagtagtgttgcctcttcctggagacgtggttcttcttgccacgtgtgcttttccttctttacctgttacttccgttattgaataagttcatgcttatagacctaaagtgttagaataataaagaaatatagaaattatttagtccattcttcccatcatctaattttataattagtcctaagacagaatgatacatatatactctgtatgaaggaggaaagtgctctaacactagggtccttggaaacaggacccgtgcatcccgtgtctgtgtgcagggacattattggcttgagggagagagagaaaaaaatctccaggaaaggggaatgactttcaagttaaagctgtctgaacatttaaaaaatatatgaggttttttgcaattggcgattccttcatttgtattaaaattactgacaaagatgtgatgttccttaatcatagaatataattccttgttgtattttaaacacaaatgactaagtgcttagatgcattctaatgaaatagtaatttttcccccaaaccctacttttcatttcaacaaaacttccttgtgccaagtttaaaagaaaaacataaaactgtctttttgcattgtgggcagattgtgtatcctccaaaggttgtccagtgaaggcccagaggcagagaagggacctaactatattcagaggctgctggttgccccacctcagcactactgcagaactctaaaatcagaggctgctctgtttgtgtgagtcggtgcttgaattggtgcttcaggccatggggctgtgtgtgtgcaggcgcatatgggttgtatgctgtggcagggtaccgcttttcgggactcagaggtggtgttgcttgagctaagcctggaaagacaggtcagttttctccttgcttatgaagggttcaaagtctgactccaccattcatctgctgtttgttcttggagtttcctcatgagcagagcatatttacataatgcctacctcacacagtcctggtgttggttgaatgtagtcatgtatgtgagagcttcacaaaatgaaagattgcactgaatattataattattgtgatttcaagtgcatttgttttactagcaggcagcctgtcttttcttgacaccttctcaagtgcagccagactgaatacttggcagctaggtgggtgacaacagaggattgaggatttttaaaaagataacactgtcctagatccaacaccactgtgggcaaatgctgggggtctgtgaaacagttggtaccctgctgctgtctgatattggaaactatgagatctataaggtgatcctggtgacctttggcccactgtttttacgcaagcaatggatctacagccctgctttgatgatggagataagcaattttgcaactacattacaaggatcagaagattgaatgttcagggttagtctcttgtggacaggtaaagatggaagaaggagaaacccaggaaacatggcaagcctgcttctgggggttagaagctgagaagttgagtgtagggggaggggcagtgtactaatagctgtcacacaaccttctctggaagtgctttcctggctgtatgaaatcgatggaataacgtgcttagcatccgttcatgaaaccaaatgatgtgatacgataaataggatgtgatatgataaatgataaatagtacagtggaaaagcatcctactggaagaccatatcttactctgtgacatcttccaaggcagttcttggagttggcccagggagatcagagatgctatcttatggatccagactattatgtgtgaatagggaaacctcagtcctgccatgaacaagagtaagcaccacagacagcagaaaagggcaacttttggacagaaggccatgtttctcaaactttgtcttccagaacaaatctctaatccattcaggtgggttaatatctaacccaatcatgcccagcgaaaaggtgaatgaccctcctcgtttgttcaagagcagtgtccttggttttcatgtccctgccaggactgggacactatatattaggaacactatataatcagaacctggagaggcctccaggttcacacaactggaacccatctccaggaacaaacagctggaacccatctcccgttgaagggaaactgccagatttttgtaagattcttcctcctgggtaaactattgttcaatttgttttatatattatttctagccatccatccattttaatgaaaccattttcctccctttaaagcctccaggctcaagctc

SEQ ID NO: 11850 - DNA, 2300 bp, Homo sapien
ttagtttagatggcctcctaattgggtttatatccaaaaagctttaggactttgggcttagctcataggagagttcatggatgtatgcttggagtccatgattttttttccatattaaaagtggaatatcaagtatttgagaaacactggctcatacattggctcaggtggcttctctctcccacctctctacattcattgagtcactacttgaatttgtcttcaatagacaatgcacatttgttggaaagagctctggatgtgtgggcacatgacaaaaaactgattttccctcagaatcgcctctcaaatcatccaaattcagaggcccagaattgttcctgttttgctctcccctgtcccccaaagacctagagagtagaaggatgcacagaacctgctctaagactatctcccgtccatccagtctatcagcacatgattttctattactcaaggactgcttcacaggagtgggggtttgaagataagttctggatataaactgaaccttctgtcattccaacaataaggtggcccagtgagaaaatcaactaaggtggtttggctaggagcagcctttggaagtgttgttagaaaagatttgcaagagtcttactttattcataaatcgtaactttgactagtgttgatgaaccagtattggtcacatttgccaatttgtggggagttggcatggaaaatatggtggaaaattccggctgtgatgttaaaggtaaccattgaacacttgcacaaactcagttgaagaagttgtggtcttgtcagtttgagctgagttcaggactgaatcttgaggtcctgaaaaacaacttagccagcaccttgtgacctatacttcacagtcagatgttacgtatagtagcattgtagaaactatggccaggctatgtgacattttaatagtaagcagtacagtgtcaccaaacagctaaaggttataattaaaaaactgagtagagaaatttcagatactggctacctaatcattcatagctatttggccactgtgttcactagatattctttcacctctcaatgaaggtctcacaattcacaacattaaaagtgattttctggcctgaccaagtggctcatgcctgtaatcccagcacttttagaggctgatgtgttgaggcttagctaggctcaggagttcaagaccaacctggccaacatggtgaaaccctgtctctacaaaaattaatacaaaaaactagccaggcatggtgttgcatgcctatagtcccagctactcaagaggctgaggtgggaggattgcttgagcctggcaggttgagactgcagggagcagtgtttgtgcgactgcactccagcctgggcgacagagcaagaccctgtcaaaaaaaaaaaaaaggcaaaagaccaggcacagcgagtcacacctgtaatcccagcactttgggaggctgaggcaggcagatcatgaggtcaggagatcgagaccatcctggctaacacggtgaaaccccgtctctactaaaaatacaaaaaattagctgggcgtggtgacaggcgcctatagtcccagctactcaggaggttgaggcaagagaatggggtgaacccgggaggcggagcttgcagtgagccgagatctcgccactgcactccagcctgggcaacagagcgagactccatctcaaaaaaaaaaaaaaggtggctttcctcagtgaagttcccatgtaacatagcataaccctccagggacttccccagaagtttgttagaattgagagcagagctaagtctctggttgtctcctgatagcaccagataacccttttctggggtcacctagggtcttgcaatcattttgtacccagggctcagcctttgatgtttgtagcctttgctcgaggctactgtttgagtgagcccaagtgttccagatgaaacgatacagggacaagttcacataataaggctgttccccatcaccacctcggctaccaatcagctggagccctgcagctccccctactattcctttctccactgctgtagatttccagggctctgagaaaaggaggaggacgcagactctgctcttcagatccacatgctgatccccactacaatcagtgacctgaactcagagtccaagtagggtaagaagggctctgctgaggttgctcgggggacagccaggaacactggaaggaggctgattgaacttttagatagcaaacaatggagaaggatccaaatcatggaaaacaaaggtctgaattctggttagcctcagtcccactgat

SEQ ID NO: 11851 - DNA, 2300 bp, Homo sapien
accagggtgtgggggtgcccacctgtagtcccagctgcttgggaggctgaggcaggagattcacttgagcctgggaaatggaggttgcagtgagccaagattgctccactgcactccagcctgggtgacagagggagattctgtctccaaagtaaataaataaatagaaaaagaaaatacattcaagtatcttacattatccataagtgaaacctttggttactgttactgaaacaatattcgttgcatataccaatttagggggagttggtatgaaacgtgctggaaattccagatgtgatatggaaaggtcacccatgggatgctcacacaaactcagtttaagggctggtggtcttgaccagagtgagctgagtttagggctgagtcttgagttcctgaaaaacaattaggtcaacaccttgtgatgcatacttcagagtcagatgtgatatataggaacattgtggaaactatggctaggctacctgacattttactaaggcagtaaggactacagcgtcagcaaaggttattgttaatgaggactaaactctgattttttttatcttgcccaaattcctatctaaggggtctggggagtcatgccctacaaatcatcaattctcatcagatgagttttatttaaccctgtatatcatgttttactttccaacctgactctggcataacattaccagacaaacaagaaaaagtattttgccccaaaacatgtttctttgccacattttgaaattgccctgcaaagctgttctttgtgggggaaaatttgcatctgtaaagaatctctattaacatagctaaatatttttcttccagaccttccaatcctaaagatattaattaagatctgaaagggaaacatttgtcatctattgtctctaagggcagccactataagacttcgaaagaattggtctctaccatctttattttaacctgaatattccctttctatcaatctcaggtctttagacaaaactagttgtcaaccagaaaatgtttaaatacacctatggcctggaggccctccactccccatcagctttgagttgtcccgccttgctggaccaaaccaatgtatttcttaaatgtatttgattgatgtttcatgcctctctaaaatgtataaaaccagctgtgctccaaccaccttgggcacatgtcctcaggacctcctgagagctgtgtcataggccatggtcactcatatttggctcagaataaatctcttcaaatattttacagagtttgactcttttttttttcttttcttttgttttgaaatggtgttttgctcctgttgcccaggctggagtgcaatggcgtgatctcggctcactgcaacctctgcctcccaggttcaagcgattcacctgcctcggcctcccaagtagctgggattacaggtgcccaccaccacgcccagctaatttttgtatttttagtagagatggggtttcaccacctcggccaggtaggtcttgaactcctgacctcaggtgatcctcccgccttggcctcccaaagtgctgggattacaggcgtgagccaccacacccagctgactcgtttcatcgacaataacaaactgcctagtaaaacttcagatactggctacctaatcataactatctggccaccagtttcactagatactctttcacctctcaacgaaagtcccacagttcacaatgttataagtggctttcttcagagaagtttctgtgtaacatagcataaccctccagggacttcccagaactttgtcagaaattgagtgcagaagccaggtctctcgttgtctactgatagcaccagataacccctttctggggtcacctcactctagggtcttgcacttcttctgtgccctggagtcagcctttgatgtttgtagcctttgcttgaggccactgtctgaataaactcaagtgttccagatgagaagatacaggaacaagttcacataataaggctattccccatcaccacctccactaccaatcagctggagccttgcagctccccctgctattcctttctccactgctgcagatttccagggccctgaggaaaggaggactcagactctgctcttcagatccacacactgatcccaactacaaccagtgacctgaacttggagtctgagtagggtaagaagggctctgctgaggatgtttgggggacagccaggagcactgaaaggaggctgattgaacttttagatagcaaacaatggagaaggatccaaatcatggaaaacaaaggtgtga

SEQ ID NO: 11852 - DNA, 2300 bp, Homo sapien
ggtgagctaagatcatgccattgcactccagcctgggcaacaaaagcgaaactccatctcaaaaaaaaattgtgaaagatataaagtacaggtctatgaaaatgtatgaagtctaacctatgaaaagatttattttttgcatgtgtacattcagttctactaccatttgttgaaaagactaacttttctcaattgaaaattgatcctttgtcacagattagttcactgtatttgtgtgggtctacctctgggctttctacttggttccattgacctatttgtctatttttcaccaataacacactgtcttaattgctgtagctttatagtaagttttgaagttgggtcacgtcagttttctgactttgttcttctttttctgcattgtgttgactattctgaatcttttttttttttgagacagagtctcgctctgtcacccaggctggagtgcagtggtgcgatctcggctcactgcaagctccacctcccgggttcaagcgattctcgtgcctcagcctcccaagtagctggtactataggcgcccgccaccaggcctggctaattttttgtatttttagtagaaacggggtttcactgtgttagccaggatggtcttgatctcttgacctcgtgatcagcctgcctcggcctcccaaagtgctgggattacaggcgtgagccaccgtgtccaacctgaatcttttacttttatataaacttcagagtcagtttgtcactatccacaaaataatgtgctgggatattgattgagattgtgctgaatctatagatcaagttgagaggaaatgacatcttaacatattgagtattcctactcatgtacatggaatatctgtgcttcctcaatttctttcattagagttttaaatttttcctcataccaatttttacataatgtattagatttacacctaagtatttcactttctttggtgcaatataaatggtattgtgttttaaatatcaaattgcaattgttcattgctggtatataagaaagcaactgacttttgtatattaaccttgtatcctgcaaccttgctataaacagacattatgtttattctgcagacatttggagccataaaagcatggggcaagagtgttgtactattatatcttgttcaaaaaaagactaatctggaagtaatatgtagaatggattggaaggagaaaaaaacaaggcaaggagtccatgtgggaggcttttatgtgagccctccataagacaatgagtttctgaataagggtgttgcagtaccagtgaaaaggtaagaacagattcaagaggcaaatatcctaaattcggccttcttcttcaggcttacaggtcttttcatacacaattctgtctttgggaggcgcttaacactctcttcacctaacttctaattattcctcaaaattcagttcaggtgttgtgccctccaacaatccttcccctctactatcttcccgtagcctcctgcagtgtcctccatcacactgtaagtgctatttatattaatataatctacttgtctatatacttacctgcctgtctctaatctctttcattaaatcatgagctcctggcagatcacgaggtcaggagatagagaccatcctggctaacacagtgaaaccccgtctctactaaaaatacaaaaaaattagctgggcgtgatggcaggcacctgtagtcccagctactcgggaggctgaggcaggagaatggcatgaacccaggaggtggagcttgcagtgagcaaagatcgcaccactgcactccagcctgggcgacagagcaagactccgtctcaaaaaaaaaaaaaaaaaaaactcatgagctcctgaatttgtgtagcctagtacctggcccaataagtatatgcataaatgaataatgtattcacttctgttgtaggaacttacaacattaccaagtatgtggcaggcattatatcatatttatgtgacatattttctcttaagaaacaggaatcataaagcttcaaaaaaaaacactgaagcctcagatgaggcaggaagcactcattccatatcaggaagtgatcagttcctcaaaactgtgagttttcagtcatgttgtttctttaagttggtttagccttcctgtatacatgtgataatgatactgttttaaagaacaggtgtgaaagtctaagagtttaatccagactctgcacaagaagttaatctgccaaaccctaggattctccttctgaaagctcagaatatttcttccccttccctatacacacagggctcgaag

SEQ ID NO: 11853 - DNA, 2300 bp, Homo sapien
aataaatcatattaggtccgggttctcaataggagttgctaataaatctgactgacatgcagaatgtttcctactgaggtaagacaatcaagaggctccccttctggtagggacagagggtggcagaattcagtgtgttgcagagatgagtagtaatttatgagagggagagagggatagaatcttataagaggttaatcggctgcctgaagtgtgcagtgagttctcagtcaggtgtaatgcctgtgctgcgtgagaaaccaggaggtcaagcagggagtctagaacaagttcagcagaagcaacaacaaatgttgccatggcatctactgccctaagacaagcggggctatgcctctgcaactgggtcaaggataaggctgcagtaagggcttctgatggttccccattgaagtgcaattaaagctccaagggcttgtctagattgctatgcataaatagacaaaatggcttcctgtagtttcaggattcctagggccaggggctgttgaagagccttattatagttacagaagatctgttcacatctgaactgtggttctgaaatcatcttgctgggtggaggccacttttgtgcagccacgcccagtgccttagtggggtccacctgactaaccaaaccatcccaccaggcgcccttcaggtgagtcctgtgccttatttatgtctgtatcccacagtctaatgaatgaatgaacacattctaacttgactattcaagagaataaaagtattattaaagactcagaaaaataaaatacaggtgggggctgggggagtaaggaaactgtaggggccaaggaaaaattcccctttcaccctccaaaggtttgctgaaaatcaactgacaaaagacagattgataggaaaaaacgcatacaaattgatttgatcgtagttttacacgacacgggagccttcagaagacccaaagataacaggggaaagtgggcattcttacacttggatatcaacaaagtatgaacagctgtgtagaaatatgactggacaacagggcgatctaatgaaaatagactgagtggggaaacccagcaaggcctccctgtctagattcttcttggcctctctgagcattcgtcctttttttctgggtatggggggcaggaccctctctggaatgaggatcttacgacctacaatcacacaaggtaggtcagataatttcactatggccactttttacacagaaaggctgaaacaatctgaatacacagcacgaagggatattttgataattcttagaggtatccaaattgttactcagcaaaaaaacaggtctctttctaggagggcattctgctgctaataaatatgatattctttgtattttttccccaaaaagaatttgagatttgggatttaagtttatctttagttcctctactcaattccgacctacagggtcagtggttactgtagataagaacagccccatcctctcgatgcccccagagcaggggtggagggtgggtgggaagtggccagaactgggtgagcgcaccctagaggcctcctcctcctccctattcagttactccccctttcttctccagatctgggaagccttccagctgggggcagcaggacagcctccattccccccgaccccgcctcccatccccgggagaggtagcgttgggagaatgccctcctagaaagagacttgggttttgctccctaggagccctggaatagctttggccagaattccctatctcccattagaacctctcctttgcgtcctttgttaacctccaagtctacttggtgaaaacgcccacgaagaagtaacaaggactttgttcctagtgtgccaggtttgggcaccagtgctgtagtggctttctctgctgctccttgtgcatcagcagacagatgtggttcacataggaagaaagactaacgtaggcaaagatttgctctttcttcagcagccctagaaagacggcggcctgggtgattcaccactccttcctcacgtccttgattttatttgaactgagctccagatgctcctcccacccttttcctcttggaagccaaacccctttgtaatctgtataaggtccacaccccgggagctgagtgattgcagaaactggccttccatctctctcagacaccaagctgcagatccaggtaagcagcccaagaggtgttctcaggtgccgcttctgcttcagggttgcagaagagggagctagggccagtccacagcactgagaaagattgggtgatgctagcgctgaaaaaatgtg

SEQ ID NO: 11854 - DNA, 2300 bp, Homo sapien
gtgacaagagcaagactccgtctcaaaaaaaaacaaaaaacaaaaaactccacaattttaaaggatgaatatggttgcaaattgggcaggttatggtctgcttaagacacttcaataagtctgatatgtcataagcacagatgtcttcaggagccaggcaggtgtcatcactgaacagataggataaaagtcaggagggagagtggagtcagagaacagccctgagctagagccccttccacagacgcagctgttactcagctctaattgatacaacaccaatggtgcaccaaccaccatcatgtgatttttaaagataagacagtaatgaaaacttttagtgaactattccaatgtcaaactttatcttccaaaccaaacatcataaatagcactgtgtatgctgaaaagaagcactgtttagccaagtacctgccctggggctgcagtctatgtcttttgcctcatactatagacacttaagtgcaaatgtttctagccagtgtggctgtcagcatcacagaggggatactctacgtatcattcacctttacattctcatcacctacaaaaatgatctccacacaatatacatgaaaaaataaacttgcctcatgataaagctgctaatgaatgtcggccagaacaggacttcaaggcagagcaatattagctgcgcattgagtcctcaccaggtcaccattgtgtccacatttacctaaggaccccagtgataaaattattgcatttctaaatgacaggaaaattggacggtagtaaaaattaggcagattaactgttggaaggtatattatatcatttaagggtctactttccattttctaatctcaaagctagaccagatttaacatctgttagtacccaggccttacctttgcaattcacttctcacctctgtacaatttccccacatcatcccctgtgcccagaatgctcatctcttctctaaatcccctgaaaatcccctgcttatcctttaggacctgctgaaataaacttttttttgaagttttccttatttctcaagccaagtgatttccttcaccagcagtgtccctatgacaccatgttcacacaaatgctattacctctatcacactgtaatacaattatatgtctacaagtactttcctgtgtttctctgagggccaagaataaatgtatgctttgtgtatcaaactgtacacttgacctctatactttcaggaatacagtgctctgtccttaaatgttcatttgtaaatacagaaccatattcttgttaatatcacaaaatgaaacttaccaggaagatgaatgacaaccccagaacacactgttttgtagaaaataccataggctgaaaagatcacaggaataccgagtgctaggttggaatctttcatgacaccaaatgttcattcatcctctgccagattttacaactgtcctcggtgtgtttttaggttatgtaactttacacaaagtggaatcaataatcagggcaagacttaagagaaagtggatccaatgcaagaggagtaaagaaaaaaattcctcaattgtatggagcagattgttttaattatctacagaatcttgtgccccaagaaattaatagctcaagtttccagcaagagtggtggatgagatggagagcatttatgtgagagagaaccaaggatattactaaaaatggaagggaagctgggtttctcctgggcaaacagccctctgtggctctatttctcctaactactatgcctgccttcgtgtcatttagtcatttaggggcctgccagaggacagttataaaatctgtggtcattctgccggcagcgtatagttttcacccagagtccagatcccaccggcaaaactctgtctaacacaggatgacttggaattagagtccgtatagcagaaagagcagcagggctgtccttgggtatccgttgctcagccaagtcatcaaataaaaaggatgattgcacaagtggaccatgtgtcaatctgtgggtttctgcatggccagacccaccaagggaagctttatttaaacagttccaagtaggggagaccagctgcccctgaaccccagaacaaccagctggatcagttctcacaggagccacagctcagagactgggtaagtcaacaatccccagagctgggacaggaggggcagcgacagggcagcacctgagggagaggtgagctgaagttagtgcttaggagatgtggcacactttggggacaggaagaaaaggaaatgcgaccccagagtggcagcagagggg

SEQ ID NO: 11855 - DNA, 2300 bp, Homo sapien
gactccatctcaaaaaaaaaaaaaaaaccacaattttaaaggatgaatatggttgcaaattgggcaggttatgtatggtctgagttatttcttaagacactgcaacaagtctgatgcgtcataagcacagatgtctccagaagccaggcaggtgtcattactgaacagacaggatgaaagtcaggaggcagagatggagtcagagaacagccccgagctagagccccttccacagaggcagctttacccagctctaattgataccacacagcaacggagacacagtgcaccaaccaacatcatgtgatttttaaagataagacagtaatgaaaacttttagtgaactattccaatgtcaaactttaccttccaaaccaaacattataaatagcactgtatatgctgaaaagaggcactgtttagccaggtacctgccctggggctgcagtctatgtcttttgcctcatactatagacacttgagtgcaagtctttctacccagtgtgtctgtcagcatcacagagcggatactctacgtatcattcacctttacattctcatcacctgcaaaaatgatctccacacaatatacatgaaaaaagaatttgcttcatgataaagctgctaatgaatgtcggccagaagaggacttcaaggcagagcaatattagctgcgcattgagtcctcactgggtcaccattgtgtccacatttacctaaggaccccagtgataaaattattgcatttctaaatgacaggaaaattggatggtagtaaaaattatgtagattaactgttggaaggtatattatatcatttaagggtctaatatcaattttctaatctgaaagctagaccagatttaacatctcttagtactcaggtcttaccactgcaattcacttcccacctctgtacaatttccccacatcatcccctgtgcccagaatgctcatctcttccctaaagtccctgaaaactccctgcttatcttttagggccctgctgaaatcaaacttttttttttgaagtcttccttgtccctcaagccaagtgatttccttcaccctcggcgtccccatgaaaccatgttcacacaagtgtaatacaattatgtgtctacaattactttcctgtatgtctctgagggccaagaataaatgtatgctttgtgtatcaaactgtacacttgacctctatactttcaggaatacagtgctctgtccttaaatgttcatttgtaaatacagaaccattttcttgttaatatcacaaaatgaaacttaccaggaagatgaatgacaaccccagaacacagtgttttgtagaaaataccataggctgaaaagatcacaggaataccgagtgctaggttggaatctttcatgacaccaaatgttcattcattctctgccagactttacaactgtcctcggtgtgtttttaggttgtgtaactttacacaaagtggaagcaataatcagggcaagacttaagagaaagtggatccaatgcaagaggagtaaagaaaaaaatccctcaagtatgtgtagcagattgttttaattatctacagaatcttgtgccctaagaaattaatagctcaagtttccagcaagagtggtggatgagatggagagcatttgtgtgagagagaaccaaggatattactaaaaatgaaagggaagctgggtttctcctgggcaaacagccctcagtggctctatttgttctaactactatgcctgccttcatgtactttggtcatttagtggcctgccagaggacagttataaaatctgtggtcattctgcaggcagcatatagttttcatccagagtttggatctaaccagcaaaactctgtcttacacaggatgacttggaattagagtccttatagcagaaagagcagcagggctgtccttgggtatccgttgctcagccaagtcatcaaataaaaaggatgattgcacaagtggactatgtaccaatctgtgggtttctgcatggccaagagccagaccctccctctgggctctgctggcccaacccaccaagggatgctttatttaaacagttccaagtaggggagaccagctgcccctgaaccccagaacaaccagctggatcagttctcacaggagctacagcgcggagactgggtaagtcaacgatccccagagctgggacagaaggggcagcaatggggcagcaactgagggagaagagagctgacgttagtgcttaggagacgttgcacactttgcagacaggaagtaaaggaaatgggacccca

SEQ ID NO: 11856 - DNA, 2300 bp, Homo sapien
ctagaatgactcagaatcccagacaggtcatgtttgaagaggccattcattcactcccattgaggtgaaagttgcatccctttctcccttctctccttctcttatcctggagcgcaaacattgtgtggagtgcaaacattgtgtggagcccctacataggcgcggtggcttatgcgttggagttgaactactatgaaggtacttgagatctggtgattcccttggataaatttcctacaaggaatcatttcacaaagttttatggacagaaaatgcccataatttggatggtggcttttggagccgtgacatgatctcagctatatgaatagaattataaggacaagatgctgagggatttactcaagagctctgactagctgacagtagaatcttggcagatcttccaacacacacatctagtatggcccaatcttcagaattatctgtgcatttgggcaagaataggccccatcgccagcaccctggcatttgggcaagactcgcacaaaaaatgagggatggcttcaggagtaagaacctttgagacggcctgggttgtggacttaatagtctggagagatatcaacaggtatcaatttaatttaatggttccattcctcagatatctctagggcagagtcctcagcccagggcacacacagaatcacgactctgaacgtgagcattctcactggaggggtagaggtcactgtggtgacccttttgagcacccaggaaagattcccaggtaaaaggaggactgaggaaaagctggaaaagaggcaagtgtcagcctaggatgtgtcagtgggccatgcattcatctacaggaagggcggttccgcctggaagaggcagagcggcccttctccccctgtccacccatgtctcctcaccccacctcaccccgagatgaggagccctgagagagctggcaggctgcagtcggtgaggtctgcagatttggggaagaagtcgaataaggtagagaaccacagaaggaaagtccaattagggcgctggggcctgagatcatcaggccctagcctgatgactcaggagtctagccctccagatgaactggctggttccacacacaggtcaagtggatgtgctgggagaacatcctaaacctgtaacggaaattagggggccaggagcccacagaaatcacacactgggtgagctcaagtgttcggagactgaggtagcagttgtccactgtcaggtcccgaaagtagatatcgccttgcatatgccatttatccttctgatgctctagtgaatgaaggtgttgatgagcttgcagactctggagaccattcccctatgctatattatcacgtcacaatagtggctggacccacctgagattctgcacctcaggtaatcagacggctactgtctaagtcctgggcctgggggaaacactctgacgtagcagcagacacaggagggtccccgtcagaaccatgttttctgtgaagtggggatcagtccttttccctgaagtacctagcacataggtgttctcagtaagtgttatgttagcttactaagaagactggtctcatttgaagagaaattaacaaatgtaaaaaaataaataaacctattaactaggtttaatatttatcaaactattaactattcaataatcatttaactattaatttctgttttcttcagtcgcttaaatctgatttttctcttctttccgttactgcagtctccctttttcacacagggaaacaacccaagactcagagttctccgcggaggaatgcaaagaacacaggaagtcagtactcccagaaacagtctttgctggcgcgctcacacccaaccccatcccgcccccgtcccgtcccgccccgccccaccccaccctcttgatttctggggccggtgaccaggcccaacgcagccttcaagtcggcccaaacacggtttctgcctcaaggattatttatataaccattgcttattggctgctggcaaacactcgctcttctcgttggctgaaactgtcgggagaagttctgcgaaggctgctccttgcggcgttgggactgagggtcacaggcacctgtatttccgtttccggttcgcctccggagccatggcggcggcactgaagtgtctactgacattaggaagatggtgccccggccttggagtggctccccaggcccgggtgagtgcctacattccctgctgtcggagagactctggatctgcagagacatctccgcgcagaggaggagcgctcctggcagcccccgccctagcgattg

SEQ ID NO: 11857 - DNA, 2300 bp, Homo sapien
taacagagcaagacgtcctcccttaaaaaaaaaaaaaaaaaaaaaacatgtaaaaggtatagttaattatcctggcctatcctgtaatgaagagcttcctcagatttttggtgccaggcttcccacacaaatctcaagctcgccctctcctattgtggcagttcagagctccataagctcttcgctgtaatgatgaatgtgtaagctgatcattaaagcagaagtagaaaaaccagatttccataagccctttgctataatgatgaatgtacaagttaaacattaaagcagaagcaagaaaaatggataaggaatcgggggaaactggtgcctgagtacgaaagccagaatacaaaaaaagcaagccctttaaagccccacctatactttctctacctcagatctagctgagtgataaaagcattcctgcacatacaacccatcccaggaccaacttaagattaagaaacttctgtctgcaagtactcactcactatggtgggatcagctgcaaagcgaactgtcccatgctcatgttgatggttttctagatactgccaacatgttagctctttctggtgccgatgaatttcaaacgcgaacagacacccttgatgtgggtttgctaagaaaatagaagaacaggaagaaaagttgccaggttcagacatcccagggaaaaagaagcgtaaacagcattagcaatcagtgactgatgataatgctgcaataatgggaatggttttatttctaaatcaaatcgtttattgctttgtttctaaaaaacaaaaaaaaaacttctacctgcagacccctagtttagattaattaggaaacattcccgcaggtagtcatagagcttgaattgtatataaaagctaaagaaaagcttgtaactttgagttggtctggtgtgctactccgacctccctgtaatcagttgcagaaataaactcccgtctttcccagtctgtctgtctgcatctcattaccggaccacaagaacaagcagcaggaccagtaacactgtaagaatcatccagtaacactgtaagaatactgcttctaccagaggccaggacttccctaggaaaataatctggagtagcaaggaaagctgcctccagagctctgagaactggctcaacaggtctcagggttgttatgtgggccacctgaataggggaatcagcagctgcctggcctcttgtactaacgccttcccttctgtctttcccagggtccctcagctaccctagagtatgtatgggaaatgccccagacatttccatcaagagtgattcccatcagaactgaatcttctacccccacctctctatatccaggtagaatcctcccattcactcagttcatttctgttttcccctaagccttgctgtttcagggctagagcagcttcctttgtcttaaaccttaaatgtctttttttccacagttcttaccaggaaacaggcacagttagaagttgtaacagtataaatgttgtaataccagacatctcaactcattcctctcaaaactgatcccaatcaaaagagaaagaaaaaaaacaaatcaacttaccactagacatttccatgcctggagctatttttctggggttacaggaaagggtagttccctcatgtgggtactagttcccacagagtagcaccagcaccacctctcagccccacctctttacctccaggtggccccaaatctctgaaagcgggtggttcaagtatcagcattgcaacctataagacttgggatgaggtggagagggtatggaaggcttagatcaaacgtcctgagtgagacaggaccagattgtccccagtacaaaatagctgggaagcagctaccatagactttcctattttggattagaccaaccccaagcacatgaactaagactatccgtagctcttggattagtcatgccattgaagaggaggagaagacgccactgggctgtgcctggcagggagtctggagtttctggtttccaagctcaggaaggcgtgaaccaggggaggggcctccatgcagggggagggctagaagctggggcaggatctgtcagctctgcaatgctgcagaagcagaagcaacacagaaagaagataccaacagcctcctgaaactcacgagagtggacactccagtgttgaccacctaagataccactcctgctccaaagattacagctcccttgtcattctgactcctgggcttaccctacaccccagagatggagcaactactaggaataaaacttggctgcctgtttgccc

SEQ ID NO: 11858 - DNA, 2300 bp, Homo sapien
agccccttatgagccaggacagcaaggcagagctgcacggtagctgctactgtcggctgcagccccacagctagcccttcaaacactgagtgaaaggagagtgacagcaagaggacaagggctcggaggggaccctttgagggtgagggtaaatgtccatggctgtggagttcgaagatatgagccccaccccattcttcgtcctgcactgtcgatcctccagcagccccaggacagcactgcaatgccagcgactccaaaaagaagacaaaaaagaagcccagggagatgatgagctctccatagggatactccatctagaaacaaaaagaagggctgtgagatggaaaggaagggtaggcaatacattggatggacatggaattgggagattgaagagaatgagaaaatgtggtaacagaacacaaaaaagggtaggggaaatgaagccaagagtagacatggccatgcaacaacaagaatgccagagtgggccggacacagtggctcatgcctgtaatcctagcactttgggagactgaagtgggcagatcacttgaggtcaggagattgagaccagcctggccaacatgatgaaaccccgtctctactaaaaatacaaaaactagccaggtgtggtggcacgtgcctgtaatcccagctactcaggaggctgaggcaggaaaatcactagaactcggaaggcagaggttgcagtgagccgagattgtgccactgtactccagtctgggcgacagagagatttcatctcaacaaacaaacgaaaaacaacaacaacaaaagactgccagaggggctaagggacagaatctcaatagagttaaaaacatgggcaaatgatgtgaggtatatcagaggatccagggaaagaatgaaagagtaaaacaagggctttccctggcattctataaactcaaaaggattggatttgctcctcttttcctctacgatgtctgagctagggagcagaagggattcttggtactcctcatgtattcctctcaaaagggtctggatatgaaaggcctctctggttctcctcactctccagataggggatggtgggaggtacttacatgagctgaatcagcatcaccagaagaatttctctcacttgctgatctgttctaagaagaaagcagcagaaattagatgtgggatggagcagcacagcttcctgtgctgtcccttcagcaattctgttttccttaaagcctaatctgacttgctttcaccatcccacacaagagctgtcattttccttgtcgttccacccatgtccttggctccatcactttcccgctctcttccctttgtcctgtttatcattttggcctcatagacctgcggcttgaaatctctgctctcacctgcaccatgaacttctgaatctgtgattcaatttcctccagggcttcagcagtcatatgcatgaaccctgctcccaggaaaacaccagcagaaatacagcccaggagtctgaggactagccggtgatgacctaataaaaagcagaagttacaacccacttgacactgaggagacagacaaaggtgagtaaagagcagcaggcagcactcaatatcccaaggttggggatggtgagagaatcagagcaaggtatcaggacagggttgaggtgagactcaggctatggaacaaagatggggtagggctatacctctggctgcatcaatctggaaccatttgaagcagatgggagtaaggccacagcccagagtgagagccaacagggcaaacaggcagccaagttttattcctagtagttgctccatctctggggtgtagggtaagcccaggagtcagaatgacaagggagctgtaatctttggagcaggagtggtatcttaggtggtcaacactggagtgtccactctcgtgagtttcaggaggctgttggtatcttctttctgtgttgcttctgcttctgcagcattgcagagctgacagatcctgccccagcttctagccctccccctgcatggaggcccctcccctggttcacgccttcctgagcttggaaaccagaaactccagactccctgccaggcacagcccagtggcgtcttctcctcctcttcaatggcatgactaatccaagagctacggatagtcttagttcatgtgcttggggttggtctaatccaaaataggaaagtctatggtagctgcttcccagctattttgtactggggacaatctggtcctgtctcactcaggacgtttgatctaagccttccataccctctccacctcat

SEQ ID NO: 11859 - DNA, 2300 bp, Homo sapien
ctttctttccttctattctagtcctttcccttccctatctctcccctctccttccttcccctcctcttctctctctaatcttcattattctttcttatcctcaaactcatcttccggtatcatgttttcctcaattcttgctgatcctgtttttaattctttgttcccttttccctcttgcccacccactcccagctccctgaccttggtgttgctccttttctggcctcgtctcctctgagcctagctcttggtgccctgttttcctgcagactcactctgtggagacaccatacggctctgtcactttcactgtctatggcacccccaaacccaaacgcccagcgatccttacctaccacgatgtgggactcaactgtaaggaccttcattcatctcccactcctgtctgggaagaggctgtgggggaagggtagaaatgaaacccagagggaggggaggggtcagtgtgggaaggagaagttctctcctggtctgactgtggcatgaaaggaagggtgagttctgactgggggacacgagtccctgtctgattctattgttgaggtgatgtgggttctctttagataaatcttgcttccagccactgtttcagttcgaggacatgcaggaaatcattcagaactttgtgcgggttcatgtggatgcccctggaatggaagagggagcccctgtgttccctttggggtaagagttaggtcgttactgcttcaccagactgtgaggaacaggacaggtgcgggaaaggttcgactggggaggaggaaagggagggcagtggttattctgggagagaatgagtaggacatcctgaggtggggggtgtgagggcaggttggtatcttccttaacatgcctctcttttccagatatcagtacccatctctggaccagcttgcagacatgatcccttgcgtcctgcagtacctaaagtgagaggcctgggaacccctccaaaccagagttctctttccagcacaaggagacccttagaacttccaggttcaccgtggttcctgagccagtttcagcttctgaactcaatatatcttcttccttcatgctcccgccttgattattgagaaaaggtggtgggtttggaaaattggccagagtcaacagaatagccctaatgggtggagggaaggaaaagggtctatgcttggccctgcctcaggctaaggagggccttctctgatcagaaagtcagggaggaatgaaagggggtgacataatccctgaggaaccagatagacctgtctctttctctcccactcccctctccttcatgcccacacctggtggatggggagctctgcgggtgagagagagttggggaaggaagagaacaccagaccaagtgtctttggtattcagagggaggtgctggcccctgggtgctgttcttagctaagcttctcctaggcaccagggctcagcagctctggttcaccactttgccactcttttcctcattctctccattgttcactaaaattgtgtctgttttcacatttgctttaagttccattcttcccgttcctctagaggaaccaggaactaaagcagaacaagttgaactggctcttgaaaattgagaatggacaaagagctatctatatgggaaaacagtgtgttggttggctggtggatgggtgtttgtttttaagacactagctctccagcagaaagctggggatagacttcaggtatctaccctgactacccgtgccaacctttggcttcttgggcccttctttttcgcgtcctccaaagaaaggtccgtgtctgcctttctttgtgcccgtggactcaggagggagggtgaagagtttgaagagatgggctgtggcaggttttggacagcagatcccatgaggcgtatatttctttccctttcacagtttctctacaataattggagttggtgttggagctggagcctacatcctggcgagatatgctgtaagaaataaaaagcccagaggagggaaaggagggtccagactgattaggagaatactgtttattagtgctgtttgggggaggaagtgggcactaggtggggagtcaggccctgtgggagtccaggagtgggtcgagcttagcggggaggggataaggccatgccctgtttctcatttccttccttctgctgtccctcagcttaaccacccggacactgttgaaggtcttgtcctcatcaacattgatcccaatgccaagggttggatggattgggcagcccacaaggtttggaggggcctgtgtgctgagac

SEQ ID NO: 11860 - DNA, 2300 bp, Homo sapien
atcttaggggagaaccagccttacttctgcctgcagcaggctgggtgggaccccaaggtctaggaagccaatggatgtcagtggaaatttcccatctcctgcctgccctgcgcccctgcgtaggccccttatcaggttccccctgagtcatcctgacccagagacgaatttagatgctggaaccttcaggtccttccctcccccactccaagtaagacgacttttgacaaagaaaagcctgcaggcaaaagttctcactcgaggctctccctctccccaggttcctctggtgctgatgagatctctcctgtcttgcgcacctttggctgtgacccttattccagcaggcttttccttgtccaggagagtgttaaactggcatccagagggaagaggggactaggagaggagccagggtgcccagcttctgtgccagtttctggggaaaaagttataaagggagtgggagaaaggaacagaagaaaagttgggtgctccaaattgggggatgtagggggagctccttagatttggggttgttgaaggctgggttttagcccgaccagttttcctactgtgggtcacctcctccctcttggcctctccttctttccagtagaccctgccaagtggggatgaaaggggcattgatgttccttggatgggaggggtattgcgggtggtgagggtggtggtgggagggtggttcccaggcaggagggggcagggaaacttgggggtcttgggggggcagtcggtgctggtgttgcagttggcagctcaagttccattggccattgttcctgactggcctggcgcccagcccccgaaatggcaactcaggaaccagtctgaagggggttggggtggatatgatcctgggattgggggagctacaaggggggcaggtggggagaaattcagtcaggtttccttttgcctaaacaacttcgaattcccttaagccacatttttaatcaactaactcattccagggagccttcctccgaggggcacaaggagagctcattccagggtgtgtgtgtgtgtgtgcgtgtgcgtgtgtgtgtaaagtctacagtggcaaacccactcgggcaccgagagggacgcggcagaccctgagaccatcccccgggcattgcgattcagcgggcctgagctggtctcctattctgggccggactgggaggggttagcggcgaagccacagggtctcttgggtcccagcccaggacactgcgtcctccccaagcccctactccacccccgcagggttaactccgcccctgcgcctgtttacccaggagtcagagcctctgggggtccccggcccctcccccgcgccccttgaggcattgaccccagagtccctgttggccatcctctccccaccccccgcctgcccgcgatcgccctctatttatagcggccccccgcattccccgcccccacctccccgccttgttgtccaacttctcccggagcagccggagagcaggcgtcgggacgcagcaaagagaggagaggtaccaggactctgggcacgagggagtcggaactcctgcgccctcgacgttcccccgtgccccctttcggcgccagcacacctgcccctgccagccggcgagacccccgcctcctcagcggcggtcccgcccacctcctcctttcttaatctagttctctgtgttcgggcggggggagtcgaactcgtggggtgtcagtatcccgggttcgtctccccactaccggttcccaccactgagtctgggggcgaaggaaggagccagagtgcaattgcagatccaggtcgtggatggggcggtgctgagggcagccgagggatccctctcagggctgagggatccccgcactccccacaccgccccaatgcggggagggggtggtggaatgttttggtgagccgagcagagcctggaagcgtccagccgcccgcccctcgccccccggccccagcacaaccctttcctgagcggcagtctgggcggggtgaaagggggggcgtgtttactgggggtctggggcgggtctgcggggagcctagcgcccgtgggcgggctggggcgggccgggggcgggtctgcgggaagcccgagccggggcgggcccgagtcaaaggcaagtgaaggtggaagcggccgcggcggcagcaggtagggggaggggcaggcgaggggccgtagggcctggaaggcgccagccgggccggcgggcggtgtgattgatccgcgtcccctggagctggaggctcgggggaaagggccagcacggagcgg

SEQ ID NO: 11861 - DNA, 2300 bp, Homo sapien
attcatagtttgcattttctccatcaggggatactatacctattatgtggggttggaaatctctaatctcccacttgagaagggtgggaaactactgctataggacttactgtccaaatgattgatcttatatataacttgtcctgtgtttgtaccttctcttgacaaatgtcaaaatgtcatttctcatcacaaatgtctagagagggtgtgaccagatgcacactttgaatttcatctacacagtggcttgcacataacagatacttaaaactgttgcttacttgaaggtatagtgtgaagctgctctggccaaagggaaagagtttagacagagattgtccttgcaacacttacaccctggttgggctgggagctgccctgacatggaagaaccatatcttaggggagaaccagccttacttctgcctgcagcaggctgggtgggaccccaaggtctaggaagccaatggatgtcagtggaaatttcccatctcctgcctgccctgcgcccctgcgtaggccccttatcaggttccccctgagtcatcctgacccagagacgaatttagatgctggaaccttcaggtccttccctcccccactccaagtaagacgacttttgacaaagaaaagcctgcaggcaaaagttctcactcgaggctctccctctccccaggttcctctggtgctgatgagatctctcctgtcttgcgcacctttggctgtgacccttattccagcaggcttttccttgtccaggagagtgttaaactggcatccagagggaagaggggactaggagaggagccagggtgcccagcttctgtgccagtttctggggaaaaagttataaagggagtgggagaaaggaacagaagaaaagttgggtgctccaaattgggggatgtagggggagctccttagatttggggttgttgaaggctgggttttagcccgaccagttttcctactgtgggtcacctcctccctcttggcctctccttctttccagtagaccctgccaagtggggatgaaaggggcattgatgttccttggatgggaggggtattgcgggtggtgagggtggtggtgggagggtggttcccaggcaggagggggcagggaaacttgggggtcttgggggggcagtcggtgctggtgttgcagttggcagctcaagttccattggccattgttcctgactggcctggcgcccagcccccgaaatggcaactcaggaaccagtctgaagggggttggggtggatatgatcctgggattgggggagctacaaggggggcaggtggggagaaattcagtcaggtttccttttgcctaaacaacttcgaattcccttaagccacatttttaatcaactaactcattccagggagccttcctccgaggggcacaaggagagctcattccagggtgtgtgtgtgtgtgtgcgtgtgcgtgtgtgtgtaaagtctacagtggcaaacccactcgggcaccgagagggacgcggcagaccctgagaccatcccccgggcattgcgattcagcgggcctgagctggtctcctattctgggccggactgggaggggttagcggcgaagccacagggtctcttgggtcccagcccaggacactgcgtcctccccaagcccctactccacccccgcagggttaactccgcccctgcgcctgtttacccaggagtcagagcctctgggggtccccggcccctcccccgcgccccttgaggcattgaccccagagtccctgttggccatcctctccccaccccccgcctgcccgcgatcgccctctatttatagcggccccccgcattccccgcccccacctccccgccttgttgtccaacttctcccggagcagccggagagcaggcgtcgggacgcagcaaagagaggagaggtaccaggactctgggcacgagggagtcggaactcctgcgccctcgacgttcccccgtgccccctttcggcgccagcacacctgcccctgccagccggcgagacccccgcctcctcagcggcggtcccgcccacctcctcctttcttaatctagttctctgtgttcgggcggggggagtcgaactcgtggggtgtcagtatcccgggttcgtctccccactaccggttcccaccactgagtctgggggcgaaggaaggagccagagtgcaattgcagatccaggtcgtggatggggcggtgctgagggcagccgagggatccctctcagggctgagggatccccgcactccccacaccgccccaatgcgggg

SEQ ID NO: 11862 - DNA, 2300 bp, Homo sapien
ctcccactcaagtattccatggttgcacttctcatttggtggttcatcctaggaacaaagcccttttccttctctgaattatagtaagataatgatttctagactgtgggccacagcctcctggcgtgaggatttctgaaatcttgcaaagggccctagaatctgtatgtataaagagtgagtgtgaactgagtaaataatatgccttgcatgtgtaggtattaccgcatttacagatgttgtgacagaaacttacttcaaagtattgatgaattcatagtttgcattttctccatcaggggatactatacctattatgtggggttggaaatctctaatctcccacttgagaagggtgggaaactactgctataggacttactgtccaaatgattgatcttatatataacttgtcctgtgtttgtaccttctcttgacaaatgtcaaaatgtcatttctcatcacaaatgtctagagagggtgtgaccagatgcacactttgaatttcatctacacagtggcttgcacataacagatacttaaaactgttgcttacttgaaggtatagtgtgaagctgctctggccaaagggaaagagtttagacagagattgtccttgcaacacttacaccctggttgggctgggagctgccctgacatggaagaaccatatcttaggggagaaccagccttacttctgcctgcagcaggctgggtgggaccccaaggtctaggaagccaatggatgtcagtggaaatttcccatctcctgcctgccctgcgcccctgcgtaggccccttatcaggttccccctgagtcatcctgacccagagacgaatttagatgctggaaccttcaggtccttccctcccccactccaagtaagacgacttttgacaaagaaaagcctgcaggcaaaagttctcactcgaggctctccctctccccaggttcctctggtgctgatgagatctctcctgtcttgcgcacctttggctgtgacccttattccagcaggcttttccttgtccaggagagtgttaaactggcatccagagggaagaggggactaggagaggagccagggtgcccagcttctgtgccagtttctggggaaaaagttataaagggagtgggagaaaggaacagaagaaaagttgggtgctccaaattgggggatgtagggggagctccttagatttggggttgttgaaggctgggttttagcccgaccagttttcctactgtgggtcacctcctccctcttggcctctccttctttccagtagaccctgccaagtggggatgaaaggggcattgatgttccttggatgggaggggtattgcgggtggtgagggtggtggtgggagggtggttcccaggcaggagggggcagggaaacttgggggtcttgggggggcagtcggtgctggtgttgcagttggcagctcaagttccattggccattgttcctgactggcctggcgcccagcccccgaaatggcaactcaggaaccagtctgaagggggttggggtggatatgatcctgggattgggggagctacaaggggggcaggtggggagaaattcagtcaggtttccttttgcctaaacaacttcgaattcccttaagccacatttttaatcaactaactcattccagggagccttcctccgaggggcacaaggagagctcattccagggtgtgtgtgtgtgtgtgcgtgtgcgtgtgtgtgtaaagtctacagtggcaaacccactcgggcaccgagagggacgcggcagaccctgagaccatcccccgggcattgcgattcagcgggcctgagctggtctcctattctgggccggactgggaggggttagcggcgaagccacagggtctcttgggtcccagcccaggacactgcgtcctccccaagcccctactccacccccgcagggttaactccgcccctgcgcctgtttacccaggagtcagagcctctgggggtccccggcccctcccccgcgccccttgaggcattgaccccagagtccctgttggccatcctctccccaccccccgcctgcccgcgatcgccctctatttatagcggccccccgcattccccgcccccacctccccgccttgttgtccaacttctcccggagcagccggagagcaggcgtcgggacgcagcaaagagaggagaggtaccaggactctgggcacgagggagtcggaactcctgcgccctcgacgttcccccgtgccccctttcggcgccagcacacctgcccctgccagccggcg

SEQ ID NO: 11863 - DNA, 2300 bp, Homo sapien
acatatctaggattcatttccccaccccggtccattccactccagggactatgctccttccactcccaagtagcctgtcaagtgtatagcaattaggccatatgaccccagctgcagaataatctggttcttaggttttttgtttcttggggttctttttgttttgttttgttttgttttgtttttgagatggggtctctctgtcagccaggtgggagtgcgctgacacaatcctagttcactgcagccccaaactcccgggctcaagcaatcctcccacttcagcctcctcagtagctgggactacaggtgcatgccaccactcccaactaatttttttattattatttatttatctagagacaaggtctcactttgttggcctcccaaagtgctggaattataggcatgagccactgtgccctgcccaagaataatgttgatgagaggtgggtgatgtttggtagggtagattggggcctagttagttgtataggtccttgaatgctaagcaaaaagatttagcaatgagaagctatagtatatcttgagccacagaatattcttgagcaggagtaataaaaaatactgttttgtgaaaattaatctgatggggaggaggtaatagagatggattatgggtgggtgggagtgaagaattagatttagaaaagagatcatttagaaaccagagtagtcatccaactatgagatgataagaacttgaataagggtggaagcaataggaatggaaagaaaggcatagatttgtaagacaaagaaaaaaaatagaaagtggtggcattattagatgggaaaaggaggaaagtcaccagtctcgttgctctgttttaggatccgtgaggttcatctatctgtagtgcttctggccagagaaaaggccgaagagagaaaaccctgaggaacatctttgacctgcatagaaacttatctgaagattttcagaatctgagcctcaccctcagtctatcccagttttatcctgacctgtccacatctgttatactccaaggcttgctgggcccaacactggaagctatttaatgtttctattgcgactggccttttaaagccagtgggattctccatgctacacttgagcctggagactagaaaacatgacagcctgttttcattaatccgttttcattaactgctgtggtctgaatgtttatgttgtccacagattcatatattaaaatcctaactcccggctggacgcagtgggtcacacctgtaatcccagcactttgggaggctgaggcaggtggatcacttgaggtcaggagttcgaaaccagcctggccaacatggcaaaaccccgtctctactaaaaatgcaaaaattagccaggcatagtggctgggctaatcccagctactggggaggctgaggcatgagagtcgcttgaatcctgggactggaggttgcagtgccccaggatcatgccactgcatttcagcctgggcaacagacagcgagactccatctcaaaataaatacgcaaataaataaaataaaatcctaactcccaaagtcatggtattaggagatggggcattttggggggtgattaagttttatgagggcagagcctttctgaatgggattcatacccttataaataggcccaagggaactcattcaccccttctaccatgtgaggacacagcaagaaggtgccatctatggaccggaaagcagccctcaccaaacactgaatctgccagcaccttgatcttagacttctcagccttcagagctctgagaaataaatgtctgttgtttataagccacccagtttgatattttgttctagcagcccaaacagactacaacaccttccctgggctcgcctcagcttctgttgtggggcagagcataaggcaatttgactaggacccagaggatgggtaagcttggctgaaatgatggaaatgtgatcatctgaaaaggtcagaaagttggcagtttgctcaattcggcatgcaaggtagggagaccaaaagccccctcctttgaaggcaatggctgtagctggggccagaagtgatgtcacataaccactgctgaggtcatagaatcttccctctcctccctctgtctcctcattgccacagccaaccggctcccacatatctgcacacacttaaatacaaaggccgggaagggtcagaccaccatccgggtactctaaggtacataaaagaggtaggggaaagagaggatcattcagtaggtaggatccacactggtatctccaatgctgggaatgggag

SEQ ID NO: 11864 - DNA, 2300 bp, Homo sapien
tgaagaatacagatgagccacctgcccatgtgggctctatcctcacttgcttgacggtgcccacttccttggcgaggtcttcccagcagaggctttctaagtgggacctctgggttgagtctttctatgagctagcaccatggaatagatgggggcgaggaacggtgcagcagcagggttccaggtagaggagacagcagcagatagggcatagaggaggtgggggacaaggtgggaagcaggcagggatgcagatgcagttgtacacatgggcaggtgcaagatcatgggaagtcttatgtcctgtgagatgtagtttggactataccctacgacaagcttgtccaacccatggcccgcgggtcacatgtggcccaggatggctttgaatgcagcccaacacaaattcgtaaactttcttaaaacattatgaatttttttgcatgttttaagctcatcagctatcgttagtgatagtgtattttatgtgcggcccaagacaattcttcttccaatgtggcccagggaagccaaaagactgggcacccctaccctatgagaaacaagctattgcagacttttagacgaaagaagggatcacactttttctcttgaagttgtataagagatatatttgagttgagtcttactggagttggagtgtgtgtgctgtccaggcgagacgagagcatccactgaggaagaaataagaatggaagagatgggcttgggaaaagtttaagattgtcagggctgtgtgactgatggactcaggctcatactgaggactcaccatgtgccgggcactggtctaaaaactcttgatatacatcttaatggatcctcatactgccgtgaggtaaaaaatactatcctcatgaacagatgaaacaaggaagctttcagtggtttcgtaaacagatagatggtgtgcagtttgtaagctgcagaggcaggattcaattcctggtctgtttcactcaaaagccttgatcttaaccaccatgcaggaccgcctccccgtagctgggattggggaggtggaggggtctaggatcactttcaggtttcttgcataggtaaccagggaaactgagttgacaaaacaggaagagaaacaagttatggggaggatggattccattttggactgtggtttgtgctgtcagaaagtgccagtttagggggctctacatgaggaacaccaatctttctctctgcggccttactccctcctcctgagctatactgagggtgttggagcactcagctttctgtgttctgactccccttttctgctgcccagcaaaggtaaaaaggctctcctaagaggaggccccaaatctggaagacaccttgcagactaacaaggctgagtgacctgtggaagtcaagggcaagagctagcagtttccagggagctggctctttgattctgatgaaagggaagatgttgatgaaaaagataggagcgtggccctttccccagcatggcaaaccactcagagatcaaccaacagtacgaaacggatcatgccaggctctggcatccacagcttttcatgttcaggttatgctttcaaatccaaactgccaagtttgaggcttcagagtcagcatgcagagatttccagtagtgctcaaactctgacagggcctgaggtcacaggtgaaggctgtgggtgtgacaggagtaaggctgatagggaccgtggggagtccacatggaggtctttgattctcagcccagcactttggtgggaggcccctgagtacatgccctcctgggctcccgtgagtgggatgacaaagtggcgaatgctctgttctctgagggtcaggaataagaagcactttgttcctcagaaacataacagtgctttcctactcaccttgccacgagagcacaggctatggaacagagaaaacatcaaagaaagcccaggcacttaggaacttttggcaaggagattggaagtaagtgttccaatgacactgtagaggaggagaccagatagtaatgcctctttcctcccacccatccaaccctcttagcacaggggctcatcaaactcggggacattccctcctcccagactgatttttacctagaaacctttctagcctctcctcatctcttgactgtcttggccttggcaagaagaatacacgtccctacccagctatcttcagctcctgtccttcctcccagctgccagagaattgtcaggtcagcctgctccttctttcttctctgcattttttactagcaggagtgccaggggcccaaggactcttgg

SEQ ID NO: 11865 - DNA, 2300 bp, Homo sapien
cctgcaaagtttgggataccttaacaaagaagtgaacagctgctcccccaaccaaggcctcgctgaggacaaaccagaagagccagaggcctgtgtgaacttgttcttgattctcttttgccatctagtggcatttctcatctccagcaccacttttgcttctaaagatccttcatcctgacccccaacccacagctgtgctgtccagctactaaaataatgtcctcctggcctcaaaacaaactccccatcctcctgacttagaatcataaattctggaccagaacacaaactttatgatcaggatgggttgtgcgacttctccacagttataatccacacaacagccaggtaatcctttaagctgacacgttctttattcatctacttagaacccttccagggttccctactgtgcttggagtaaaagccacaggccttcaaatggtccgtaagtcttcccaatgacctggtctctggtccctctctgaactctcagttacctgctccagccacactggacacactgctgttcctccaacacctcaggcatctgtctgctctggggcttttgcagtgctagtctcttcacttggaacattcttcctccggataatcacaagttcactcttatcttcaagtctctgccccagagtcagcgatttcaacgatgttacgtaaaattactgaccaccaacccctatactgttctacttttttccctagccattatcactttgagcaaagtatacgtatttttttttactgtctttctccaatggaatgtaagctctacaaaggcagggacttttgtctttgttttttgttgttgtttgtttgtttgtttgtttgttttttgagacagggtctcactctgtgacccaggctggagtgcagtggtgcaatcatgattttcactgcagattttatctctcaagctcaagcaatcctccctcctcagcctctggagtagctgggaccacaggcatgcaccaccatgcctggctaatttttcaaattttttatagagacagggtttcgccacattgcccaggctggtcttgaattcgtggccttaggcaatcctcctgccatggcctcccaaagtgctaggattacaggtgtgggccaccgtacctggccatttttgccttttttgttcagtgatatatcccaagtatcttgacacttagtagatgctcgataaatgtttgttgaccacatgaatgaagcatgcccaagattctgagattgcctactacttacaggtaaattctgaaaacaaaaatattcctcatctcagttttacaggccttctcacccacagagggtgatgcttctctgccttggtgtctcggttctcctgagtgtcatattccaagctcacaagagcttggagtagcactgacccagatgctccacacagctgtaaccaccacaaggaacaggacatacaaggtgaaggaagcactaaggcaggatgtcgagagcagcaacagcattttaaacacaaacatttgggcagtattaaatttttgcaattttcaataaaaaagggagggaacaagtgaaattgagaggtgttggctgccttctccagctaaagccatgtggccttggttggtacctggaactggagaggcctgtgaatcattgtggaatggcttcgctattggggatggtgccaggcctcgtgacagtgatgattcattcacccacttccctcgtgtctgttccatctcctccgaaagataaccagtatctccagatgacaaggaaccagacaaagcatctttctaggctgtcctatctgtgcctcaggtcagagaagaagcaacccttaacaccacagtgattgactcttcccaggatcaagggccagaagtgtatatgagaggatatgaatgacaactcttcctgaaattgatttcagttgacacctgggtcaggtgctctattaaagagtcattaaaatcatgtggccagggaacaaatacagtcttcgaatgtgacgattcaagcttcctcattgctgaacatgtttaggcaggtacaggcatccttaggtgtccacgtatttgggacatgtaagtggagaggcatgaacctgattcatttcctgatccagtgatgctcccagcccacccccaaacagacacagcgtagcccgggccagctcttaaggagttcaggagtgagaagaggccctcagagatctgacagcctaggagtgcgtggacaccacctcagcccactgagcaggagtcacagcacgaagaccaagcgcaaaggtgaggctg

SEQ ID NO: 11866 - DNA, 2300 bp, Homo sapien
catagctcaagggttatcccccagagccccagacactatgaagagggccaaagggtcctgatcttaagggcagggtgtaggcagaggaaatccctggagctgaggatccttctcttcacagtgattctgttggccctcttcatggtgtctagggctcatttacttcagtgtgtggagacttctgggaaccagagtcatgtagaaaagtctcctccccagtctacctcagatagtctcccttctaggagagccagctcatctagctccagttcttggtttactttctttactgaactccatttccgctcctttactccatgttgaaacaatttaagtccatctgcacaagactgggcaaagctcccctggacaccatcctcctctctccaagctcccagccctagaaacataaatatctcataattaagcattctccttttcccattcttcagctttcaagtaggaatgcatcacagttcagccagccttggtatttggcccaaattattatcttcttgtatctcagctttggcttttggaaggctgaatagtcaaattcctatttcatcactattcctggcatcctttaacttggctgtgatcaaggtcacacgaaggattgagtgacaaatctattcaggtagggcaccactaataagaataggccaggccatttggatttattgttaatatctgaatagttacttccaaatattggtgagtactctagatgtaacctggagtgaaattttccttgtgagcttaaaaaaaaattattatattgaaattctaccagccagtggaagtataaatgggtatttattattatttattatttttaagaaagatgctattattaattgttgtgaaagcttatatatgaaacaattatttaaaatttccacatggttaaaaaataggaaattagttgaccgataatataaataatagaagagagtgtgttagctagataactttagggagaaccttatgtcccttgatcaacaatgatttgaactgtgcaagtccacttacattcaaattttcatctgcttctgccatccctgagacagcaagaccaacccctcctcttccttctcctcctcagcctccttaacgtgaagacaatgaggatgaagacttttatgatgagccacttccactaaacgaatagtaaatatttttttcttccttatgattttcttaatgacaccttttttttctctagcttactttattgtaggaatatggtacataatacatatagcatacaaaatatatgttaactgaacgtttatgttattggtaaggcttcaggtgatcaataggctattagtagttaagttttgggggagtcaaaggttatacttggattttcgactgtacactaggcacccttaacctccatgttgttcaaaagccaactgtactttctgagaccaaggtatgtatgtatgtatgtatgtatgtatgtatgtatgtatgtatgtatgtatttgttttgagacaggctctcattctgttactcaggctggagtgcagtggtgcccaggctggagtgcagatcatggctcactgcagcctcaaccttctgggctcaagagatccgccacctcagcctctggagtagcagggactacaggcatgtgtcatcatacccagctaattgtattttttgtagatatggggtttcactatgttgcccagactggtctcaaactcctgggctcaagtaagctgctctggttaggcctcccaaagtgctgggattacaagtgagagccactgtgcctggctgagcccaatgtatttacaacaatttaataaacaccacaagtagtatttaatttaacaaatagtacagaacagaacaatagaaattagattatatcataattctatctatgatttaattactctttttagaattgattggtgtattatgatttattatgtaaataaaataatcccttaagaagtatacatatttgaaagacttttttgaaaatgagatataacttacataaaatacacaaatctttttttcttatttatttttatgaccacctgctgccttttgaaacaaatcttaagtatacagttcaatgagctttcacataggaaacatatccagaccaagaatagaatatttccaggtcctcagaaggctcccccatgccccttcacagttatacttccccaaggctacaactattctgacctgtatcaccacaggttacttcagaactttctagttatttaatgctatttaggtcaacttttaatgctatattaggtca

SEQ ID NO: 11867 - DNA, 2300 bp, Homo sapien
gtatttttagtagagacggggtttcaccgtgttagccaggatggtctcgatctcctgacctcgtgatccgcccgcctcggcctcccaaagtgctgggattacaggcgtgagccaccgcgcccggccggctcccctttttctccatgaaaaaaaaaaatgatccactccctttttccaggagtttgtggacccccatagccagattaatttatattccactacctaagagtagtgagccttggagtccaatggacaaccttggaccctaccaagtgttccctaaacaatttgctgcagtttaaggaatggaaggcctggtgaggaaaggttcagacactctcaacaccgagaatagatgagctaggtttgagacaggtgaataaggttttttaaacactggcccctgtaacccgcccctgggcagtatttacggaatggacaccagggggtagcaaaatctcactctcctagctcgcgggccctcgtaatagagaacctggagagtgtcggtgactcgagggtcccctagccgggtgttagaaagagctccaactccacggctctaactgtgcggggaagatggttaccggggcttgttgccataggttcttttttgacgcatggagcagaggcctcttcttgcctctaagaaggatgaacacttgctctgtccttttccaggctcagcggagcggagaaaaaggtggaggttagcgtccagaggaggtgagagaagagcaagtcaccttggcggcacccccgcctcccctcccgctgttccaacaactgcccagaggctccggcctccgaggaactgcaggcgaggccagacgttttctcatcatcgccctccagctgcaggggcacacgcgttcacgcccctccggggactattcggctttccgatctcctctcctctcccttccgtccaccctttagaagagctcacggagctgcggggcttcccggtgcctgctcagaggccaggcagggcatctccccgccgtgcccgtgcctccccccgggctcctgggagaccccccatctggccttcctttctcattcagacactgtcgggggacgctcggggtttgatgagggagtgaggctagaactttcgtaactagcccaccctgctttgtctcctgcgccagatacccacccattcccatggccacgagccctagcggccctgcgggactctatagccaccccaacagaaggaaggggctggcatccagtaccgaatcctcgaactggaggcctggtgccttccctcttctagccgaatagagaggtagggatgcggaagggaagggccacggaggagagaactcagaaaatgtccggcgaaatgcacgcccctacataagcatcccgatccgggaaccctgcccccttggccaggatgtccgccccctatcccaagccttcgctgctccctaactcccgcacactcccgccttccccaggcaacacagaggagcccattgtcagcccagagattccaggcccgaggagatggagggaaaggagggcgggcaagcccccggggggttggggaatcccctgatttcccggccctccgctctctgctaggcaggcaggggcctgaaggtctcatttgagccctgggtcctgccaaagtctagaaaccgttgagagaagaggatcccgggcgagttagagcggggaggctttccagccgcaggaagaccccagttctgggaaggggcggcccaagggaattcacgcacgccccagcctttggagcatcccttgccgaggctaaactgatcccgcggggagcgaggccgtggcgggaaaagaggggcatcctcggctgggcgggcctccgagggtcagggtcgaggttacccgctggagggcggggcggagaagaaagaaggttgccggtgaacgggacggataggctggggacgcccggggaacggcagagatctcggcgcgggagacagagtcccggcaaggggtcccgcgcggaggcgggggcgggcgctgaagggcggggcggggaggggcggccgtctcggccctccctggcggggccccgcggcctggaagccggagcgggccgagccgccaccgcggccggagctgtcccttagccagacccggcgagacacgagcggcgggagggaggcggtggcgcgcccggccccgcccgcccgaccaagcgtcggacgcggcccggcgccgagccatggtgagtccagcgtcgcagccccctgggtcccctcggccttcgcgcagcccgctccgggcccccaagtcctcag

SEQ ID NO: 11868 - DNA, 2300 bp, Homo sapien
atcagaaaagatcagctcgaatgcgcaccatcaaggcctcctcctcccttcccacaagttcctcttgtgacttttttctctttcaactgcccccacccgattctttgtaatccaatcccacatgctctaagattgggtgattgcttcagagccactgtgggagaaggaagagggatgctagaaagacccaagacagtcacagacagtctttccatcctcctctttccaccaaatgaccatctctagcatataaatgagcatctctctttcaccaaatgatcatctctgggacataattgtgggtgatggcacctccacctaagatggggagccctggatggtgggtcttatgggaagggatttgcaggatggctgtgtggaaatctccctcatcccctcgagttctcagccataagctcagtcccctgatagcccagaagcctgtcttttctctcctgggaaagatctatgcaatcaccccaactcacgagcacccggaacagccctgatcaggggcattcacaacaaattctccctggatctccaaagccaaggtctcagagcgggagtgttgagcgccctgccaggtttgtgcactctggcccagccccactcctgttctgggctcatcagccagcatttcctgagtgctcactttttgcccacattgtacaatcggggctttggagaacacagccaaccccagaccagtgcagctcccaaggagccatgattgggtgatctctagggatctgtagcctggtcctatctctacaggagcctgagccagtggaggactgtgtgcagagcactctcgccgccctgtatccaccctttgaggcaacagcccccaccctgttgggccaggtgttccaggtggtggagaggacttatcgggaggacgcactgaggtacacgctggacttcctggtaccagccaagcacctgcttgccaaggtccagcaggaagcctgtgtgagtggccgtgcatcactattctgccttccccaagatccactgccacactctacagactagccaggctgactaatgcccccactaacctagagatacagcctcccttgaaaccgatctctccagaatcacttaagcttcattctctgacctctcacaaactttgaccttcacaggcactgaccattcagatgctaacacacacacacacacacacattcatcttccccaaattcatcttgaccccaatactgacccccaaagaccctaactctccagacccaattccagacatcttctccccctcatatgaatttctcaagacactaactcccccgtacattagtcaacagagatcattcatttctacagatataaagactcctaagagtctttagcttctccaagacaatggcatctgctgaccatgtcttggtaacgattcagttcttaccctcccacacatggaactagcttcctgaagaatcttcctactactgggagaccgatcagtcccaatcccttcctctctgccacctgaataccccaaatctcccctcctgctctcctgagagtataaccttccaggcataaggctggtcctgcctagggtgggcccattctaactgccctctcctgctggtttcttcagcagaggcctgagtgcagcctcccacctctctccccaggcccaatacagtggattcctcttcttccatgaggggtggccgctctgcctgcatgaacaggtggtggtgcagctagcagccctaccctggcaactgctgcgcccaggagacttctatctgcaggtggtgccctcagctgcccaagcaccccgactagcactcaagtgtctggcccctgggggtgggcgggtgcaggaggttcctgtgcccaatgaggcttgtgcctacctattcacacctgagtggctacaaggcatcaacaaggaccggccaacaggtcgcctcagtacctgcctactgtctgcgccctctgggattcagcggctgccctgggctgagctcatctgtccacgatttgtgcacaaagagggcctcatggttggacatcagccaagtacactgcccccagaactgccctctggacctccagggcttcccagccctccacttcctgaggaggcgctgggtacccggagtcctggggatgggcacaatgcccctgtggaaggacctgagggcgagtatgtggagctgttagaggtgacgctgcccgtgagggggagcccaacagatgctgaaggctccccaggcctctccagagtccggacggtacccacccgcaagggcgctggaggg

SEQ ID NO: 11869 - DNA, 2300 bp, Homo sapien
aacatccttatgtgccatttactattacaaatgaggatttggaggatcagaaatgttaactgtcttggccaacatcggtcagtaaagagtcaggattcaaaccaaagcagtcagggttcagcccatgcttttgatccatgctgctatgcaacctctcatgtttgcatccctcagaggcacggaaggacagaattgaggggctcaacaagggaaatgattcattcttctctgctccttcccaaggctggagggccaaggcccagctacactgtatcaggaagtggacgaggccattcaccagcttgtgcgcctctccaacctgcacgtgcagcagcaagagcagcggcagtgcctgcggcgactccagcaggtgagccaggatccccacgtccctcttactcagcctgggagtgtggcctccagcacctttcccgttggtacttatagttgatggtgttcttctagcctggcttggttgaacgcccctccctcctcctcacatttgttggtcagtgtgagattgaacaagagggtgggagcatcatagcaccagtaaagaaaagccagatcttcccctccccactgtttacacttgatcgaaaatgctgagagattgtgagagatgctcagctgccctaggggattctgaagagctgatcaactctggagtgcctaccaccttagctgaaaaataataaaagtctattgataccagctcattagttatactgccacacacacacccttaactccttatgcgatgtcatccctcagacctgaggccggaaaggtcccacctccctctcccttggaaggagagagcattgaaagcacctaagaggaactacaggcttctttgtggggaagattcaggaataaggctggcttctctgaaccttgattcttctctcctggggttaagagccccatagggatttgctctccaccctaccatgtggggtagagggggctttgaaatctgattgttcctccttagccccgagcatggtgaatggacacttcatggacctgtacgtgggcatcaggggaaaggtcacctcagggccggtgcaaaagcgggggccaagactttctgtttcctaggatttcttcatattggcttcctctaagccaatatcctagagatgggttgcatctcctcctgtttgcttacctgcttgttagctgtttccccaactgtttaaaaacaagatttggagtctaacgtgctcagcttgagttctagttctgccatgtgtaagatgttggacaagtcatgaagctcctctgagttcccaagtcctcatctatagaatgcggatggtaacaattaactcacaacgtggtcagaaagatcaagtgaattcagcaaaggactataaaagtggttattgttggcactggctattaggaacagtctcagacttctcatcctcaggctgtcccacccccagcttccagcctttcttcagaggaaaatattaccatcccgttctggtcaaacatctcagaaccagcatgagagttcatatagcctcatattaggaaattaaagccggacacacacacacacacacacacacacacacacacacacacacacacacaccccttctgtactgtttctccaggcttggtccctgggaccgtttctcaccagttgccaaggcttggtgaaggccgtcagtcatccctatgaccctcatcctgcttttggttcaccccagtttgatgtacttcaccctcggacatagccctggaactttgacccactccctcagtgcttcccatcagcccagcttccctctcatctgccttaccaaagatttcttactcggtttctcatctgacccttgtggaaactattaccattcactgttgtcattcccacattgcagatgagatgcaatagttcactcaaagttctatagattggggtggtggggctgatgctggatctcagcccttccttgcctttccactccatgaccccctgccctcccaccccatctgcctcaggtgttgcagtggctctcgggcccaggggaggagcagctggcaagctttgctatgcctggggacaccttgtctgccctgcaggagacagagctgcgattccgtgctttcagcgctgaggtccaggtgagaaggggctggagggcaggtgagaggaggcagggggagactacctaggagtgaggaccaggtctgagcgcagcctcccttctccaggagcgcctggcccaggcacgggaggccctggctctggaggagaatgccacctcccagaaggtgctgga

SEQ ID NO: 11870 - DNA, 2300 bp, Homo sapien
acacacacacacacacacacacacacacacacacacacacacaccccttctgtactgtttctccaggcttggtccctgggaccgtttctcaccagttgccaaggcttggtgaaggccgtcagtcatccctatgaccctcatcctgcttttggttcaccccagtttgatgtacttcaccctcggacatagccctggaactttgacccactccctcagtgcttcccatcagcccagcttccctctcatctgccttaccaaagatttcttactcggtttctcatctgacccttgtggaaactattaccattcactgttgtcattcccacattgcagatgagatgcaatagttcactcaaagttctatagattggggtggtggggctgatgctggatctcagcccttccttgcctttccactccatgaccccctgccctcccaccccatctgcctcaggtgttgcagtggctctcgggcccaggggaggagcagctggcaagctttgctatgcctggggacaccttgtctgccctgcaggagacagagctgcgattccgtgctttcagcgctgaggtccaggtgagaaggggctggagggcaggtgagaggaggcagggggagactacctaggagtgaggaccaggtctgagcgcagcctcccttctccaggagcgcctggcccaggcacgggaggccctggctctggaggagaatgccacctcccagaaggtgctggatatctttgaacagcggctggagcaggttgagagtggcctccatcgggccctgcggctacagcgcttcttccagcaggtgcatgcagagccttttccttctgtgcccccccatttccatttattcacttcctttctgcctggagaggctaatcaagttgttaaaagtggaggctgaggggcccatctcctaggtttttgctcttagctctgccacctccttgctgaatggcatggggcaagatactaaacctgactgtgcctccatagatctacctcacagggctgctgtggggattacacgaggcaatacataaaagcccttagcacagagcctgccactcataaatgtcgtatgagtaccggttattcttttatataggctcttccatctccataccaactccgagtgacatggttaggcagtgatggtggaacagtgagaaaacaggagagtgacgggcattgggaggccacaggcaagaggacaagggctgtcactgggcatccttcgtgagcaacacaggcccttaccctttctctcccatccccaacccctttgacttcgtaggcacatgaatgggtggatgagggctttgctcggctggcaggagctgggccgggtcgggaggctgtgctggctgcactggccctgcggcgggccccagagcccagtgccggcaccttccaggagatgcgggccctggccctggacctgggcagcccagcagccctgcgagaatggggccgctgccaggcccgctgccaagagctagagaggaggatccagcaacacgtgggagaggaggcgagcccacggggctaccgacgacggcgggcagacggtgccagcagtggaggggcccagtgggggccccgcagcccctcgcccagcctcagctccttgctgctccccagcagccctgggccacggccagccccatcccattgctccctggccccatgtggagaggactatgaggaagagggccctgagctggctccagaagcagagggcaggcccccaagagctgtgctgatccgaggcctggaggtcaccagcactgaggtggtagacaggacgtgctcaccacgggaacacgtgctgctgggccgggctagggggccagacggaccctggggagtaggcaccccccggatggagcgcaagcgaagcatcaggtgagatcccagcccaactggtgctaagaggcggagccaactgcccagtaggaaaagaagatgacattgttgggggtactggctccctcccacacctcctctgccactcctattgtgcctgcagtgcccagcagcggctggtgtctgagctgattgcctgtgaacaagattacgtggccaccttgagtgagccagtgccaccccctgggcctgagctgacgcctgaacttcggggcacctgggctgctgccctgagtgcccgggaaaggcttcgcagcttccaccggacacactttctgcgggagcttcagggctgcgccacccaccccctacgcattggggcctgcttccttcgccacgtgagtgatcccctcaacttcttccaa

SEQ ID NO: 11871 - DNA, 2300 bp, Homo sapien
ccgtgctttcagcgctgaggtccaggtgagaaggggctggagggcaggtgagaggaggcagggggagactacctaggagtgaggaccaggtctgagcgcagcctcccttctccaggagcgcctggcccaggcacgggaggccctggctctggaggagaatgccacctcccagaaggtgctggatatctttgaacagcggctggagcaggttgagagtggcctccatcgggccctgcggctacagcgcttcttccagcaggtgcatgcagagccttttccttctgtgcccccccatttccatttattcacttcctttctgcctggagaggctaatcaagttgttaaaagtggaggctgaggggcccatctcctaggtttttgctcttagctctgccacctccttgctgaatggcatggggcaagatactaaacctgactgtgcctccatagatctacctcacagggctgctgtggggattacacgaggcaatacataaaagcccttagcacagagcctgccactcataaatgtcgtatgagtaccggttattcttttatataggctcttccatctccataccaactccgagtgacatggttaggcagtgatggtggaacagtgagaaaacaggagagtgacgggcattgggaggccacaggcaagaggacaagggctgtcactgggcatccttcgtgagcaacacaggcccttaccctttctctcccatccccaacccctttgacttcgtaggcacatgaatgggtggatgagggctttgctcggctggcaggagctgggccgggtcgggaggctgtgctggctgcactggccctgcggcgggccccagagcccagtgccggcaccttccaggagatgcgggccctggccctggacctgggcagcccagcagccctgcgagaatggggccgctgccaggcccgctgccaagagctagagaggaggatccagcaacacgtgggagaggaggcgagcccacggggctaccgacgacggcgggcagacggtgccagcagtggaggggcccagtgggggccccgcagcccctcgcccagcctcagctccttgctgctccccagcagccctgggccacggccagccccatcccattgctccctggccccatgtggagaggactatgaggaagagggccctgagctggctccagaagcagagggcaggcccccaagagctgtgctgatccgaggcctggaggtcaccagcactgaggtggtagacaggacgtgctcaccacgggaacacgtgctgctgggccgggctagggggccagacggaccctggggagtaggcaccccccggatggagcgcaagcgaagcatcaggtgagatcccagcccaactggtgctaagaggcggagccaactgcccagtaggaaaagaagatgacattgttgggggtactggctccctcccacacctcctctgccactcctattgtgcctgcagtgcccagcagcggctggtgtctgagctgattgcctgtgaacaagattacgtggccaccttgagtgagccagtgccaccccctgggcctgagctgacgcctgaacttcggggcacctgggctgctgccctgagtgcccgggaaaggcttcgcagcttccaccggacacactttctgcgggagcttcagggctgcgccacccaccccctacgcattggggcctgcttccttcgccacgtgagtgatcccctcaacttcttccaagtgctctcccttctctgttccagcctcatccatctgtccctctttctcagtacccacggccctctcctcccatgtgtggtccatgaccttggggcccagccctgttctgtgggcacttctgcctctactcagcctctgcgccctgctctcaagagctgcctggactatgctctctccacagggagcccttccctccctggtaggctgagtgctccctggtgacccatccctcatttgggctacagagaggatagagagggggaagagagaggcttgtctgcagcggcctcaccggggactccttatctgttctttactggcacagggggaccagttcagcctttatgcacagtacgtgaagcaccgacacaaactggagaatggtctggctgcgctcagtcccttaagcaaggtaactttttctccaaccttcaggagaaaagtagagaggccagaaagacctaaaaacccacccaacaaatccctcagggcaaaaaactggatatgcccaggaacatcacctaccaatcatctcctagaattgccgagggt

SEQ ID NO: 11872 - DNA, 2300 bp, Homo sapien
aagtaatgcttgcatctttttctttctcagtaacccatttcagttttgtgatgcctattgtaaggaagttctttatatctcaaatatcctttcttagacaaaaaaaaaaaaaaaaaaaggttagacccacattcatttagccttgaccagatactattctatatgaggcagaaaggtagactagatgacttctggtcatcctcccaggtctgtttccatgaatcttgattctggggtttcttctaagtcctcatgctaaactcctctgcagcttaggatcagcacccgcccccccccccaacccctatcctcttcctctcaatgatcttctccttccccagcactggagctctgcaagtcccaggcctagggaattttagcctggagaattttaaccctttcctgctcagagcatgtgctgagtccctatctgtgcagatggcccagccccgccccccgtccctcactccagcctcttgagctcagagccagtgtaatcctcctcttgtgtgagggagcctctcccctgcagagaggaggaaagcctgcctcggaacagccctggacaaaggggctcagatgccccatcatactgcaggctccaaggtttgaaacaaggggatgaatcctatacggtatttgcagtttttagccccttccccaggctagctgtgccccttaacttccactcctcccccaactctctcttcattccctctccctctggctccctcccccttcatgcccctccccctctgtctgtcttcagactctgctgctgggaggtgtttctctcccatgcatgaatgagtctctgtaatgaatggaaatgaatggatcaggaatccaggcggagggagggagaatgaggggggaaagacagaaagacagggtaagggcagaaggaagcactgtggaacctggaaggatgtttggctggctgctcagttagggatctcagagcaactggtcccacttggataaatggggagcatggcaagcccacctcatttgctcaccacactgcatagcccaacctacatgggagaggggcatattgtgatggtcttccccaccgccagggggtggggtggtagctgtggttgttctggaccatgcatttaaaatatagaatttggggaagaaatctggattatctgggaggcttgtaggcttggcaagtcaagaggtacagtttttgagtatagcagccccttcgtgcctcaagaagcaagtagggagaatggattggttttgggaatacagaatgctgagagtctgggggtagggagtgactttactgctgaaaactagggctcatcttttcctccaaatctgtctcttgctttagctccacagcacctgttgccttcattagcagcttttcctcctcttccctgcacttcccagaaccaaagaatgtgaagggggtccatggaggtgagtgaagctctggcttcaacctacaagtacctacaactgtatactccctctcctgcctacctctctctctctttgacctcccattattagaagttaactccttggccctgacatctcgattcccatacacctccccccaccccatcttcccgaggtgagtagcaccctgtgttcctagttcaggccccagcccaccttccctcgtgttgtccttctggccctcgaggcgacgcccttgcttcctttacagctctaccttcaccctttgctctacgcagatctttctccacagggctcacgtccccgcgccccgagcggccacttagcgccgtcgccgccggctttcgacggcgagctggatctgcagcgatactccaacgggccagccgtgagcgcagggtcgctcgggatgggagcggtgagctggtctgagagtcgtgcaggcgaacggcgcttcccctgccctgtatgcgggaagcgcttccgcttcaactctatccttgctttgcacctgcgggcgcacccaggagcccaggccttccagtgccctcactgcggccaccgcgcggcgcagcgggctctgctgcgctcgcacctgcgcacacaccagcccgagcgcccacgtagtcctgctgcacgcctgttgctggagttggaagagcgcgcgctactacgcgaggcccgactggggagagcccgaagctcagggggcatgcaggccacccctgccactgagggtctggcgcggccccaggctccttcatcgtccgccttccgttgcccctactgcaaaggcaagtttcgcacctcggcggagcgcgaacgccacctgcacatcctgcataggccctggaagt

SEQ ID NO: 11873 - DNA, 2300 bp, Homo sapien
tttctgtgttgtatctgcgatgctaaaatggcaaacagcccctctagcacctcatagctctatctatggtactgaggtggcccaagtggcttctgtggtagcccactgcactctccatggtactgaagggatgaccatttgttttaacatctctctggggtccaaaagagtcctgtgacttagaatcacaaacttttttcgagcaggaagggactaacactataaattagtccaatccccttattttactgatgagtaaactgggaggttaagtgatttagtaaaggttgtagggttatcaatgttcagactaggcctacaatagccttgtacccttcagtcctattctaattcaccttttgtgacactattcagtaagcctggctaggctcttagtcccaggaaaggatccagaggatgagagtgggtgccctaatttgaagctacagaaatacacatattaagtggtagtggaggtcgtctagtgacccttggacaaggacactttgttaattaatcatctgctaataataatcctatagcccagattccacatgtaacaggtacctgccccttcatggagttttaccacatccactaaatgtcaaaaattaaagaagccttggacctccagagccttttctctctgctgacaggcaggttgactcctggcacagttcttttctattaaagatccttaggcaaagtaatgcttgcatctttttctttctcagtaacccatttcagttttgtgatgcctattgtaaggaagttctttatatctcaaatatcctttcttagacaaaaaaaaaaaaaaaaaaaggttagacccacattcatttagccttgaccagatactattctatatgaggcagaaaggtagactagatgacttctggtcatcctcccaggtctgtttccatgaatcttgattctggggtttcttctaagtcctcatgctaaactcctctgcagcttaggatcagcacccgcccccccccccaacccctatcctcttcctctcaatgatcttctccttccccagcactggagctctgcaagtcccaggcctagggaattttagcctggagaattttaaccctttcctgctcagagcatgtgctgagtccctatctgtgcagatggcccagccccgccccccgtccctcactccagcctcttgagctcagagccagtgtaatcctcctcttgtgtgagggagcctctcccctgcagagaggaggaaagcctgcctcggaacagccctggacaaaggggctcagatgccccatcatactgcaggctccaaggtttgaaacaaggggatgaatcctatacggtatttgcagtttttagccccttccccaggctagctgtgccccttaacttccactcctcccccaactctctcttcattccctctccctctggctccctcccccttcatgcccctccccctctgtctgtcttcagactctgctgctgggaggtgtttctctcccatgcatgaatgagtctctgtaatgaatggaaatgaatggatcaggaatccaggcggagggagggagaatgaggggggaaagacagaaagacagggtaagggcagaaggaagcactgtggaacctggaaggatgtttggctggctgctcagttagggatctcagagcaactggtcccacttggataaatggggagcatggcaagcccacctcatttgctcaccacactgcatagcccaacctacatgggagaggggcatattgtgatggtcttccccaccgccagggggtggggtggtagctgtggttgttctggaccatgcatttaaaatatagaatttggggaagaaatctggattatctgggaggcttgtaggcttggcaagtcaagaggtacagtttttgagtatagcagccccttcgtgcctcaagaagcaagtagggagaatggattggttttgggaatacagaatgctgagagtctgggggtagggagtgactttactgctgaaaactagggctcatcttttcctccaaatctgtctcttgctttagctccacagcacctgttgccttcattagcagcttttcctcctcttccctgcacttcccagaaccaaagaatgtgaagggggtccatggaggtgagtgaagctctggcttcaacctacaagtacctacaactgtatactccctctcctgcctacctctctctctctttgacctcccattattagaagttaactccttggccctgacatctcgattcccatacacctccccccaccccatcttcccga

SEQ ID NO: 11874 - DNA, 2300 bp, Homo sapien
ctttgcccccagaccaggtaaggttgaattccaggggctttcttgcctctcactttctggacagtctcccttccttctttcttgaaggttttactctgaactgaacactgactcaatggatgggggggaccctgtttatggtggggattgtttttgattcaatgataacctgcaactggacattatctatctatctatctatctatctcatggtcctcaaatagtgagtcttgggaaggatgctattgcaacaattaatatttttgagagagaaggtgcctcatagccagacagacctgagctggaatcttagctctgctgcttctccatctgtgtgatcttggatacattattattattattattattatattattgagacaggggctcactgtcacccaggctggagtgcagtggcatgatcatggctcactgtagccaacaccttctgggcacaaataatcatcctgcctcagtctcccaagtagctgggatcacaggcacatgccaccatgcctggctaatttttaaattttttgtagagacagggtcgtctcacaatgttgcctaagctggtctcaaactcctgggctcaagccatcctccctgcttggcctcccaaactgctgggattacaggtgtgggccactgtgtctgtcctgatagatatgtttttctacctattcgcacctcagtttattcactgataaaagggggctaacaatatgactgtgaagagttgttgattcagggtgggtgtttaataactattagtggtgctgatgaggtcacaccgataagtctgatgcccatacactaaaagtgttattcagaaggaagctggggacacatttctacagtcggaagcagaaccagctgggcccaaatatactctatagatcaaaacaaatcccagatctacctaggtgcccttggcaagttgcttaatctctctgttcccttatctataaaaggaagttaataataccagtctcaaggggttgctttcagcatggaagagagcttagcccagtacctggtacacaagtgctcaatgttagtggctatgatcatcatcactattattatttcttgttgttgacgataagaggagactgcgccagaagactctagaagttagtacgaggagggaggcagggtcctgggaggcaagtgatcttttgtaagccactcctgccccatcagtgctgtgccaacatcggcgggtcattgtatctactcttttctttcccggggagtgggagtcacgttttaaagagatccagaaaactgctgtgtgtctactcctcctcaattcccacgtgcattgattttatttggtggcgatgtgagatgttgggcttgcactgaggatccccgagcctgcaggccactggggaaacagacttcctgaagcctcatttttcttacttgtaaatgggggctaatttaattatagagggttattggaaagattatatactattagataggtgaacaggcattcagtaaatattgactaaatctgagtatactacttaccagtttgtagtctagactacaatcgcctggaaggaaggtaccacttctttctcatccctcacagcgctgagcccagtgcctggcacttagtaagcactcagtaaatatttgttgtattgaagagccattaaagtgacttgaggaatggaaaatagaattcgagaggaaggcgcaggaattgtttatcaagaacggaaaggaccgaagagtaactttaataatgtttcttatacggccgacattaactatctctataatcgcccctcctcctcccccaaaagagagacagaaattgtaagggagaggctttgagataaaaccccaggaagaacttcccgagtctgtgcatgttggggcagaaagagcggcagagccaactccttccctggtatgtccgggtttagggagggaggggcagtgctgcttggaggctgggggaaggacgagatgacctttcaaaatctcttccagtctcctgttggaatcctctgtgcgccccacccccgctccctcccttcctccctccctccgacagcgccccccgtctccaaaccgcccgcaccccgcccctggcggccgcctctcgcggctcccggggtccccagctccctgtccccggagccagagcccggctcccgcgcggctcccagccccgccgcgccgccccccgcatgctaatggccgggccgcctcccgccgcacacaatgcgggccagggccgggggcgggggaccggggagggggcgggggccgggccg

SEQ ID NO: 11875 - DNA, 2300 bp, Homo sapien
aaacctctctgaactacattttgtgcacttggaggttatggtaatatttattctgtctaccttactggagtatcaaggctaaaataaaatcacacaaggaaaagtactttaaaactataaaccacttcaggggttaaaaataaattgcctgtagaggtaagaagtagtttaaatgataatttcttaaaactcaagagccagttcagctatagttcttcaatcatcagtctgcattagataaacatagtaggaattcaggttttggatatatgttacagttcatgtagaccttgcaaagtccaagagtcttcgattaaatattaaattcttaaaacctttctgataaaacctttttcatcatatccctctagggcattggttctcagagaaaggtcatttcgttccccagaggatattttgcaaggtctggagacatatttgttagtcacaactgaggagtgggggaggagggaatatgtaacaatggaaggcgcagtagatgagaagtcagatttgggatttagttccagtgctgctaatgccgctttcctgtgcattatcctctgccagctgcaagcaaagactattggagacttgtcctgtgttcctcattattccccctccacactgcctattgccacagtcccgggctgctccatgacagcgttctgctttgctgcagtgattcccagcaaccactgtatctgcctctttcttcatcagtttggcagcctctgtggaggtcactcattttacttgaatgggaacttcactgaaagaagaaactgacaaggtttctgctgacgtcagtttttaaaggccgtgacccctatctattcttttaaacattaaagaaatccagttcatgatatgtggcttcatatgcagctgtggcacattggtggtcgggaaattctccatgtgaatacattttaccctcatttctttgaaattctgtcatttattctggcttttaatacgtgatcatagacaactgacagtatttcacaaatgaactcttttccgtttctgaatctgccttttggcaagatggctcaggttttgtgtccagggctgtgtcctctgctgccatctcgtggcctcttggctgcccaggttgaggtctcacaaagtgcctttcctaaggtaatggcatttggcagtggcttagttggggaaagactctcctctccatggtgtggggcgctccccaagttcctcctctgcaatgggcccctgagggcagcagcacactcggcctggctggaaacctgggcctcacaatgaggcaggaggcggagggcccctcctggtcttctgcaaacccttgggcctctgtgtctgttatgcagtcctggccaggagccaccaaattcagtgaacccaactacccaggggtaattgaagctgaccgcgcctgcctggcctgaagaatgcagtctcttgccccttgccacctgggactgggatgctcttaatttcagtaagaaatgaagagtctcccaacaggtttctggattctaggcccacacaaaatgggtctagacaagaaaacagaagggtgtgttgctctgcgtccacacccttcatcctggcgggcccagccagtgctgcctcaaatttgacatttgattaatgggctggcgggacagtggcagtggtgttctcactgagtcactgtgtttcctataaatatgacaggatctatgtactacagtgatcagaggtccatctccagggaactgggaatgtgagatactgccctgacctgggctgctgctgctggtgactaagcagtgagcacaggagggaaggcaggaaaatgtttttagttgctatttttttcattgtgataacatgtgtgtatacacacacacacacacacacacacatatgtatatatatataactatatatatacctatatagttaaaatcttcccattgctaacaaattcatacaactttcccctagttgttagccccctctcctgactccacccagctcccataacccctaatcccagccttctcaaaaaaaaaggaggaggaagagaggaggaggggaaggagaaaggaaaggaggaggaggtggaagaagaagaagactgcttttggtgtttgctttaacctgatgtccccattataataattcagaaggaaaggcctgctcatataatttcctacggcctcaggccagagacagccatacttacaggtaaattgctactaggctggcttctccttaaaattcaggtgccatttactatcatcttctgtttcttttatgtttttccttgt

SEQ ID NO: 11876 - DNA, 2300 bp, Homo sapien
aaggacacgggtttcaagaaacggtggctgggtggctggccaataagtttagtagagggatgactgtatatgtcagaattaagtgcagtaagaggatgtgtgagtggtatgttttcatcaaagaactgaaggcagctaaaagggccaaggtgtaccctcattaaagtctaggccccagagtaaagaaggcacccaaagagtcatctggtggttagggagggggaaaattccttgttatcaacgcatgttacagtgagctgttaaagctatagtactgtcagtaacacttcgtggcgatggaagtgttttatgatgcattgaccagtataacaactggtgactttactgagccttgagatgtggctagtgtgaagagttagatttaaatttttatttagagacgtgtgacgtgagactactttattggatagttaagtgctgtagaatattgagaagtttccacacaagtactgctagtggttactaactcaaacgtacatgaacaaatgtgactccaatattttgtgtgtcctgagttcattgatgttttctttcctagaccttaggctttaatattgaagatttccctagtgagggcgtcttcaatgggacgatattgcaggcttaatccatgttgctcacaccttcatatagcagtgcctcttacagaataaactattgttaaataggaacccatcttgtcaatcagttgcttcatgcccagggaagagagtatgttttataggctttgtgtgcagcctgttaggccagcgtttaattgacatagactgttgtttctcaaacaacagttctattacgtacgtatgcaaataatttctgtgcttcaaggagcttcagagagattgccttgttcaaagccctatggttattcaaatggtagagccaaaaatttgatctatgttctgacttaactccatgggctttggaccttggcagaggaaatggtgtctttgaactgtagtctgtagtcctagaaattgaataaactatttcctaaatagaggtaagagactaggatcctagcaacttctctaagttaacaaaaggggaaaaatatccccataccatttttctcttcattctattaatgagggctagagtcgtttcatagattgaatagtttcaagagcatattgagcagtgcctggctaacagctgaaagtctgccatttcatgcaactttgttaggctttagaagtgaagcaggaatatagagaaaatacagcttctcccacccacaacgtgtattttaaaccatttcttctggcccagaagacaaacttttccaaatatcttgggaaaaccacagtttctactctttggagacaagagtctcactctcacacccaggctggagtgcagtctcaactcactgcaacccctgctctcaggttcaagtggttctcctgcctcagcctcgtgagtagcactcgacaccacacctggctaatttttttgtgttttttgtagagatggggtttcgcgtgttggtcaggctggtcttgatctctggccacctcagccttccaaagtgctggtattacaggtgtgagccactgtgtctagccaagtttctactcttgatgcctgccatggactattacaagcacctggcagtgacattgcacgagttctaaagaaagacttggtctttcccacagggacattaatgtgaaagaggtccagtgacaaagattcagtcacttttgcagaccctcacaagccacaataatgaagttgcagtgaatttgggacatagccttccctccccaaaattcttgatccaagaatccacccgtcaagttcaatgactcagactccatttctagtgtggtcgttggttaacaactttactagtttccatccaggcttaacctttctatggaccataatgtcttggtgtctgctgcatttattgtccctccctgttttaaggatacttaagtttttaaagaggcataaatacttcaaagtccccattggccctcctgggggaaattacctcaaaccacagggtagtctgctaaataaccagctagagctagctgccagcccaactttgcccagatctacaatattattctcgttactttagtttactcatccccccaaacttagctttcccccagaactttatatccactctccataaaagcttctgtagcaccagcttggtcagtcccaaggtcccaggtgccactggggtctggttgacaaaattgttggtatggtttggctgtttctccacccaaatctcatctgtaattgtaatcctcata

SEQ ID NO: 11877 - DNA, 2300 bp, Homo sapien
tctaggaaagcaggtattgaatgaagctgtggagagcgctttttaatattaggttggtgcaaaagtaattgtggcttttgccattacttttaattagctgcagttacttttgcaaatagccgtagagcatgatcacagattgaaaatctatacacacatatggtagggttgttggaatactgacatgtctagtttgtgttgatggggaagtcatttcacgctcttggttttaggctacgctactgtggcttaaatttcctcgtgtttaagacaacagtactctaggttttctataatcacaggtgtactcattgagtactttgacatttaggttcctaggccaaaactgtagcaaagtaaagagaccaggattgaaataccacatggtaaaaggcttttaaaaatctgatctaatgcagataagtacaggctttttgggaaaggggctagtgtttttaaaggccatttatcagatgatatgcttatagtcagtgtgacattacttaaccctgggccctgcaaagtaagaattgagttggctcaatagaaattcagaatagtaggcatggcagtgcaggtaaaggggttagatctgacggtaataattgagtgatttctgatttaataattgagggatttcagattgatagtctgattacactgcagtagtggaagtaagatttaaaagtaaaaacattttaatttgggataaaattcagaacacaagtttctcaatatgccatgaaatctaagaaaatgtcctgcaatcattcaagaatgcagttttcatttcagggttagaaagcaggagaggaggtagataaaaaatccttagtaacatttttttctggtgctgcataacgtataattgggaaacttcttctagggtaattaataaattgctgctgtctcagtgggatgagctaactggaagctgtcaggtgggaatggatgctaaatttgggattctcaaaaggagggctcctcttgtatttcacttctgatgttaatattaccccaacatgcaaagattgtgtgattagtacctattacttacgtggtttaaatcctctttttcagagggaaccgggtgtaatagaaaaggaaaataatgtaaatgggaacaaaaaggtggtaaattggaaggaaatgaacaggtgtcaaattaggattgggaagaatgtaatagtacaatagacgtaaccatcatttaaaccataagataaccatgaagtgtgaacatacgaatctactataacttggcagtatgttttattcaagtgttaggggaagcaaaacccagtgtataatatagaaagtacagaagtagagcagatgatacactatatgcaagtactagtgttttgagataaccttgatgaaacaatgtgcttttgaaagtagtcgcaggatagagaaattgtgtatatttaatgtgatcagctcaggaacatatgcctggcctgtcagcattgactgaccaattttatttcaggggaaaaccagaaaacatacttattcctactgacagttgacctttttatttattaggggaattcagctacactgatgtcaaatggagtttcagtttctggaccctagttcacatcacattgaccaaaaaaatgcatttcataggaatttagaagcatccaagaaaaagtaccctgaccagaaaaccagtcgacagtagtaaacatatgatgtagaaatgattgaccagtaaatgagttacatataatatgtggattatggtctgagtacctcattcacactaagaaggagcactctgttggagaattctagtgtttggagagaacttggtataaagtaaaaatgtagccagttgaactgcagagtaaaagaacgtagacatacctgaccagacaaaagctttccaagtgttaggagacaggaagtaaataaagtagaaaactgcagaatttgtgtttgcattagtaactttcaagttaaatctcaattttgaaaagcagggcttcttcattggagttaacgccctttgtgagtagaactacaaagcatagtaagaggaaggggagaacagtgtaagggggtgaatgcaaatgacaaagggattagtaggaaggagttagaacccaagataaatgcagataggaagaggaaagcatgtttggattgtttttttcaagtggcactcagaaataaaagtttggagaaacatggctctgaagctctgacaaatttgcatttgcaaaaataactcctacaagactttcagaagtctaggaaaattgtggcttttggattattacattacc

SEQ ID NO: 11878 - DNA, 2300 bp, Homo sapien
tataagcggcattttctgctatgctggaaaaactgaagtataaaacacaaatgaactaagcctttcaaggatgaggtatcaccaacactggtagctgtttaatatattcatcttacaactggatgctaaaaatgcaatcactgtaattaataaagttgaggaaaacacaaagattagctaacaggggtaaaagatcatttagagtaaaataaatgtgtaacattctctatgttctcaatcacctgggaaggcagtctatggaatatcaggaagtaagagttttcttgttttcaggaacatggaggtatatacacttcagaattcagaaggtaactggggctataaatagtaattaaaagaacaaaatagaagcaggggggttccattatgcagctgtcgccattttcctgaaatcttgatgtttttgagcctctcctatttaaggacaaaaccatttagcacaaaacacaaacctcagaaagggtgccagctggaccacaaagcactgatgaaaaggcagagaggatatacttcccaaactttcattaggatgtaaaagccattttgaaaaagtctccactctatgtcaagttgactcctcaatgcaacatgcatctcaatgaaatataatttgagtagtgttgtgttggtatgcatcatgattatgactccaagaaaaatatatctagtgcattctagaggttttgtggaggacgctgtaaaacaaagtttgaagtaaacaataataaaatacaaaaataaaaaaccagggttttttttttctccaaattcctggtttaataaggacttgtttattttgaggaaaaaaggtcccaaacatcaggctgttcacaaaaataacccacagtatcaactttagaaaacaaatcttaagactataacactaattatttttctagaggatgcatttgacatgccaactctcattcacaaaaatacattgttacatttgtgttgaactgccccacacagcacactaatgtgagggtgtaacacacatacttctaactcaaagctgctttcaagagctactcaactaaatgagattgcctttgcagttagggaagcaactactgaacttatgtatgaatgaaaagaactgtactccctgcataacaagagattattttggagacagttgataaaaaccatacatcctttttattgttaagtcataaagaggtatcaaaattaaaagcaaaaattacagggtaagacttaacaaaactactaggagcgtcaaaggaagtgaaaatgggactaggcgcggggcaatatgaattaatgaacatgggaaggacaaggatggggagaacagtgagcatgtgctgaagatactaggggagaggatctggtgaaaaatttgatcttagacaagcgcctaggtaaagaaataatgggataagatttctaaaccccactatgtgcttaagagtcatcctcgccattggcgctgtctctgtcatcctctccttcctcagcctctttttcatcatccttgatcaactccagctgtgagaaacagacacaaacaggatggagttagaggcactccatgtgtccctgagcccccctccaccacctttttctttcctttcccgtggttttcacctggtcatccccccgatcttcattatcatcatcatccagtaggtccccctcctcagcagagtcatctgcacccccctcagactccatcttcacattagtctcatctttcttcacggagctgctgctctgctcctcttctgacttatcattcttcatctctactgcggatgagaaggacaagtctgtctaggggcagtaatgtccacaggacgtagacaatccccactaaggatcacagaactgcagcacaaatctaaatcctcccacacaaatacccttcccaattcacactccccaagtttcatattacattgctttatattccactattccaacatgtactttcaagtgccttatgtaactaacccaactgtataccaagggcaagcagaaaacccatttacctgcttgtttgctctgttccttttcaattttttccaggttttccaggagagaatccactttttgttttatctgggtcagctccttcttaatggcctgaaggtcatctcctttcactttaatataaacaaaatactagattaaaatcaaatgtaccgaagatatgagttagcaaatacactgccaccagactacatcaggagctcacaggagatacccagggagaaacagagccagtacagatttctcggtaataaaggcccttg

SEQ ID NO: 11879 - DNA, 2300 bp, Homo sapien
ttcatattggctagggggaaaagttgaagaaggatggccaggttgcaggttttctgaccttttttttccccctcatgctagtgccactctcgggaatacttggtggttgatgttccttctgtagagaatttaaacagcttacgtttgtaattaaatctctagaggatttgacatggcattcgaccttgttttggatggaatggctgtgcgaaacaagcaaagaataaactccaaaatagctagttgctctaattttaaagactaaggggcaaattattaaatcttaataaagtgttgaatgtgagaggtgttggctggggagtaagtttgcctaggagttaggagaaatagattttaatcctccttaggcaaataaggggacttagacttttttttaaaacctatttgaatttttagtttctaattcaaattttttgttgccagaagcctaaaaactgtacagattgagttttattaaaagcagttttgttttttttttttttttttttttttttttttttgagacggagtctcgctctgtcgccctaggctggagtgcatgtcgtggcacaatctcggttcactgcaacctccgcctcccgggttcaagcgattctcctgcctcggcttcccgagtagctgggattacaggcgtgtgccaccgcaccgggctaatttttatatttttagtagagacggggtttcaccgtgttggccaggctggtctcgaactcctgagctcagggagtcctcctgccttggcctcccaaggtgctggtattacaggcgtgagccaccgcacccggccccggttttctaaattggtagttattattactattcttaaccacattatttcagtcttcaagtactttattagtagttgtctctggggagcattatttgctcttaatatgcatattcatgtattctcattggaaatgggaaggttttggttttgtgcatactagatttactagaggattggtgagaaccagaactttgaggtgtagcataactacaggtattctcgatattggaaattttgagtttattaacataaaaggaaaaaaggtttctttggtacatttactatcataggttatgtgtttttggatttatttatattgtatcaggaaaacattatttggtgctctaacttgattctgtcacagtacactggaaggtcaggcattttgtttaaagaattgattctaaggccgggtgtggctgctcatgcctgtaatcccagcactttgggaggctgaggcgggtggatcacgaggtcaggagtttgagaccagcctggccaacatggtgaaacccccatctctactgaaaataaaattagcttggcgtgctggcgctcgcctgtagtcccagctactcgggaggctgaggcaggagaatcgcttgaacctgggaggtggaggttgcagtgagccatcgcaccactgcactccagcctgggcgacagagtgagaccccatctcaaaaaaatgataataattgattctaaactggggaatagagagattcccaatttaaaatcttcacagtggttctcaaacgttagccaacaccagaatcaatagggctagttaaaacagattgctatgatctctaccacaagggtttctaattaagtaagtctggggtgggccctgagagtttgcacttctagtaagttccaggtgatgatgctcatgcatcactcattctgagaggtgcccctttagaagaagggatccaaacctcaggcaggttttgacaaagaataacctagagatactttttttctaaaactatctctgagctttaggtaaggatactttttttctttgagagcctcacactgtcacccagattagagtgcagtagtgtcatctcagctcactgcaccctctgcctcccgggctcaaggggtgccctcagcctgctgagtagtgctgctaattttttgtatttttggtagaggcagggtttcgccatgttgccaggctggccttgaattcctgagctcaggtgatccacccgccccaagcctcccagagtgctgggattacaggtgtgagccacgccgcctggcctcaaggaatattcttgattgaaaatggtgctaaagttggtctttttatgagtggtagctcttcagtttaacataaataacatcttgggagatactgagctttttgatattgaaagatagaattggtttcttttcacatttttctttatttttaagcttatgtcttgtggcacctgtacaaaggacttggttgtggttgagctataaagtt

SEQ ID NO: 11880 - DNA, 2300 bp, Homo sapien
ttgcttgcgactgggtggttgaagctgtaatcatccgggattatgccaatgcactacagcctgggcaacagaacaagacctcatctcaaaagaaagagagagaaaaaaaggacagtctatctgcttgtcctggaaaaataaaaatttcccctgataaataaaagttaatggttaatattttattaatttattaataggtagtaaacaaggaaaatatattgaagagtaagaattaaactctgccatcaaaaaatcttaccatccaggaagggagaggagtgtaaaactacccacagtgctacgagataattttaaataaattgcaatgtggcaattgagtcgaggctttaagcactcgtaggatattctccctctgattacttgctcaaagtagatgatttggaaaatatagaaaagtacaataagattttaaggctgggcgcggtgggtcacgcctgtaatcccagcacttaggaaggctgaggcgggcggatcacgaggtcaagagatggagaccatcctggccaacatggtgaaaccccgtctctactaaaaatacaaaaattagctgggcgtggtggcacgcacctgtagttccagctactcgggaggctgaggcaggagaatcgcttgaacctaggaggcggaggttgcagtgagccaagatggcgccactacactccaggctggtgacaaagcgagactccgtttgaaaaaaaaaaagttaaaaaaaaaaatcacatgtaattttcccaccaggagagaaccactactaacactttagtgtatactttctcccatatttttcgtctttgctttttaaaatagtttaaagtggtctggcgtggtggctcacgcctataatcttatcactttgggaggcagaggcgggcggatcacctgaacagtctggccaacatggcgaaaccccatctgtactaaaaatacaaaaattagctggacatggtggcgcgcacctgtagttccagctactcaggaggctgaggcaggaaaatcgcttgaacccgggaggcggaggttgcagtgagccaagatcgcgccactgcactccagcctgggcgacagtgactctgcctcaaaaaaaaaaaaaaaaaaaaaaaaaaaagaaaagaaaaaagaaaccgctggcttagtagagctgatgctaccccactgcgtgcgcagttcctataatgtaaccagagagactggcaggtgacgggggtaggtaggagacaagccatttcaagaggagggaaattaagggaccagatttggaaggatgggccaattttgctggcacttaagatattagatgccctggggccagaggccaggattctgcacttcctttttatattggagaggaataaggaagtcagttggtttcgatggaacatgtgttgtctgaagaagggtttaataggccaagaagcagatgtctacgaggtagctgacattcgaatctggaactgagaaagggtctggggttggaaaaactgcaggactggttagttttctacacactttaacaaggcctagtcactgctgctccctcctcattttaagaaaagtcctttctttattcacattgcacaacggaggcttcatttcgcgcttttttttccctaggcccggggctggggcaggtcttttgcgcccgtcacctaactacgcccctcaaccctttccccgcccccgcgcagccggaaatccgaggtctgggcggatcttctactaggcactctaaggggcagcgataggacgccgcggccgccaatcaggcctcccagatacccggatgtgagacggtgcgcgatacaaaggcgagtttccacccagagggtcgtcccgtgcaatagccaataagcattctccaggcaataaatgacaggaaaactaaccagttataaactagtttctctcacgcatgtggaaattcgcctgcttagtctaacccactgctaattgtgattggatatcattgtgaggagcggttgaactgtctaattaggagcgggagcgaaaaaacgcacagccaataggaagattctcaggaatggggcggggactaggccttcgcctcggcggcagaggagactcgggggccattttgtgaagagacgaagactgagcggttgtggccgcgttgccgacctccagcagcagtcggcttctctacgcagaacccgggagtaggagactcagaatcgaatctcttctccctccccttcttggtaagtggagagggcggacgcagggaaggcgctgggtttttcgggaagcgagagggggtgtgg

SEQ ID NO: 11881 - DNA, 2300 bp, Homo sapien
ataagggaggatgggagaggaaaatggggagagcattaaaaaatgtggtagttgaggaaagagacacagatcacttgaattttagtggcggagacaggctaatatatgttgtttttgtctgtgtttgttttttagacagttttgctcttgttgcccaggctggagtgcaatggcacaatttcagctcactgcaacctccgccttccaggttcaagcaattctcctgcctcagcctcctgagtagctgcgattaaaggcacccgccaccacgcccggctaattttttgtatttttagtggagacagggtttcaccatgttggccaggctggtcttgaactcctgacctcgggcgatccgcccgcctcaacctcccaaagtgccggggttacaggcatgagccactgcacctggctgatacatgttttaaaggaagaacctggagaacatgctaatgggtgagggaaagggaggaatcaaagctgcaggattggtaggacggtagtggcatttatggacctagggaaagactgggaaaagatgagactggtaagataaatcaaaattcctgttggggaaaagtgaatttgagatatctagtagccatgccaagagaaatgtttaaaaaaataagaaattgggctggctgcggtctgatgcctgtaatcccagcactttgggaggctgaggcaggcagatcacctgaggccaggagttcaagaccagcctgagcaacacagtgaaaccccatctctactaaaattacaaatattagccaggcatggtggcacatgcctgtaatctcagctacttgggaggctgaggcaggagaattgcttgaacccagcaggtggaggttgtggtgagctgagattacaccactgcactccagcctggatgacaaagcaaaaaacagaaaacaaaattgtacaaatctgaagctggagacaaaaattttggagacaaaagcatatacatacatagtatttaaagtcaggagactgggcctggcacggtggctcatgcctttaatcctagcactttgggaggcagaggctggaaggtcgcttaagcctaggtggaggctgcagtgaaacgtggttgtgccattgtactccagcctgggggacagaataagaccctgccaaaagaaaaaaaaaagaggaaagaaagagaggaaggaaggaaggaaggaaagaaaagaaaaagaagaaaagaaagagatgaaaaaaagagaaagaggccaggtgtggtggctcacgcctgtaatcccaacactttgggaggccgaggcgggcagatcacctaaagtcaggagtccaagaccagttttgccaacatggcaaaaccctatctctaccaaaaatacaaaaattagccgggtgcagtagtgggtgcctgtaatcccggctagactggatactatcatccaggaaaaaaagtgttggccagagtatgaggcaactctatagacaggatttcctgattattcaggccacagagctgaatatggtcatttcagagctcccaagtttacatagtagttctagccatccccagaggctaatttaaacttctcagttttattttcaacctcctaggagatagaatctgattggttcagcgagggtcatttgtcttgggtcattcgattaaccctggtccaatcagcaatggcttcggggactggattgtaggctataaactgattcctggggagtcagtccctgtaaattgagtggagagagggatagaggcctatttcgcagagaaaagggatggtcatcggcttccaggctgagcagacacttaaaaaaatgatccgaaatgatatccatcaattccataatcataaaaactgattttcattttggatcaagtcattcctactgaatacttgttgttactctttagtgtagagttgtccacactaccatgagaatgactctgacatgtcatataccatcatgaaagtgctgagaaattcctgctacaacttatgtacacgtttcagaagacatcctaaagttgcatgtaactgactggacttttcctttatttcagtgtcctctgggatctcttacagcttgggaacagagatcatgtcacatctggtggaccctacatcaggagacttgccagttagagacatagatgctatacctctggtgctaccagcctcaaaaggtaacttctacgcctgaggatggacaccttttagaattaaaagaactctcactgtggaacatcttgctggccttcacagagactgatttactttcagctcttttcttcagtcttc

SEQ ID NO: 11882 - DNA, 2300 bp, Homo sapien
ccgagatcgcgccactgcactccagcctgggcgacagagccagactccgtctcaaaaaaaaaaaaaacaaaaaacttaaaagtacctttgatctagtaaaaggcagcagggggtagattgaggaggtcttacgggagcatctgggaacaactgatgttcttcagctcagtgaaataaagcagtgtggggagtatccacttcgatagacattactctgtgatagacattactatttgcctctccccttcatcactcaaaatactattttcttgagtccttacatgatatatggtcaggcaatgccaagaaatgttaatacttgcctaagtaggttattattattattattattattttttttttgaggcagagtctcactctgttgcccagggtagagtgcactggtgtgatcttggctcactgcaacctctgcctcctaggttcaagtgattctccttcctcagcctcccaagtagccgtgaccacaggtgtgtgccaccatgcctggctaatttttgtggtttttttttttttttttttgagacaaagtctcactctgttgcccaggctgagagtgcagtggcgcagtctcggctcactgcaacccctgcctcccgatgtttaagctattcttctgcctcagcctcctgagtagctgggattataggtgccggccaccacacctggttaattttttgtatttttagtagagacggggtttcaccatgttgggcaggctgatcaccaactcctgacctcgagatctgcctgcctcagcctcccaaagcactggaattacaggtgtgagccaccgcgcccagccaatttttgtatttttaatggagatggggtttcaccatgttggccaggctggcctcgaacccctgacctcagataatctgcccaccttgacctcccaaagtgctgggattacaggtgggaaccatccagcctggccggtaagttatttatttatttcttgagacggaatctcacactgttacctgggctggtgtgcagtggcacgatctcagctcgctgcagtgtccgcctgctgggttcaagcaattctccagcctcagcctcccaagtagctaggattacaggcacctgccaccacacccagctaactttttgtattttcagtagagacagggtttcactatgttggccaggctggtctcgaagtcctgacctcatgatctgccctcctcggcctcccaaagtgttgcgattgcaggcgtgagccactgtgcccagcctggtaaattatttttaaaccacatttactaaaatgataaataagaaataagacataaaaagaaataattgtttgattattagtgtcatttcatttgtatgaatgaccaagaactagccatgtggctgggcatggtggctcacacctataatcccaacactttgggaggccgaggcaggtggatcacctgaggtcaggagttcaagaccagcacagccaacattgtaaaaccccgtctctattaaaaatacaaaaattagctgggcctggtggtgggttactttaatcccagctactcaggaggctgaggcaggagaatcgcttgaacctgggaggcagaggttgcagtgagccaagattgcacccctgcactccaacctgggtgacagctcgagattctgtctcaaaaaaaaaagaaaaaagaaaaaaaaaggaaccagccatgtgtattttatactcaaaatgggtctgctctgacagcttgatacaatagggtggaggatacagttgttgaaaagtttaattcccgcccttcagcatagtaatttataatctaggtcaaagacaaatattctctaaactcaccgttggtgaaggtagatggaggcatggggtttgagaaaaggaagattttgttcctcatttctaatccggcaggcctgagaaggtcttgatacatagttccctgactaaagaaagccatcatggtggagaagttccttgggaaatggatatgacttggggtgtttgctcagtcagatatctgagacctaaacagaaatggtactgagcaataactcagtaggactcaaaagttccaaggcagttggtaaatgacagttatgaataaagcaagggcagaaaaaaacatgtaggggagagaatgaggaactaggtccaggagatgctgaaactggataataaagacgtcatatcacaccccttggggtatccatctgagagcttgctttccattgccagcatgctggacagcagtgacagctccagtcagccccactggagcaacgagctcatagcg

SEQ ID NO: 11883 - DNA, 2300 bp, Homo sapien
agtggatattttgtacaataatattaagcatgctttgttccagccctgtgatggagaaatgattattgtcttgcactttcacctcaaggtatacctttctacttaactagctgtcagctcttgggcaagacacttcatttcactcagcttctttcctataaaatagtgatgaaagggctgggcgcggtggctcatgcccacaatcccagcactttgggaggccgaggtgggtggatcacctgaggtcgggagttcgacaccagcctgaccaacatgatgaaaccccgtctctactaaaaatacaaaaattagccaggcgtagtggccagcgcctgtaatcccagctacttgagaggccgaggcaggaaaattgcttgaacctgggaggcggaagttgcagtgagccgagatcgcgccattgtactccagcctgggcgacagcgtgtgaaaaacaaaaaacaaaaaagtgatgaaaaaatcacctctcacttaagaacatttaagaggattaaataaaataatgcctctaaaggccacaaggcctggcatctagaaggggctcataagcatgtttgttcctttggtgtgttatatggtggccagcaaatgttttatacgagatctccagatttctctttctaaaatgaagttttgctttagataagatttgttaccaacatgatttccaaagttcctgtaataagtaggagcacagcactttttcaaatgtacactgtttccattcccaagcatcattatttatgatgacaccaggggtggtttaattatttttgcatgcatgctgtggaggcccaagtttggatcactgccatttccatcacagatacctttgtgtttctgacttctgtgttctttctgttttatgccgacagaatgccatcatgtttgggaagaagcggcacacggatgtgcagttctacacagaagtgggagagataaccacggacttggggaaacatcagcatatgcatgaccgagatgacctctatgctgagcaggtttgtgaaatttagtattgtatttgcaggatagtgagggaggatgaggccaaatccaagctcagggattgtattttataaacaaactgggctggcgtggtgactcgcgcctgtaatcccagcactttgggaggccaacatgggcagatcacctgagggtcaggagttcgagaccagcctggccaatgtggtgaaaccctgtctgtactaaaaatacataaattagctgggcgtggtgggtggtggtagtcccagctagtcgggaggctaaggcaggataatcacttgaacccaagaggcagaggttgcagtgagctgagatagcgccactgcactccagcctgggcgacagagtgagactccatctcaataaataaatagccaggtgcagtggctcacgcctataatcccagcactttgggaggccaacacaggcagatcacgaggtcaggagatcaagaccatcctggctaacacagtgaaacgctgtctctactaaaaatacaaaaaaattagccgggtgtagtggcgggctcctgtagtcccagctactcgggaggctgaggcgggagaatggcatgaacctgggaggcagaggttgtgggccaagatcgcgccaccgcactccagcctgggcgactagcaagactccatctccaaaaataaataaataaataaataaacaaccctgaatctgtttgtgcagagcaactcaagtatctgctgagatagggtattacaagagtttaggcttaggttgcagactcagcttgacaggtaatggcatggtgaccttaaatattaaaggtgtatgtacatgttagttttatagttacgagagaatgaagggcaacgaaagcacttcagggatgatctgtgcagcaaaccaccatggcacacgtttacctgtgtaacaaacctgcaaatcctgcccatgcactcctgaacttaaaagttggaatttttattttaaagcacaaaagcacttcagactttttgaggggaggtactgttaacaaatgtgatggctgtatttgatatttttttcttctacagatggaacgagaaatgaggcacaaactgaaaacagcctttaaaaatttcattgagaaagtagaggctctaactaaggaggaactggaatttgaagtgccttttagggacttggggtaacctatcttatttttggcttgaagtttgactggtctgtcttttggtacaataaattattcttcctttaataataatttaacatatcatatccttttttcctatgactaa

SEQ ID NO: 11884 - DNA, 2300 bp, Homo sapien
gccccgcaaacgataaacgctaaaagcccgattgacatcctccttgcccttccatctctcctttacgaagacggttataatcctggcgggaccaggggtggaatattgtggttctggagggacagagcgagtgcgtgagaacacggcaggggagggcagcaagacgtgaccacggagtaggagggaaggatgttgcctcttctagggcgggaagagactgcgagaggtgctgctatgcatgaccaaggctggcacgcggggaagatggtgatggccgcaggacagggtgaatgcgggggattccctgttaaggggcagcgttcgtggccgcctccggtgaatgattcgggagcaacgaaaagggtgaggcacagaacccgggaattcctgaccgaaagagaaaaaagggcgccgagaaacagggttattatgggatggctaagggggctccctaggaaaaattacaggatcttcctcacccgccaattgctgtacagtctcttcactcgccgataataagcgtctttgtccagagtcacagccatagccccggacgccgcttctcctcgggttccgagaatcacgcgaggtcccggctcagccacccgctctcggcccaggaatcccgcactctcccaatgacccggaagtatcgacctcaaagatgccctttccgcttccgggtcccaacagcgttaggttttttttttgtttgtttgtttgttttgtttttttccaaccctctttcggatggacgggggaaagagagaaagaaaaacgagggaaaatcaacaaaatgtgcgatgcaaagagtcgattttcgcggggtttgtcaacttcgccactgccgcacgcgaatcgacgtcgtcacgtgacggtctgcctccgcccttattaactctcagcccagcggcggtttccaggacctcagactttttgccgaggcggcagtccctagacgaagcgaaggaggcggcgcctgccccgcccacaagagctgccgcgcgcgggtgttatagctccaccccatctgcaaaggaagggggagcggaaagagcgggatctagcgtgggataaaagtgggactactacagtgtaactgggcatgcgcccctcctagaaatgatgggaatgcaaaagcccttgactgctccaggactcgagggatcctcggtgccaggatgctgggtcaagcgctccgccgggacagaggactcataccagggaaatggagcccagcctcgtgataaactacgacccaagctgggggaggaacctagttttcgaaaggaaaataatatgcgcaagctttaactgagcagtgggatggtgtaagtcagaggaaacagatgacttgaggggctctacaaacttttagttccttcccacaaccccaccccctgagcccaagtcgcggcagcatccttccagtcggccagtccccttgctgcagttcatgaaaactggcactattctatggcttcccccaaataaccgttacttcagttaattagaaacaaaacataaatggttcctgatgacattcttgctccctgtctcttctaaaaacttggagtttgaatccagaagtttgcctacctaccatttaccttaaataattcccttgcctttagccagctggacagtctacatttgtatataccctttagaggagtacagatgacttgtctgctgtaaggcaatttagtataaacagtattgaacttaaggaaagtggtgctgaaattacccaccattaacaactcaaaatcaatacactgggtttgagcaaacatagaacaaaggaagagtggaaaaggattaacttaaatttattaatgccaaggggaaagaaggtaacagttcctgaccctccagctgtatccacagttcggccaggaacaggctctgccagaggctagggccagcgctacatagtctgtggttaatggaggtgactagggaggggtgagcacaccagctgctctagtctcctttccttccccagaaatgaggaagtggtcatgtattattttaggagttcccctgcccacccaatcctctcataattgggagcaatcaggtacatttttttttttttttccttttcacctcctggagtcctggacttccccacatctcccctgcccctcccacgtttccatagtccaagggccagagtaaatgaaaatacagcagccgcccaagcaatggggcccatgctggggcttcagtcatcagcatcttcactggagtctgagttagctggcatcataggatcatcaatgagtgagaagtcc

SEQ ID NO: 11885 - DNA, 2300 bp, Homo sapien
ttcaaccagctaagtccagcatttcctccttcccattaccaccaatcaagcctagtatcgctgtgcttgttttgcctcttctaaggtacattcagtaaaaaagcattgtaagctaggactctgttggctttggtttcttttcttttttcccctttctttctttttattatcttctattccctcctcctagggtcatcacactgaaacggtgttcaaccgggttttgccagggcctattgcaccagagagcagcaagaagcgggcccgtaggatgcgaccagacctttctaagatgatggccctcatgcagggtggaagcactgggtctctatctctgcataacacgttccaacacagcagtagtggcctacagtctgtgtcatctttgggtcacagcagtgccacttctgcatctttgccttttatgccatttgtgatgggtggtgcaccatcatcccctcatgtagactccagcaccatgcttcatcaccaccaccaccacccccacccccaccatcaccaccatcaccatccaggcttgagagcccctggctacccctcttcaccagtgactaccgcctctggtactaccttgcggttgccaccactgcaacctgaggaggatgacgatgaggatgaagaagatgatgatgacttatctcagggctatgatagctcagaaagggacttctcactcattgatgatcctatgatgccagctaactcagactccagtgaagatgctgatgactgaagccccagcatgggccccattgcttgggcggctgctgtattttcatttactctggcccttggactatggaaacgtgggaggggcaggggagatgtggggaagtccaggactccaggaggtgaaaaggaaaaaaaaaaaaaaatgtacctgattgctcccaattatgagaggattgggtgggcaggggaactcctaaaataatacatgaccacttcctcatttctggggaaggaaaggagactagagcagctggtgtgctcacccctccctagtcacctccattaaccacagactatgtagcgctggccctagcctctggcagagcctgttcctggccgaactgtggatacagctggagggtcaggaactgttaccttctttccccttggcattaataaatttaagttaatccttttccactcttcctttgttctatgtttgctcaaacccagtgtattgattttgagttgttaatggtgggtaatttcagcaccactttccttaagttcaatactgtttatactaaattgccttacagcagacaagtcatctgtactcctctaaagggtatatacaaatgtagactgtccagctggctaaaggcaagggaattatttaaggtaaatggtaggtaggcaaacttctggattcaaactccaagtttttagaagagacagggagcaagaatgtcatcaggaaccatttatgttttgtttctaattaactgaagtaacggttatttgggggaagccatagaatagtgccagttttcatgaactgcagcaaggggactggccgactggaaggatgctgccgcgacttgggctcagggggtggggttgtgggaaggaactaaaagtttgtagagcccctcaagtcatctgtttcctctgacttacaccatcccactgctcagttaaagcttgcgcatattattttcctttcgaaaactaggttcctcccccagcttgggtcgtagtttatcacgaggctgggctccatttccctggtatgagtcctctgtcccggcggagcgcttgacccagcatcctggcaccgaggatccctcgagtcctggagcagtcaagggcttttgcattcccatcatttctaggaggggcgcatgcccagttacactgtagtagtcccacttttatcccacgctagatcccgctctttccgctcccccttcctttgcagatggggtggagctataacacccgcgcgcggcagctcttgtgggcggggcaggcgccgcctccttcgcttcgtctagggactgccgcctcggcaaaaagtctgaggtcctggaaaccgccgctgggctgagagttaataagggcggaggcagaccgtcacgtgacgacgtcgattcgcgtgcggcagtggcgaagttgacaaaccccgcgaaaatcgactctttgcatcgcacattttgttgattttccctcgtttttctttctctctttcccccgtccatccgaaagagggttggaaaaaaacaaaacaaacaaacaaacaaaaaaaaaacctaacgctgttggga

SEQ ID NO: 11886 - DNA, 2300 bp, Homo sapien
ttggctctgtaattcttactcattacagagtacctctcactacctcttctgggcctttttttttttttttttttgcgtctactttcaatttttgtgttttcagatattctaaaacacattaaaaaataaccagttttcttgtgttcttctgatgtgttcttctgattattgttgccctacttttccttttgtagatggacaaggcgtgaacaaactgatttttatcgagtggtgtctacgtttggtgtggaatatgaccctgacaccatgcagttccattgggatcgcttccgcacttttgctcgactagacaaaaagacagatgaaagccttaccaagtacttccatggctttgtggccatgtgccgccaagtatgccgccttcccccagcagctggagatggtaagcaagattgcagagtgggtgaggatggatgccaacagaagcaactctgttaatttcttctactcctgtctcttgcagaaccccccgaccctaacctgttcattgagcccatcactgaggagagagcctcacggactctctaccgtatagaattgcttcggcgcttacgggaacaagttttatgccacccccttttggaagatcggctggcattgtgtcagcctcctggtcctgaattgcccaaatggtgggagcctgttcggcatgatggggagcttctaagaggggcagcccgccatggggtgagccaaacagactgcaacatcatgcaggacccagacttctcttttctggctgcccgtatgaattatatgcagaaccatcaagcaggagcaccagctccatccttgtcacgctgctctactccactgctgcaccagcagtatacctcacgcactgcctcaccactgcccctgcgcccagatgctcctgttgaaaagtcacccgaggagacagctacccaggtccccagtctggagagtctgactttaaagctagagcacgaggtggtggccaggagccgaccaaccccacaagactatgagatgcgagtatccccctctgatactacccctctggtttcccggagtgttccaccagtcaaactggaggatgaggatgattcggactctgagctggacttgagcaagctgtcaccatcttcttcttcttcctcatcctcatccagctccagctccagcactgatgagagtgaggatgagaaggaagagaagctaagtgagtgcatgtgacaggctgttggcccccttccctatttccccctctcttctctttcccttttctaaatgcatcctcttgagagagatttggattttgatttgataaaatgtcaaaagagtgccattctttgggcctttattcaaagcccatataataccattaccatatgacattattcttccatcttttctcacacattctatgggctctcttaccagctgaccagtcccgctcaaagctctatgatgaagagagtctcctgtccctcactatgtcccaagatggattcccaaatgaagatggagaacaaatgacccctgagcttctgctactgcaggaaagacaaagagcctctgagtggcccaaggtaacaaacagcctcatccctggacatgtagagtccagaaatacagtgtaacagtatatccggggaaaaaggaacatatggttctggatttttaaaattgtgtttattgctgcaagtttttttttttttttccaggaaacttcccagttgacttaggaatcttaatagtattaacttcctcttttctgccttatgatttttacccatcctggtagtgatggcactattgagtatcacaggatcacacagctagtactcagactcttaaaatggtatttctttctttccccattcaggatcgtgtcctgataaaccgtattgacctcgtctgccaggctgtactctcagggaagtggccttctagccgtaggagccaggaaatggtaacaggaggaattttggggccaggcaaccacttgctagacagtccctcattgactcctggagaatatggtgactctccagtccccacaccacgaagtagtagtgcagcttccatggcagaggaggaagcatctgcagtcagcacagcggcagcccagttcaccaaacttcgccgaggcatggatgaaaaggagtttacagttcaaatcaaagatgtaagctcagcatttgggcattgggaagtggggaaggaggctggaatccttgctgtaactaattttactaataggttactaaactcatttggttagctaattttaaaaatgagaaaacagagcttac

SEQ ID NO: 11887 - DNA, 2300 bp, Homo sapien
ctttatggaggagctggacactgaaagatattatttgactaataaattcctgacttctattatctttgagtcgttaataggaactgacctttcaggttctactttcttgttcttttagttgattgtttccaagtttttgtggggatatatttctttagaagtttttcttgatcccttggtgccatagaaggacacacacaagaaagtgatttcagagtgccaacttccccccctttccctccccgctccatcctattgggtggatctccttctctagggtgatcccttgatgatgatggatgaggagatctcagtgattgatggagatgaaggtaaacttctaggtcaactagtataattctgtgtggggtggtgggttggggaattattcactgaattctgtcctatcctgggatttctaagagctttgcctttgggtgggttaaaatactagtattgcctctactacccttgctatacttcctattcattctactttgttttccacagcccaggtgacccaacagccaggccatttattctggcctccgggctctgccctaacagctaggcttcggcgtctagtaacagcgtatcagcgcagctacaagagagaacaaatgaagatagaggctgcagaacgtggggaccggcgaaggcggcgttgtgaagcagccttcaagctgaaagaaattgcacggcgggagaaacaacaacggtaaaatatagctgggaacttgtgctgatctgtgttttcagttatggtccctatactgaaagccatctcaggaaggatttatttggaattctctacagagggaccatcttttctgccttgggtagttaaacctgtagaaattaaaacctcacttgcatgcagtaatcattaactctcaggtaggtctcctgtgtagacattttcattgatatttgtctgtgtcttttcccccttggctctgtaattcttactcattacagagtacctctcactacctcttctgggcctttttttttttttttttttgcgtctactttcaatttttgtgttttcagatattctaaaacacattaaaaaataaccagttttcttgtgttcttctgatgtgttcttctgattattgttgccctacttttccttttgtagatggacaaggcgtgaacaaactgatttttatcgagtggtgtctacgtttggtgtggaatatgaccctgacaccatgcagttccattgggatcgcttccgcacttttgctcgactagacaaaaagacagatgaaagccttaccaagtacttccatggctttgtggccatgtgccgccaagtatgccgccttcccccagcagctggagatggtaagcaagattgcagagtgggtgaggatggatgccaacagaagcaactctgttaatttcttctactcctgtctcttgcagaaccccccgaccctaacctgttcattgagcccatcactgaggagagagcctcacggactctctaccgtatagaattgcttcggcgcttacgggaacaagttttatgccacccccttttggaagatcggctggcattgtgtcagcctcctggtcctgaattgcccaaatggtgggagcctgttcggcatgatggggagcttctaagaggggcagcccgccatggggtgagccaaacagactgcaacatcatgcaggacccagacttctcttttctggctgcccgtatgaattatatgcagaaccatcaagcaggagcaccagctccatccttgtcacgctgctctactccactgctgcaccagcagtatacctcacgcactgcctcaccactgcccctgcgcccagatgctcctgttgaaaagtcacccgaggagacagctacccaggtccccagtctggagagtctgactttaaagctagagcacgaggtggtggccaggagccgaccaaccccacaagactatgagatgcgagtatccccctctgatactacccctctggtttcccggagtgttccaccagtcaaactggaggatgaggatgattcggactctgagctggacttgagcaagctgtcaccatcttcttcttcttcctcatcctcatccagctccagctccagcactgatgagagtgaggatgagaaggaagagaagctaagtgagtgcatgtgacaggctgttggcccccttccctatttccccctctcttctctttcccttttctaaatgcatcctcttgagagagatttggattttgatttgataaaatgtcaaaagagtgccattctttgggcctttattcaa

SEQ ID NO: 11888 - DNA, 2300 bp, Homo sapien
gactttcacctgcaggccatggttcgttcagccggcaaactggttcttattgacaagttgcttccaaagcttaaagctggtggccataaagttctgatcttctctcagatggtgcgctgcctagacatcctagaggattatttaatccagaggaggtaagaaaagagtcatcctagcctgtggttactctgtcctcataaagcagcaaaaagtaggagggcctggatttaattagagttcaccaattgcaataagagaagtttttaagattctcactctcaacttgggtttttgaccagctttgatatgggagtactggtattgatcctagcctgctgttttggtctccacttctgcttagccacttacattttttttctgcgattcccatacaggtacttatatgaacgtattgatgggcgagttagaggcaaccttcgacaggctgccattgaccgcttcagcaagcctgactcagaccgctttgtcttcttactgtgtacccgggctggtggacttggtattaatcttacagctgctgatacctgcatcatctttgattcagactggaatccacaaaatgacctgcaggtaaaggaattcattgtcttagggactaactacctaacttgggagatttttcaacaagaataggatcttttagaaagacctttcacagagtttggaattgtttccttagttaagggtggcagttaggtcagggaatcagcaaacgttttctgtaaacgacaagacagtaaatgttttaggctttgtgagccatcgagtctttgttgcaactgcttatctccaagtcctgtagcgcaaaaacagccatagataatatgtaaatgagtgggtggtcccacctgtgtccccattgaactttatttttaaaaacagatgtccacacagactttagtttgctgacccctggtctacatgatggggtgataatttcatcttgaaattgactcttggttttgagttgatctcatggctgctctatagaggtgaaagaatcataaattggtattttgtatcctttcccttgctaattttatgatatctttctcctttcctttcgtttttattttaaaccaggcccaggcacgatgtcatcgaattgggcagagcaaagctgtgaaggtgtaccgcctcatcactcgtaattcctacgagagagagatgtttgataaggccagcctcaagttggggttggataaggctgtgcttcaatccatgagtggtcgggatggcaacattactggagtgagtcctcttagtttatagataagtttgtagtagatcattgtgatagagggaaacaaaagctatttgtacacagggatttgactaccttgtttggattctcaattattatttcttaaaatataatagctaaaatattatggcatggttagatattattctcttgatagtcttttcatctttctattggtttttacagatccaacagttctctaagaaggagattgaagatcttttaagaaaaggagcatatgcagccatcatggaggaagatgatgaaggctccaagttttgtgaagaggacattgaccagatcttgttaagacgaactacaaccatcaccattgaatctgaaggaaaaggttccacctttgctaaggcatgttctgtctatgccagaggctagaaaaacacagagaccggaatctctaggatttaattatgtttttatgctggggatggtggctcatgcctatattcccagcactttgggaggctgaggcgggcagatcacttgaggtcaggagttcgagacccagcctgcccaacatggtgaaacctcatctctaccaaaaatacaaaaattagccaggaatggtggcttgcgcctgtcgtcccagctactcgggaggctgaggcaggagaatcacttgaacccagggggtggaggttgcggtgagcggagatcgtgccactgtaccccagcctgggcaacagagcaagactgtgtctcaaaaaaaaaatgtttttaaaacataattgctgattttgcaccacttaaaaaaaaaagtcagctttacctctgcatttgtttttctctaggcaagctttgttgcttctgaaaacaggacagatatttctttggatgaccccaacttttggcaaaagtgggccaaaaaggctgacctagacatggatctgctcaacagcaaggtgagtttcttcttttagggaggaagtatcgcagaagaccacactactttcgggagtctttacagctactctgattatttgatgctaattgtgat

SEQ ID NO: 11889 - DNA, 2300 bp, Homo sapien
tggggatctcaagacagaggaacaggtaggaaatctatctgatgaggtactaactcaggacaaagaaggtgaagtttgtacaaggcagacatctgttgtcatgggtatctcaagggcctttctgaactccttataaccttgtgcctacatcatttgtggcatcatccaaagtatacatttcttagatagtggaaaactctaatttttccatgtttctacataatgtgagaatgttcgccctcatcttattgatttatttttctctctgtaatggaccacaggttcaaaagctacaggccattcttaagccaatgatgctgagaagactcaaagaggatgttgaaaaaaacttggcacccaaacaggaaacaattattgaagtagagctgactaatatccagaagaaatactatcgggctattttggagaagaatttctccttcctttccaaaggggcaggtcataccaacatgcctaatctacttaacacaatgatggagttgcgcaagtgctgcaaccacccatatctcatcaatggtgagggaatgcttggtatatacctgaacttctgtagtacctgtgtttactttccggatgattctccttggggacaatggatgcattgactcaaccaacctaatttggggtgcggactgaggaatgggagggaaatggttctccttttaaaaaagagactctaagcctgggcaacatgatgaaatcccacctctacaaaaaatacaaaaattagccaggtgtgatggcaggcatctgtggttctagctactttggagactgagcttggaggattgcttgaacccagaaggcagaggttgcagtgagccgagatcacaccactgcactccagcctgggtgacagagtgagaccctgtctccaaataaagtaaataaaaacaattcttatttggaatgtttttctgtagttctttctacccctttgatcctacataatctccaagattaaataggatttgctgtttagaattgcatgaagaagaactcagattagccacacagtggcatgtacctgtagtcccagctacttaggaggctgaggcaggaagatcggttgagcccatgagtttgaagctagccctgtctcagaaaaaacactcttaggttactctgttccttggataaatgtcctcatcgacactccattttgctgtttctgtctcttttgggtgctgatagtgtgttccatcttagtccttgtccacatatttacatctttttttaacccagttatcataggcctgccttacttagtgtattttgtatgacacatctgaggatgatttaagttttttttttttttttttttttaagatggagtttcactattgtcgcccaggctggagtacagtggtgcaatctcggctcactgcaactctgcctcccaggttcaagcaattctcctgcctcagcctcccaagtagctgggattacaggcgcctgctaccacacccagctaattttttgtatttttagtagagacagggtttcgccacatggggcaggctggtctcgaacttctgacctcaggtgatctgcccgcttcggtctcccaaagtgctgggattacaggcgtgaaccactgaacccggctgatttttttttttttttaaggtggagtctcgctctgtcacccaggctggagtgcagtggcgcaatctcagctcactgcaaccaccacctcccgaattcaagcgattctcctgcctcagcctcctgagtagctggaactacaggcctccgccaccacacctggctaatttttgtattgttagtagagacggggtttcaccatgttggccagactggtctcgaactcctgacctcaagtgatccacctgcctcggcctcccaaagtgttgggattacaggcatgagccaccgtacccagccgatttaagacttttttgtgctgaaattctgtgtgtgagaaatgttggtcttaagtcaaattacatttttttccttttgctttcttagttaaatagactacaaccttaatatggttcactggatctcaacataatttgatttttcttttggcaggtgctgaagaaaaaatcctaacagaattccgtgaagcttgccatattatacctcatgactttcacctgcaggccatggttcgttcagccggcaaactggttcttattgacaagttgcttccaaagcttaaagctggtggccataaagttctgatcttctctcagatggtgcgctgcctagacatcctagaggattatttaatccagaggaggtaagaa

SEQ ID NO: 11890 - DNA, 2300 bp, Homo sapien
ctaccaaatcacatcttttcatcatattttgcagcttttaattttgttaaaatgatttcattcttttgtcaatttttagacatcagccaatattatgttctgtattagctattttcatttttattatcttgtatggttcagcattgtccagcagttgtggatttcattgttaatcaacaaaagatctggggcagagatacatgagctaggcatacagcagagtaaaaaatgtctagcctctcattcagtgagtctgtcattttcccaagaagctgaatatgttgaggaagcaatgtatcttacattcagtgatatggcactatttttcaggaagataaacagcggtggaggtgggtggtggtgcagtttgtattgcctattaaacatgccttaatataggcaagtaattcagaaaagctcctcatttaggtacatttttggttttttctgactttactgccttcatgcttagggacgcctcatcccaggcgcatacaagtttgacgctctgatcaccacttttgagatgattttgtcagattgtcctgagcttcgtgaaattgaatggcgttgtgttatcattgatgaagcccatcgactgaaaaaccgtaattgcaagctgcttgatagtctcaagcacatggacctggtgagttccacactgacttgtgagcagaaacacctggaataaaccgtaattccttgcggtattaaaataaccctagtttagcagagaagaaaagtctgaatcgtggtattgaacagtggggatgacctatgggaatggtaacctgaaagtcgtgtaaaagtcatacattttagaattgggaagtttagtgataaccagaagaggaggtgggaaactatattggttacctattattactgcataacaaaatactccaaaacttaatgtcctacaacaactatatttttcatgatcttctagctcaaccacttaggctgagttcagctagttggttcttatgatgatcttgcctggagtcagtattgctgcagctggcagttgatgctggtttttatctggagcacctgggttccacatggcctctcatcctccataggccagattgggctgctttgtgtggtagtctcagggcagtattccaagagggcaaaagtagaaacagtaacctttgagataggctctgaaactcacacagtgtcacttttgctacattcttgttcttgcaagtaataaggcaagcctaggggtgaaccttgttaggaggaacagcagcaaattaatgaccatatttaatccagctcagttacattccatagaggacagcagattttaggatatctgtggggagttgaatatggagagacatgtgtaattggaataaacataatcagaattactgttttttaatttgcttataatatttatgttatttcaatacattaatgtcagagggatttcttgaatgctttgtgtttatcgaaagaggggacaaatggaagaaaaattaatggaccagatcactggtccattctcatcattttatagataaagaaattaaaggttatatatgttaaagattatatacttgataggaaaccccagaagtccttcatgtttttaaattttattcttttgtttcctccatttctaggaacacaaggtgctactcacaggaacaccattgcaaaatactgtagaagaactgtttagcttgcttcatttcttggaaccgtcacaatttccctcagaatcagagtttctcaaggactttggggatctcaagacagaggaacaggtaggaaatctatctgatgaggtactaactcaggacaaagaaggtgaagtttgtacaaggcagacatctgttgtcatgggtatctcaagggcctttctgaactccttataaccttgtgcctacatcatttgtggcatcatccaaagtatacatttcttagatagtggaaaactctaatttttccatgtttctacataatgtgagaatgttcgccctcatcttattgatttatttttctctctgtaatggaccacaggttcaaaagctacaggccattcttaagccaatgatgctgagaagactcaaagaggatgttgaaaaaaacttggcacccaaacaggaaacaattattgaagtagagctgactaatatccagaagaaatactatcgggctattttggagaagaatttctccttcctttccaaaggggcaggtcataccaacatgcctaatctacttaacacaatgatggagttgcgcaagtgctgcaaccacccatatctcatcaatggtga

SEQ ID NO: 11891 - DNA, 2300 bp, Homo sapien
ccagattcaagtaattctcatgcctcagcctcctgaatagctgggactgcaagcgtgtgccatcatgcccggctagtttttaaatttctagtacagacagggtttcaccatgttagccaggcttagtctcgaactcctgacctcaagtgatctccctgcctcggcctcccaaagtgctgggattacgggcgtgagccgcctacgcctggcacctttttcattttcaaatggtcatctaggtcttagccaccagtgaattcagctttcttttaaatttacttctaatttttttttaggctataaaccatcattttcttagaatttgtcactttatatttttccttccagtagcactttttggtttagcttagcaggatcataaagaaaatttctatcacatctgacactttatacagtgaccagtagagaacagcagagcctttttaagatgttaatgttcagtgggtgagctgggctttttcatgactttttcaagtgacttgatcctcccatacatcattctaacaggacctctgagttaaattctttcctctataaaattccgaagtttattctactttataagtcttcaggttcactcagagcctcagaatcttagatatccaggacacggtagaattcattgtctttaaatcctaacaagcatgcttcacataacgtattctgcttttgaagttggggtggtagtattgtgtgtttgtttgtgtgagttgaatggagaatgggccgggttttagggcaggttgttagctactcttaaattcttatcatttttcaggatctcagcctttccagccttgacagtcttatgcttttaatcatacctacccttctaaaagcaattggcctttagttaggcccctttggaatgtcttgcaaatgacgtgacagatgataatgttttcatactctaatactataatttatgctcccagtattggctaatactattctatatacccattttccccacctctgcaaaataagtttgtcatccattttatattacctaatggtggaaataaatagatattatgctggaaatatgtgacctggacaaatggctttatatagagagtgacctgagttactatgataaagaaaaaggtaaaagagcaagcagctggatcaattccagagattcgagatctgtgactaccttgaggcactttcacatattttgttggctattttaagttttctatgaattgataattagagattcttgttgattacactaggcccaatctaatccttgctttatacttcataagccaaaaatggagatgcagtaagtgcagtgatcatcttgaatagtgaaaataggagccatttaccattggtcactgccccttcactttcagtggaatacctacataaactagtacttactgtagttgaactttttagcattttctcttccttctttactcttagtacctctttttggtgataacctcttgttagctcctagcttcctggggctcacaaggacatttctttatcaccatgtaagtgctcttgaggtgcatctgcaatgagctctaggggcccagaagccagtataagctgatagtcctcatcctaaaggtagcctagctgccactgtgtcaaatttggctccaggagaatagtatggcacagaaacatatcttttaatttcaacatggtataggaaaagattagtcttttttttttcatctgtttagttgacgagcatgttttagtgcttagtgtgatagaaactagtgggtagaaattttccttttagaacagattctgataaattgctttgaagaatgatcaaagccatatagtgcatcagaaggtgaacttttggtcgatgtgtttggcctgactttttcaacggcttctaggtactgatactttgtgatctgattttacaatcaaatttttattctttaactggagcagagaacacagaatcagtttcttaaggctttggtttcttctctcctagcccgttatttactacctggtgaaatggtgctctctgccctatgaggatagcacatgggagctaaaagaagatgttgatgagggcaagattcgagaatttaaacggattcagtcaaggcacccagaactcaaaagggtggtaagtacatttgcattaaagtataaaggcctacataagaaatgattaaattttttcccctatgaaattttttgttgttttagctttttattatggaaatttcaaacatataaaaatcgaagaaatggtataatgtacccatcacccacgtaacaattat

SEQ ID NO: 11892 - DNA, 2300 bp, Homo sapien
attttgtgaacctactttcagccattcataagacatgttttcaagataggaagctttttaccatctcatgttagaatcaaaggataccatttagtttctgtgaggatcgaatggtttactccagataatgcgagcaagtataattcattaactgttttttgattagctactatatgtgctatgtcctgctggttcttaggggatccacagataaataaaacatagtccccaccatccaagaactttctcccagagaaagaggagctgggccatggtacagagttgtggagggtgtacattgcatacattcataacaaatttttatatatttagtatggcagttttccaggcatcttgagaagtgggcaactttttacaatttgcgcaaaggaaccatttgggccttcagaggatatattacagacttaggtcattataataaaatattaaatataagtgttttaaggtataaacaatggtgtgggtatttaaaggaggtggagggatcaagtcatcacaagttgctcagttgttaaagcgtcagaggttcagggctcacttaatggagtagaagacctttgagggttggtaggattttagctgcgagagattattggcattgggatggagaggacgtgttccaggcagaaagcacagcatcataagcaaagtcacacaggtaggaatcacattaagggaattgtgtagtctagttggactggaatgtaaaatatatgtaagagatggtaagaggaagttgggaatataaattggaaacaatgttgaatcccttgcaattgaccttttttatcttaaatatgagaaagttttcttgagaggggacttcagaacaaaaatcccattatagattaatatgttaactagaataaaggttgcaaaacttcctgggtaaaattgtatgatcactttggtgagattgtactataagccttggttaaaggtggttatttttgccaatagtaagtaaaaatatataaaacacaagaaaaatttatacaatagaatatatccagaaacctttatctatagagtcactgtaattctggtggcatatttttgagttctactaacttaaaaactgaaaatagaaggtaaatgaatattaaattttatctttaccaaagaataataattgttaaaagaaacggagaaagacagccaaatgctcttgacagagtctttaaagtttgtaggtgtaagtgcccaagaggaggttgttattgtttttctcttttagttttagttttgaagcagaaatatgagtgtctttctgctgtatgtccgtcctcagatttcctcacatttccctcttatattcatgctatttgatattaagaacagtacgtaagaagggaaaattttctctgagatcgccaactttgcctatttttcatttgtatttgtattcctacaacaggagttccaccatcttcctctgaagacgtagccatcttgctccatgaaggtcaggacaatctgacatgcacttgtttcttgcctctatacttgaagagtagtcctcttacattgtgtacatttttttcttaataggggaggggaggggagagccagtaccccccctccccttccctccctagaccttggagaagtaccctccattactttcccaagatggcagaccccatcatggatctgttcgatgacccaaatttatttggcctggactctctgactgatgacagctttaaccaggtcacacaagaccccattgaggaagcccttggactgccaagctctctggactccttggatcagatgaaccaggatggtggaggtggtgatgtggggaattcatcagcaagtgaactggtccctccaccagaggaaacagctcccacagaactttccaaagaatccacagctccagctccagaatccataaccttgcatgattataccactcagcctgccagccaggagcagccagcccaacctgtcttacagacatcgacgccaacatcaggacttttgcaagtctccaagagccaggagatcctgagccaagggaatcctttcatgggtgtctctgccacagctgtctcctccagtagtgctggagggcagccacctcagtcagcccctaagattgttatccttaaggccccaccaagctcctcagtcactggtgcccatgtggcacaaattcaggcccaaggtatcaccagcacagctcagcccctggtggcaggcacagccaatggtggaaaagtcacttttaccaaagtgctaaccggcacaccccttcgaccaggtgtttc

SEQ ID NO: 11893 - DNA, 2300 bp, Homo sapien
cagtgaatgggaaaacagtattgctgtttacaggagtggtaattaggtgtttttagcgacagtggtaatgctaggatctttaaaaaataagacatctaaagcaagttgattttcctaatttgtgtcctcagagtataagaaaataggatttcaatgttgaggatactttcagaggaaactaatggtcaggagataagccgccctttttttttcttttttgagacattgtttcactgtgttgcccaggctggagtgccttggcatgatcttggctcactgcaccctccacctgctgggttcaagcaatcctcgtgcctcaccctccccagtagctgggactacaggtgagtgccaccactcccagctagtttttgtatttttagtagagatggggtttcgctatgttggccaagctggtctcaaactcctggcctcaagtgatctgcccaccttggcctcccaaatgctgagattacaggtgtgagccactgcacctggctttttttggctttttttttaagacagagtctcgctgtgtcaccaggctggagtgcagtggggtgatcttggctcactgcaacctctgcctcccaggttcaagcgattctgcctcagcttcccaagtagccgggactacaggcgaatgccactacgcccagtaatttttgtatttttagtagagacggggtttcaccatgttgaccaggatggtctagatctcttgaccttgtggtctgcccgcctcgctctcccaaagtgctgggattacaggtgtgagccactgcgcccggcatctttcttttttctttctttctttttttttttttttttttaagagactaggtgttactatgtaatgcccaagctggtcttgaactcctggatacaagcgatctgcccacctcggcctctctaagtgctgggattgcaggcatgagccaccactgcacccggactaaactgctctttttaataacagtgtcctggctgggcgtgatggctcacgcctgtaatcccagcactttgggaggctggggtgggtgggtcacttgaggtcaggagttcgagaccagcctagccaacatagtgaaaccctgtctctactaaaaatacaaaaattagctaggtgtggtggcaggcgcctgtaatcccagctattcgggaggctgaggcaagagaatcgcttgaacacgcgaggcggaggttgcagtgagccaagattgcgccactacactccagcctgggcgacagagtcagactctgtctcaaaaaaggaaaaaacaagtttactttggtggatttaagcttgcacaccatcattctggggttgtctagtctcactgggaattagagtgatttcaagtgacatcgcaaagtggacactgattaaaaggtcaaatgggctgagtttcaagagatgggagaacaggaaaccgagtttagagggtgaggagtgtttgttttgagcgggctaagggtcgggaattgttagagggccccaggaattactgtctaaaaagccgtattggtattgaagggtcacagtgtcaaaaatgcacggcaaccttatgtgttgtggcagaaagagtgctttaaaaggccccatattccagctgggctgactcccacgatggagggaagaagatttggccccttttattaggtagtgggatacggtgtagtcactacaggagaggggttgacagggctgctagaaggccggggattcagagggaggcggagctggcctagcgcggaaccctccctcccaagtttatactcttcagggtgaagaattcagagtagatggtagggaatttaatctccaggactggtttcgcgtactatgagactgttcctctggccagcccccttttttcaagcaagctgcaggcttcgcctcggccctagaaaccggataggcctctccgtgcgctctcaacctaacctgcgggggagggggaagggagctccttatagtcccaccctttgcgctgttttgcgtcttttcgcctttggtgagtggcagtgcgcttcagccaatgatggcgcggggcgggcaggagcatcaggttaggttgcgcaggaggagggggaactggtgctggagagacagggagaggggcgaaccggccccccacagccactgcaggtaaagccacctctctcctccactggggtgaggcacagctcgttttctccttcagggcttgtcgggcctctcggcctgcagcttccgccctaacattgctcctatcccgggcatccacaccccccaccccccgcatcttcccgtcttg

SEQ ID NO: 11894 - DNA, 2300 bp, Homo sapien
aattaattttgtgtttcttaaggttcttcatttcccttctagaattaaaaaattgtgctcaatgacctcaggaatgtaaccaaaaagcagatatgggaaaataaaaccaattaagaagtcaaatttaaaaaggtgaatacttttttagcaatgttaggttaatgcttaaatttggttaggtaacatttagttttgtaacttttccaaaaaactaaaaattttggaaatatttcctgacactttctcagtcactctttagtctctacttaaaacaatatttatttttttgcaattccagatgtttttctttaagaaaagagcctaagaaataggttctcagaaacaatacttttttttttttttttttgagatggagtctcgctccgtcacccaggctggagtgcagtggtgcgatctcagctcactgcagcctccacctcctgagttcaagtgattctcctgcctcagcctcccaagtaagtaccttacaggcacacgccacaacgcccacctaatttttttaacaatacattttacatttccaataattgccagaggcacaattaagcattgttgccttgttaagcattgtatcattagcccctatcgcaaagtgagaattcgctcaatattccctttaaaataccttttagttgatactgccaaatccttttctaaccccatcaattatttgactctaaataaatccgttaggaacagtggtagcttcaggtttccatacaggtgggacttggaagtagcaatatggtaagaatggggatgtaggggtttatttagaaactgcatttgcatggcaagaaagctagtttcatatatgttgtttatttggactggggttacggagataacgaagagggggtagttaaaagcctcttcaggccatgccttatcacaaacgtgtgggaaaggttaatattttccaggatcgccagtgcgtttgaggaactgttaacacactctttcatttaaaaggaaagtttttagttttatttgcctattaattctaaggcagggatgactcctcaatttgcttcttcaccaatataaaaaatgtccatgtattggtgtttactttttaaaagtaaggctggtattaatttacctcaaagcacagatgagttcataaataagcagttatgctttcgtgggattttccataaacatacaaattgtatttgaaaaaaaattatatgacgagtctatacctcacactctaaaaagttacctttcaattatatactctcccttacactactccccacatatcaacgtttcattggtcacttcattaacataagtttggactagtttaaagtagtgaggggtaactttttacttcgaacactgaaggctgctaactttccactttagcaatttagctagtcaggttttatcatctgttctggaacaagtagatgcacttacctattgtgaggtcgtggacaggctggaaccgcttatctgtaaactgcaggaggagacatgacttccccacacctgaaagagaaagcacactcccggaatcacgcagccctggaacaccttccagagtatggacttcccggaccagagaaggggggctcccgagccccgcccccggccgccccgaaccgccccgcccgtctcgaatcgcccagcccacaaagtgagccccgcccccgccacccaatttgggagcttcgaatgcccgcccgagccttgaaggcgaaccacctgagggttacctgtgtctccgatgatgatatacttgaagagataagcataagtcatggtgtcgcgtcctctgggttccgggtccgcccgacttctatagccacttacctccgacctctctagccactcaatctaccgatcttcttcttctcccccttccccccgctcccccgcccctccggctcctctagcccagatcacgtctctattgcactccccggaatcatccttaggtcgggagtaccctacgccacctccagggacgcttctagcacttctacatgcccttatccctccaaactccagggggcgatagcccagcgcctgactctctgcagccccacggcgctccttccaatcagcagagagaacacacgtccttgcggaagtgacggcagttccgagtccagtgggggcggtgggagcgatgagggtctgagacggtgggagcggttgtgtgaagatggaggtaggaacctgatagctaagaaggctggcgagagaacgcggccgaccgggttgaagcagggacgggaagccgggcggagaggcgactgacgggagag

SEQ ID NO: 11895 - DNA, 2300 bp, Homo sapien
gctgaggcgggcagatcacttgaggccaggagttaaagagcctgggtaacagggtgaaaccccgtctctacaaaaattcaaaaaaaaaaaaaaaattagctgggtgtggtggcgcacacctgtattcccagctacttgggaggttgaggcaggagaatcacttgagcccaggaggtggaggctgcagtgagccaagatcgtgctactgcactccagcctgggctacagggagactgtctcaaaaaaaaaaagaaagaaaaaaaaagttaaactagcaactggcccttgtcaaccccattttcatccatgaaaacgttaggattataggataagcccatgcaacagccactgacaattcttggtaaaaaaaactgatgcaaatggtccacaccacttttgaaaataaatataaaagtcctcaaaaaatggcagatggttcaagacttcagtttctcaaagacagaaatttttgtctgttccaccattctcttttgcctctcccaaacaagtgatacatatctatattatgacaatatttcaaccaaacttttttaacgaacacttcagggtttcatcataacctttacttctactttaaaacagcataagaaactataattacagctgtttgacagctggggaaactgtgacatacaaagatgaagtaatgtgcccaacgtctgagtcactggcaaattgaaacacatgtcctactcaactcttttatattctctagcagctatttcctttcctcctgacattagcaaaacaagctgacaccatgtaggtaaaggtaaccacaaattttttatcaaagtaggaaatttaggccgggcgcaatggctcaggcctgtaatcccagcactccgggaggccgaggtgggtggatcacctgaggtcaggagttcgaaaccagcctggccaatatggtgaaactgccatctctactaaatatacaaaaattagccgagcgtggtggcgcacgcctgtaatcccagctactcgggaggctgaggcaggagaatcgcttgaacccaggagacagaggttgcagtgagccgagatcgcaccactgcacttcaacctgggcgataaagcgagactctgtctcaaaacaaaagaaaaccaataagctcctcccctcaaccccaatttcttcagctgctgaaacattttctttccactgcgatcccctaagattactgtagctatttctccccagagaaaggagacaattccactctgtcttctaatccagaatcccttttctctttaaacaggttatctctttccaataccttgctttctgatgacagcaacttcccaagacttccccagatagtccccacaggctctagaagcaaccgccacttttctctaaacaccaattgcggcccttggttcccagcccccgtccccggagtccgtgctctcctccccactaccctaccccaccgctgcctcaggccctacccccgcggcgtcggcagctctggctcacctcggcccctgacaggaaggggtgcgaaggccctgtgatcgtcaggtaattgtcatttcctccgggaaactggaaaccaaaagaaagtcgcggggataagttagggggagcagggagtcagcttggagcgatggcttttgaccctgacattctgacaacactccccaaaccccgctctctctcctctcccgtcagtcgcctctccgcccggcttcccgtccctgcttcaacccggtcggccgcgttctctcgccagccttcttagctatcaggttcctacctccatcttcacacaaccgctcccaccgtctcagaccctcatcgctcccaccgcccccactggactcggaactgccgtcacttccgcaaggacgtgtgttctctctgctgattggaaggagcgccgtggggctgcagagagtcaggcgctgggctatcgccccctggagtttggagggataagggcatgtagaagtgctagaagcgtccctggaggtggcgtagggtactcccgacctaaggatgattccggggagtgcaatagagacgtgatctgggctagaggagccggaggggcgggggagcggggggaagggggagaagaagaagatcggtagattgagtggctagagaggtcggaggtaagtggctatagaagtcgggcggacccggaacccagaggacgcgacaccatgacttatgcttatctcttcaagtatatcatcatcggagacacaggtaaccctcaggtggttcgccttcaaggctcgggcgggcattcgaagctcccaaattgggt

SEQ ID NO: 11896 - DNA, 2300 bp, Homo sapien
tggccaagttggtctcaaactcctgacctcaagtgatccacctgcctcaacctcccaaagtgctgggattatagctgtgagccaccttgcccagtggatgtggataacttaattattgctagtgagagtgtaagttaattgagccactggaaaactagcagtacctactaaagataaacatgcccccctaacctatgaccaggtaaattccactccatgatatgtacacaacagaaatgattgcatatgttcaccaaaaacatgttcacaacaactttattcttactagcttaaccctgaaaacaactcatgtctatcaacagaaaaaaatggtgtatttgtgaaaaggaatactacacagatataaaaaattaaattataaatgcaattggataatctaaacaatattttgttgagtagaaaaagacagacataaaagagaagacactatattcgttcatattttttaatgagggtcaagaataggcaaaactgaactatcaaaatagtgataccagttgtgaagggaaggaagtattcactggaaaggggcacaaggaaatgttctgcatctttgatctggatagtgataacttggatgtttgcatatgtaaaaaatccattaagctatacacttaaaatttatgtaccttacataagttgtatatcaatgaaataagaaatagtaataatttcaaaagagtagcagtccagagagagcattgcctgaggcggaaagttctatgatctgaaggcaatttaatctttctgtttctctttttcaggttggctctaatatagtggtattatgcttagagcacattggggaaataattaggcataaaggtacccatccttcagtaggaaaagtaactaacattagaaccagttcattatttctggctaaataggtaaaattttcactactacatcagtttttaagagcagttatttaaatgacccatagtaccagcgtattgttgaataaataggtgttggattaaaataaatttctctaaagtgaatgatctatataataagctaaagaaataatagattgtatgttttgggatcagagaatgaaaaaagggagggaaatggtatttttgattttttggttctcttgatatttaagcatctttgcttataaactgtaattcccaaaccagcccctccttcaaaaaggcccaggaattgaacaaaggaggaaaggaaagctaagttagaaggtaactgcatatcatgttcctgttttctctttctgtgtccaaaccacttctttttaatatttgcttcagttttagttttgttttatatttaacagtctagagtgtgatctggttatgtaatccgctaaaataaagtaagtttaggtattcatttttggattttacccataattttacagatcatttgtagtgaaaaagattttagtgaatctctacttttactatagcatgtggtttaccctatcctttttttttaaccttctgtattcttgataattgtagttatcttactattcatacttaaaggaagaaataaaacagaacccagaaaaccaccatgaaagccataggtactgaataacaaagcttttacacatcccaaggggtggtgtatagaaagaatgccttgtcgatcctacataatggaatctcaacatgtctaatttttttatcatttcccagttcattttatgtagccatgtctaattttttagtgtacaaggagaacattccagatggtttatgaggggtagtcacttgtggaacactggtcccttgttttggatatgaatttttatccttttggggttctcattaacaaatagtatcatttttatatcctgacaaagttgctgttttgttgtggtaagcagaaaaggataggcatctttgctttgccaaagcaatctgtatcttgaaaattttggaaactactattttactattagtctagtacagtaaatgtttcccttgatccttcttcctgttcctataactttttttttttttttggtgtgagaatttggtaaaaatctttgtaccttctaccttaaaaatgctcacgtaaacctaaactgaaatatcagaaagagtcatggactggaagttaagaacttccacacaataacaaaaattatgggccagacacagtggctcacacttgtaatcctagaactttgggaggccaaggtgggaagatcacttgagcccaagagttcaaggctgcagtgagtggtgatggagccatgcactcagcctgggcgacagggtaagaccctgtctcagaattaa

SEQ ID NO: 11897 - DNA, 2300 bp, Homo sapien
caaatttgtaatcagaccatattaatttcagtggttctcttaattaaagggtgaatcaagtgttatgtattattttgctaaaccgaacacattattttcgttagattagaagcagaatgtcagtgtagttgcagcagagcggaggcattgagtaaatgtgttgaataaataaatgaataaataccttatgaaggatttggaacccagggattcttatcattttctggacagtaaccggttttagggatgataaaacttttccccaaatgtctgtatacatacaaaactttgcacgtgaaaagtttagggaatttcacctgaataacaattgtattaaccagcagttaagttttatccaccacattaaacataagctccctcctcctgataaccttaaaaaaggtattttcagctctaatattctgaatgtaatgttggggaaaaaaaacctcccaggaggtgttattaatacaaggattcataaccagaattacatcaccagatattggaatgagcagtattaaatcagtcagattaccaatgagaaaagtcaataccaacttgtaaggactgaaatatttatgttaacatggttctttttatagatttctcacttaaaaattttctcactcacttaattactcaaagaacatcttcagttactaactggagaaactgaaaatgaaagaagaaatgggtgagagtggaatcctcccacctcagcctccccagcagctgggactacaggcacaggccaccttgtgtggctaatttttaaaaaaattttctttagagacactgggttcaccatgttcccctggctggtctggaactcctgggctcaagtgatcctcccaccttggcctctcacagtgctgggattacagagataaggcaccacaccaagccctgagtcagattttaataaattcagtttccattagagtggaaaattttcaaattaatgaattatttatttatatattttttgagacagagtcttgctctgtcgcccagtctggagtgcagtggcatgatgttggctcactgcagcctctgcctcgtgggttcaagcaattctcctccttcagcctccccagtagctgggattataaccttgcatcaccacccccagctaaattttttttttttttgtattttagtagagatggggtttcaccatgttggccaggctggtctcgaactcctcacctcaagtgatccacccaccttggcctcccagagtgctgggattacaggcgtgagccccagtgccttaccagaatggaaatatttaagtaaacaaaatatttctaaatgtaaactaatggcctacttatttagcaatttcagttcagttcttaggagtttaatatttcatctatattttaattaaccacagatattaggctttctcaaagataacattttgtcctaattttagtttctcaaatcgttattaaggttatgatggcaacccagcttgtgaagtaatagatgataataatatagtcaggaaatatcatttggtaaccaaggcttcagcaaagtattaagatttttgtgtttgtgagtgttataggtaacactgttggcccccaacattgtcattttgtacactttgttgatcagtggcctgaattcattaaaattcacactacatgcctcaaaaagaatattggatcccagcctaggttgttgagtatattcctgtcctttattaaaatgtaggttgatagaaaggtggtagggatatttaaatctatcatgctaatttactttctttgtatcacagcaaggatagggaattaggaaaagattactcactcaatagagaaaaggtagatagaaaatccagtattatcttgacaaagcagtgaatgttttagtatgattgaggataggtaatctagtgctaaagttggtcacagaatttcctgcacaaaatgaaagatctgtgtatgggaatgctagagaatttgacttctcagaaatatatagaccaacagtggttgccttttttcattttcacttctcttcattcttagatctacggaatccagaggcagcattgtctccaaccttccgtagtgacagcccagtgcctactgcacccacctctggtggccctaagcccagcacagcttcagcagttcctgaattagctacagatcctgagttagagaagaagttgctacaccacctctctgatctggccttaacattgcccactgatgctgtgtccatctgtcttgccatctccacggtaatgacctgacagagttaggatttaccactta

SEQ ID NO: 11898 - DNA, 2300 bp, Homo sapien
tttggaaggctaaggcgggtggatcacctgaggtcaggagttcaagaccagcctggccaacatggtgaaactctgtctctactaaaaatataaaaattagccaggtgtggtggcaggtgcttgttgtatgtactacaggcacatacaaccttgcctggctaatttttagtattttttgggcaaaacgcccaacagggttttgccatgttgcttaggttggtcttggactcctgagctcaagtgatcctccatcctcagcctcccaaagtgctgggattacaggcataagcctccatgcctggcctccttccttttgaaggataaataatattccactgtatgtatataacacattttgttcattcatccatgggtgggcgtttgggttacttctaccttttggctattgtaaataatgctgctatgaacctgggtgtatgaatatctctttgagaccctgctttaattcttttttgttttgttttttcttgagacggagtctcgctctgtcacccaggctggagtgcagtagcgcgatctcggctcactgcaagctccacctcctgggttcaccccattctcctgccttagcctcctgagtagctgggactacaggtgcctgccaccacgtccggctaatttttttgtatttttagtagagacggggtttcaccgtgttagccaggatggtctcgatctcctgacctcgtgatctgcccgcctctgcctcccaaagtgctaggattacaggtgtgagccaaccacgcccgaccgagaccccgctttaatgcttttgggcatatacccaaaagtggaattgctagatcatatggtaattctatttttgatttttgaggaagcgccatcctaatgggtgttatatatctcatgttggtaaagtatatttttttaaaaagaaaaatattacttaaaaaaatctttattttggccttggcaacagagcaagactccgtctcaaaaaaaaaaactttattttaatggaaacaaactatatttggccaggtttagcacatagtaaatatgtgaagtgctccagtatatttcttgagattgaagatgtgcatatagatgttgacacgtttaaggattcagcaaatttgtaatcagaccatattaatttcagtggttctcttaattaaagggtgaatcaagtgttatgtattattttgctaaaccgaacacattattttcgttagattagaagcagaatgtcagtgtagttgcagcagagcggaggcattgagtaaatgtgttgaataaataaatgaataaataccttatgaaggatttggaacccagggattcttatcattttctggacagtaaccggttttagggatgataaaacttttccccaaatgtctgtatacatacaaaactttgcacgtgaaaagtttagggaatttcacctgaataacaattgtattaaccagcagttaagttttatccaccacattaaacataagctccctcctcctgataaccttaaaaaaggtattttcagctctaatattctgaatgtaatgttggggaaaaaaaacctcccaggaggtgttattaatacaaggattcataaccagaattacatcaccagatattggaatgagcagtattaaatcagtcagattaccaatgagaaaagtcaataccaacttgtaaggactgaaatatttatgttaacatggttctttttatagatttctcacttaaaaattttctcactcacttaattactcaaagaacatcttcagttactaactggagaaactgaaaatgaaagaagaaatgggtgagagtggaatcctcccacctcagcctccccagcagctgggactacaggcacaggccaccttgtgtggctaatttttaaaaaaattttctttagagacactgggttcaccatgttcccctggctggtctggaactcctgggctcaagtgatcctcccaccttggcctctcacagtgctgggattacagagataaggcaccacaccaagccctgagtcagattttaataaattcagtttccattagagtggaaaattttcaaattaatgaattatttatttatatattttttgagacagagtcttgctctgtcgcccagtctggagtgcagtggcatgatgttggctcactgcagcctctgcctcgtgggttcaagcaattctcctccttcagcctccccagtagctgggattataaccttgcatcaccacccccagctaaattttttttttttttgtattttagtagagatggggtttcaccatgttg

SEQ ID NO: 11899 - DNA, 2300 bp, Homo sapien
ccttagtggtcactttaagcctgaaccttgattccagcttctttccaatgccttcctgggtcattaaacttggagtcctcctcttctttgaaatcacgttttttttttcctgtttttttgttttgttttgtttttgttttttaaaaagtctatgcccatgctacctcatgctgtgaagatggttcagtattaataaactggctcacagctccttgaccagattataaactctttgaaaacaggagccatgccaatcaaactattttttgtattttttggacaacagcgtatggcatcatgtagacattggataagtcagtgattcccgaaatgtttccattcagggagctccattaaaaaaaacaaaacaaacaaacaaacaaaaggccaagccggtggctcatgcctgtaaccccagcacgttggaaagccaaggcaggctgatgagctaaggtcaggagttcaagaccagcctggccaacatggtgaaaccccatctctattaaaaatacaaaattaactgggcatggtggcaggtccctgtaatacctgctactaggtaggctgaggcagctagaatccgggaggtggaggttgcagtgagctgagatcacaccactgcacaccagcctgggcagtaagaatgaaactctgtgtcaggccaggctcggtggctcacgcctgtaatcccagcactttgggaggctgaggcaggggggcagatcgtaggggcagatcacgaggtcaggagttcgagaccagcctggccaacatagtgaaaccctgtctctactaaaaataaaaaaaattagccaggtgtggtggcacgcgcctgtaatcccagctattcgggaggctgaggcaggagaatcgcttgaacccaggaggcggaggttgcagtgagctgagaccacgccattgcactccagcctgggtgacagagtgagtgagactccatctcaaaaaaaaaaaaaaaagaaaatgtgtcaaaaaaagaaagaaagaaaggattgtaggaaaaaccaccaccaccaaccttgtatttaagtttactacacatacagaaaagtgcacaccaaaatgttcagctcaattacatttcacaaactgaacacactcatgcaggtagctctcataacaaaaaacacaacgcaaccaggacctcaaagccctcttagtgtcggaacccgattttaatagattacacgtactttgtaaatttagcctaagagagagatcacgtatttgaagacctctcggatttttccttcatcagccctccccacttccccacgcctcgtcaacacaaagaagcatgcccgcacccaccaccgccccctcctcacctcagattggggaccaccgttgtgttttttatttttttatttttttgtaaatgaacgcatggaaacaaaccaacaccaccttcagtggaaaaggtatgttagtaccaaactgtcaaaaggaactagtgatccttcatcttaaaaatctgtactatggccgggtgtggtggctcacgcctgtaatcctagcactttgggaggccaaggagggcggatcacgaggtgaggagttcgagactggcctggccaacacagtgaaaccccgtctctactaaaaatacaaaaaatctgccgggcgtggtggcgggcgcctgtaataccagctactcgggaggctgcggcaggataatcacttgaacccgggaggtggaggttgctgtgagccgagatcgcgccattgcactccagccagggcgacagagtgaaactccgtctcaaaaaaaaaaaaaagaaaaaaacccccaaaactgtactatatggtgttgctctctacgagtgctactttaacacaagtcaactctcaggactcctctccgaatattcaacatggccgcatgcgcgtctataagcaacatggccgctctgccagtcaccaacatggcaaccacagcctcactgtgtccggaagcatgagagagcgggtatgaggactataccggccgctctgccaacacctaacgtggctctttatagcttccaagaaagcgcgacaccggaaatgacttttctgtcttgctcagctccaggggtcattttccggttagccttcggggtgtccgcgtgagaattggctatatcctggagcgagtgctgggaggtgctagtccgccgcgccttattcgagaggtgtcagggctgggagactaggatgtcggacacgtggagctctatccaggcccacaagaagcagctggactctctgcgggagaggctgcagcggaggcggaagcagga

SEQ ID NO: 11900 - DNA, 2300 bp, Homo sapien
acctcagaaattaataagattaacaaacaacatggaaaacagatctaattttagtatatgtgtatttaaggttacttcgattattttgctactgacaatgtaaattatctcattgattaaattcaggactccccaaactttaaaaatctcacatgtacatattaatttttttagacttttttttttttttgagacgcagtttcactcttgttgcccaggctggagtgcaatgccacgatctcagccccctgcaacctccacctcctgggttcaagccattctcctggctcagctgccccagtagctgggattaaaggtgtaccatcatgcccagctaatttttgtatttttagtagagacggggtttcaacatgttggccatgctggtctggaacttctgacctcgtgatctgcccacctcccaaagtgctgggattacagtgagccaccgcgcccggcttttttttttttttaaagtaatggggcctcactatgttgccgaagctggagggcagtggttattcacaggtgtgatcacagctcactgcagcctcaaactcctggactaaagcaattctcctgcctcagcctcccaagtagctggggctacaagtgtgcaccaccatacctggtttacacattaatattgtccaatttttcaattttttgtccccacaatatttttctgagtaaaatactgcagctacaatattaccactttatgaagagggaaacggtggtataacatggtgtgactgaccaccatgtctcagttttatcagtgaggcaagaatagaactgggattaaaacaatttaggtttactgatgcccagggaaaccacaaaaccaaggacttgtggtcacttcctgcatgtaagagaaagtattttaggaagtgggaagcactttaagactcatttcaaggtaaaaaagagaatgccagaatacctggtccaggaggcattttattcttacttatcctgtctgaataggaggctgcctctgtgatggtgagcaggtgttagctatttctaagcattcaaatcaggctggggctgaaagggctttagacactgagggctgcctggtagttcctaccgcattgtttcaagagggctcccctcccccccaggttagagctgggtgggcctccgtaggcctctgcaggctagcgtctccccaaacccactgtctttaatagtgacggtgtgaggaatgttgcaagaggagaatagaggaggaagagggtactaaataggagatggcttattaaataagcatggactctatgaattaggtgttgtgtaggctgggcgatctgcggagtaacctgcattcagctattattcagggggaggaggggcggggagtgaaggggcttagtgttccgcagagagtcctgaaatgacttcctgggaaattctaccttgcagccgcccaccctgagaaacttcttttgtggagagggatgggggtagggtgggaatggaagtgagaaagacgagacaaaacttcgaatattttggggtgtgtgtgctggtgaggagtggatgttctgatctccccctcttcttctggccctcagacctctgaggagatcagacgaccctctctggaatccactttttccaagctcagcggatcctttatccaaagaaaaataagagaagcctatcgccttgctccactgagcagggctacgtttcccactgtgcccctagagcttaggaggggagggcggggggaggagggtaggcctgggcaaaggcatctgcagatggggggagctggccagggaccgggaaaggtggacccccgcagtgcttcacagcacctgtcactgcgcctccggaaactctcccgagctctgagctcccgcccccacgcccccgctagcgctcccttctcccgcctcctctagctcccgcctccctccccagcagctcctccccataaactcccctcctcatcagctcctcccagatctcccctctccccgctttctcactccagcttctccccgcctcctcgctcccctccccctccgccgctgctccctgcccccgccgctgccgatctccatctccgcagtctgggccgctgggtgcagaggctgccgcagacccagcggccatcgcctccctcaatcccaatatccattgtctcccaccccacctggccctccacttcccccacaaccatggcgcacgaatccgagaggagctctcgtctcggggtgccctgcggggagccggcagagctcggaggtgcggtagggtcggtcgggctgggcaggggt

SEQ ID NO: 11901 - DNA, 2300 bp, Homo sapien
ggtcaagaggccacagtggagaggtaaaaggaaaaaaaatggtaaactgggtagggaggaagaaagaagaggaggggaaagagtccttcctttcacaataagacccacaagaaggagggggaaaaataggaaaagatgaagacagccaagattcaggaaaaaagacaaatgtggaccctgaaatctgctcccttggagatttcagactcctgagaaaagcagaaagctattttccttctctcctttcccttcctggaaggaaataaatgatggaaacagtggggtgagaggatgacaggactcagtctattccacggaggaatcagaagctttcctaggctcagtacccctatttctcctacaatggtctagtaataaataatggcacctgtctaccacaggggagttaataggatgaattacataatgtcagcaacaagagttccaagggtagacttgagaaagccacccagggccctgacaccaaaggactggaaaaaaaaatggagattcagtgaactccaaagcaaagatgagagcattttccaaaactcttcagatgtaatgtggatacctgcttcaattatcactagcagcacccctgccatctgctgtctcccttttcctttcttggtattgccaaactagcttgaaattgtgtaagggaagaaatgcaaaaaccttcaaatttgcacccaaacctgtgagtgagctttcttttgcttttctctgaagataaagccatcagagatttacattactaatcctaaaaggggaaaatacttcccacttttccaactgatggtgtttcagatgctatctcagccagaagaataaaacagaaatcatgctaaaagaaaggggcccaggcattattgccagaagacagggcatatccagaatattctatgcccagtagctcagtagtactcaaatataggtaggaacatcacagccagaagttaaaaataaatgaatcaccctcagtgtacaggctaagcaggagaaacctggttgttgccaaacagtgtattgtggagatggagggattcctttttatttattttattttattttatttttgagacagagtcttgctctgtcacacaggctggactgcaatggcgcgatctcggctcactgccaccgctgcctcccaggttcaagtgattctcctgcctcagcctttggagtagttgggattacaggtgcccaccactacgcccagctaatttttgtatttttagtagagacggggtttcaacatgttggtcaggctggtctcgaactcctgacctcaggtgatccgcccgccttggcctcccaaagtgctgggattacaagcatgagccaccgtgctcagcctaatttttgtggttttagtagagatggggtttcaccatgttggccaggatggtctccagctcttgacctcatgatctgcccaccttagcctcccaaagtgctgggattacaggtgtgagccaccgtgcccagccattgctattttaaatgagattccttgagatcaatcacttttgtttttcatgatagcagtttggtggcatattgtgtctttactgatatagaggaaacaatgttaggctactgtcagatgcacctggattccaggcctgtgtctgatacatcacagctgtgcaactttggagaagttacttaacctcactgggccttttgattcatctataaagggactcagctataaataggagtagtaaagcctactgtgttcatctcagagttataacattcaaaacacgttataaatgaaaatattctataaattataaagagctatacatatattactcataatcagggcatatcagaaggttcttatttcagtttataccctaaaagcagctacattatcagaggggcatagaaatatgacagaaccaaaaagcacagtgaagatcttggaagaagagttagaaaaacaagccagggacagtttctgaacagacagcacagggagaggcccagggcccttgcagggaggagagggttaaatcctttcctctgcagtacaaaagaaaagagtgtgcggaaagattaggatttttgcttttacaatgggagctgcagaagcgtagggaagaagctgaagaaaaaaagggggcgtctcccctttaaagacttgcaaagattgagagagaaagagagagagtcaagaacagagaatcagagagagagagagagtctgtgtctctgggaaagaagaacatctctgcttcacagtgatttgcgctgggggagaggcatcaattggcttcgga

SEQ ID NO: 11902 - DNA, 2300 bp, Homo sapien
gtggctcatgcctgtaatcccaacagtttgggaggctgaggcaggaggatcgcttgcagcctggagttcaagagcagcctgtacaatatagcgagacctcatctcaacaataaaatacaaaaaattagctgggtgcctgtagtcctagctacatgagaggcagaggcagaaggagcgcttgagcccagaaggttgagcctgcagtgaaccatgatcccgccactgcactccagcatgggcgactgagagagaccctctctcaaaaaaaaaaaaaaaaaaaaattcatgttaatctaaataacagtgggaaattgactacaaatgaagatatgaagcctggagtgtgataaaagcttcaagagtttcaagaacttcccctgtaagatgatggagctcgacaaagactggatgatttctaagtttcttttaattctaaagtaagaaaatgttaggcgtgtgtgtgtgtgtgtgtgtgtgtgtgtgtgtgtgtgtgaagttgcactgctacctgttgccacaagatgacagtatcatctttattgaaacaaagtacagttgctatatggagtaaatagaaataaatccagagagttcatgagggatataaattactttggtaaagatattatatgtgaggcattaattagtttgggaaaactatgtatcaaaaagagttaacttccttttgtaacacatgggaaatagtttgaaatatagttttcttcctccctccgtcttttccttcctgttttacacctagtcttcctccttccttttttattctttctttttctttcttccacattctcagtttattatgtaacaaatttcaagtcaaaggaaacagagatatataagaaaaagttaacattttcaccatttcttttaatttcactcatctgaagaaactaattttttttttttttttgagggagttttgctcttgtcacccaggctggagtgcaatggtgtgatgtcagctcactgcaatctccacctcccaggttcaagtgattctcctgcctcagactcccgaggagctgggattacaggcatgcgccaccatgcccggctaattttgtattcttaatagagatggggtttcaccgtgttggtcaggctggcctcaaacgcctgaccttaggtgatccacctgcctcagcttcccaaaatgttgggattacaggcgtaagccactgtgcccggcagtaactaatgttaatagcttttttctcatttcttcctgtatattcgtacatgtacatacacctacagacatacaaattatgtttcttttgaactttaaattaatatctgatcatctgttgggagacaaatttagatggttgaaaactctctgtttcttccttattgtcacaaacaccaccaccaccactaccaccaacacacacacacacacacacacacacacacacacacaccccccacctctaattgcaaccttgtttccatttcttcctgtcttgagaagagaaacacttatggggaaattgaatactttgtctttttttttttttttttttttttgagacggagtctcactttgtcgcccaggctggagtgcagtggcgcgatctctgctcactgcaaactccgcctcccgggttcccgccattctcctgcctcagcctctcgagtagctgggactacaggcgcccgccacagcgcccagctaatttttttgtattttttggtagagacggggtttcaccgtgttagccaggatggtctcgatctcctgacctcgtgatccgcccacctcggcctcccaaagcgctgggattaaaggcgtgagccaccgcgcccggcctactttgtcttatgttattcccatttgccgtctctgttccttatacattatgctttttcaactttaccagaatcacttggattaaaacccgtggatttctcagtaggaaatgttcatgtgaagacacttctgtagtaacagaacctacagctgctcctgtagaaggaagttgaaagtcatcccttcaagaaaggggctcctccccttgtaattctactgggttttgcatccagactgagtttccttccctcacccacatgaagtgtctaccttctgcagactccaatggctcaggaactgggaatgcagtgccaggctcgtggtatcctgcagcagatgtggggagttttccttctttatgtttccatgaagatgggaggtaagtctcaatctaatagcaaatgctgctgggagttttcaaaacgattttctttcagctaaatgattgccatttctgacactcgtaaca

SEQ ID NO: 11903 - DNA, 2300 bp, Homo sapien
caataatatcatattacgtaatttaaagaagtaagtttcttaagtattttcttagctccattgtgaaggaaggcttgagttctttttcaggctgcctaagaagttaggttcagttcaagtaaaaattgtttttgcatacccattgtgtacaaggcacctactaagtgctgcaaaggataagtcctgtgtggttactactcttaaaaaaattttagtctgggcgcggtggctcacgcctgtaatcccagcactttgggaggccgaggtgggtggatcacgaggtcaggagattgagaccaccctggctaacatggtgaaaccccgtctctactaaaaatacaaaaaaattagctgggtgtggtggtgggagcctgtagtcccagctacttgggaggctgagataggagaatggtgtgaacctgggaggcggagcttgcagtgagccgagaccatgccactgcactccagcctgggcaacagagcaagactccgtctcgaaaaaaaaatttttttttttgatttagtggagagcaaaaatgaacatcttattttactttattttacaggtcaaggaccataaaagaagcctgagagggaatagataggctttgactgggtcaggaaagttttcttaaaggtagtgttctttgaaatagtcaaagacaaagtgaaggatgaatagtatttttttcttcacctttaagttcatggataagtgtgcaggatgtgcagttttgttacataggtaaacgtgtggcatggtggtttacagcacagatcgtcaggtattaagcccagacctccacaggtgtagagtgggtccacgtgttctcattattcagctcccacttataaatgggaacatgtgatgtttggttttctgttcctgcattagtttgctgaggataatggcttccaagtctatccatgtccctgcaaaggacatgatcttgttcctttttatggctgcataatatttcatggtgttatgtaccacattttctttattcattctatcattgatgggcatttaggctgattccatgactttgctattgtaaacagtgctgcaatgagcatacatgtacatgtatctttataattgaataatttattttcctttgggtatatacccagtaatgggattgctgggtcaaatggtatttctggttctagatctttgaggaatcaccacactgtcttccacaatggttgaactaatttacagtcccatcaacagtgtaaaaatgtcccttttcctccacaacctcaccaacatctgttcttctgttgttttttggctttttcataatagccaatggtatctcattgtggttttgatttgcgtttctctaatgatcagtgatgttgagctttttttcctgtttgttggccacataaatgtcttcttttgagaagtgtctgttcatgttctttgcccatttttaatggagttgtttgtatattaatagtaaacaatgaggtgaggagagtacacttgaatagagtgtatgttttctgagcagagggaaaagaaaaagtaaagacaaagattttggaaggtaagtaggtggaggtaggatgcctggaggacagtgacttgcttggtcggagagaagaattaatagggagaataaaaggacactcacattgaaaaaatgaaaatgtgcatcagactgttgcaggctttgaatgtatatctaatttgatagaagagtcaaattatttagttgggagttgtattggaatattagcttaatgttatcagtgctttagtttgaagtgaaaagagccaaataactaatgtgtaaggtttcgggcatttatttattcttgtaaaggctcactgatctcatctgcaaggcagaaacaattgattcatgtgccatagggtggttgtgtttaaatagaagtgcctggcatggctcctggtaagtagtgggtatactgtaacaactactgttaaattgatttcataagctatatgctctgatgataaataagcaattcagataagaatacaaagtcatttcaattagttctattcctataataataaaactaaattagctttcattttttcccccctaagctcattgaatggacagtctaaaccaaacaagagtgactgaatttgtcttcttgggactcactgataaccgggtgctggaaatgctgtttttcatggcattctcagccatttatatgctaacgctttcagggaacattctcatcatcattgccacagtctttactccaagtctccatacccccatgtatttcttcctgagcaatctgtc

SEQ ID NO: 11904 - DNA, 2300 bp, Homo sapien
ccagtagtatgtttgcagaaatattctttagtgtatacatcagatgatatcgtttggatatttctccccactcaaatgttgaaatttaatccccagtgctggaggtggggcctgatgggatgtgtttggatcatggcagcagatccctcatggcttagtgctgtctttgtgataatgagctcttgtgaggtctggttatttaaaagtgtgtgacactttccaaccccaatttgctccttctttcgccatgttacatgcatgctgcttctttgccttctaccatgactgtaagcttcttgaggcctccccagaagctgatcagatgccaacaccatacttcctgtaaagcctgcagaactgtgagccagtcaaacctcttttctttataagttatccagtctcaggtatttctttatagcaatgaatgaatagctaatacagtagggactatgcctagcactttctaggcagcaatggaagggctttgtatattcagtagtgagtgttcttgttgttggttgagtgaatttgtagtgttagggtgagtagtgtgagatttgattgattagagaattccctgtgctgtgtttaaacattgtttttggctgtatagcattgaattctcactgcctatctctgctggagagtctgtgatctatttaatatatcttaatatctttcttttctacttaaattagcttagtagattttattaagttacatctgaatatttgactgacaaaaagaggatcttgctaaagctaagatagtaaaaatagtatagtagtattgcagagaaacaacaagatgaatataaaactcaggaagttcaataggtacatttgtgaatcaagttcataggtgagtctaatatgataacgatgatgccacaaatctttagggaatggtggattatttagtagattgtgctattaaaactgtcctgctctatggagaaaaataaagtagttgggtcttctacagatgtaaattttagatgaattaaaacctaaatgtaaaaaacaaatctataaagataataaacacagtgtgggaaaatgtatttgtggctttggggtgaagaatgatttctaaatcaaaatccctaaagcccaataaggtgaaaaaaatgataatgttgattccttcaaaattaaggatttccattaaaaaaaaaggacaccatagacaaagctaatagactgggaccatattagaaaaagatacttgtgattttggatacagcaaaaaattaatatatgagaaactcttatgatttactgagaaaaactagaggtctaattttaaagtgagaaatcatgtatatggataacatgggaaagggaaatacaaatggctcaatagactaataatcagggtaatgcaagttgacattccatactcagtagattggtaaaagtagacagttttataatactaagtgttgttgaggttatggaaagactggaatgctcatgcactgctcgtagaagtgtaagtggctgtagctactttcaatcattaccgtcgtgaaattgagtatgtgtatgtactatgattgaacaatccttgctggggacatatcctagagaaattctcacatagttaataggtgaaatgtaaaaaaaaaatgttaattgctgtgtttgcaggagttacaggcagcctataattccatcactaggggattgcctaagtaagtgtggtgcatgctgaaatactgtgcagtagttactttgaaccaaaagtacataaccagtatctaaaaagagttttaagttatctgtagctctgtactaattggcttcagtaagaagctgcttaaagccttaatcagcttacttgtcaaattgtattccttttgtgttcccctctgtgttttggttgtcagaaatttcagagctcaaattaatcatagtagcgatcttagtccttccactaaatatatctgtccacttccctttgatttttctatcctcattttagaggcatttttgaattctgtattttatttggaagctttttgaggtcgtatatataaataaaaggtttctgttggacctaaatgatcatcttatcattattactatttttatttttagacggagtcttgctctgttgtccaggttggagtgaagtggcgcaatctcggctcactgcaacctctgcctcccgggttcaagtgattctcctgcctcagcctcccgagtagctgggatcacaggagactgccaccatgcccaggtaatttatatatttttagtagagacagggtttcaccatgttggccaggctggtct

SEQ ID NO: 11905 - DNA, 2300 bp, Homo sapien
actagactactgttttagttaaacttattttatttgcttttttatgttgatcatatcatatgttgatatatgcccatatatgcttttatagggcagcaataaactccagtgtcaggaggctggacagtctctgttttcctcttcaggtctattctatcctgctctgtactaaagtctatattagactattgttttaaacttattttatttgtctttttatgtttgtcaaaatgcagtatagctatgcccgtatatgcatttgtagggcagcaataaactccagcatcagagggctggacatttctccattttcctcttcaggtctattatatcctgctctgtaccccaggaggctgacttctatacgttatgtggactggtctcccatgtccattggcatctggttgggtttaccccagtgggaggtattagcaggagagagtggtcaagatatttgcattttaggatcctttctttcctctactgaagtttacagctcctgttgggtctacccagaatatggtcaagaagaggtatttagactgtaaagggtcatgtcgcctttggcctgtgattagttacaggtgtcctgagattagggtaatttcatcttctcccgtccctttgggcctaggagtggtgaaatcttctggctgttattagccccaggtgcttcaccttcccttgtagttttccctaaattttgcacatacacttaaaaatattctttttgttaagctttttttcaatgattttctcgaggcgattgccaggaccctcaaaaagacaacactaacactcattttaggcttgaggcagagagagaagaaagagaagaaattcactatatgtttccatttatgacaagtctctctggaacttgaagattattgtttaaagacagtttaccaattccaaagaaaaacattattatatggctaagttttcaattattaaatatgagatctttagcaaagcttttagaaagaattatgttccactttttttctgattcaaagcaaagagatttttcatcctttcctcagaatatatagtgaacattatttggacactattcaaaagaaacagaaggcaaatcagaggaacaacttctttatattgatacatgctttttacattaaaattaaaatctatcaaagaatcactcagttgctattgttgcctttttttagtataaaactttagcatgccatccgtttccaatgaaccccttttccccatcataatacatcaagtttcgttaaccatacattttttgctgaatacgtacttcatttgaagtctgttttaagtaggctctgcatgtggaaagtacctgttttgcaaccccttctcagagtttcatttttttgttttatatctactgtttaatatgacaaatgctccaaaaatatttataacacctattcgtacttttctcactctaaaaatgtttaaagagaagattcaagtttctttttgccctaaagatcattatgggatgggctcctaataggcccaacgtggagaaaattctgagttatttttggtcaaagaggtttacacagaagccagctctgaattacttctaacgagaagagcaaggctcctgttttcgcctgtcatttatcttctcttgccttactcttttctcctattttgctttttcttatctctcactttaaatttttctctccctcttgatgcaaagctatattttcctttctttttctgtgcattttcccatcctatttcccttctttctgtctctacattatcttaagagagcacaaatcatttacagcttgatccactcagcccgaatcttttccactttgattcacaaacttctatttcttctcctttgaacccctaatttgctccctatgtccctcatggagcgtgtaaccatccaaaggttggcccagggataaggccaggaagcaccagctgcttgacagtaaagtcgctggtcctacgtgtgggctctagggggcgatgcagtgtaaggtctgtcctgggcataggcggagcggcagtcttgctcctcacagagctttgaggagctggatcaaaattgtgctccacagagagaagataccggtgtcgggaagcaccagtgccctgaggaagggccatttccaaaagccctgtgctgacacagggttgctggttcctcttcaagagcccactctctggggtggggccatatctccagcagaggtgggctggaaaggacccccccaatcccgcccgccgtgagcttagctggagccatggcctctgcacccatctcgatg

SEQ ID NO: 11906 - DNA, 2300 bp, Homo sapien
cctctcgggttcaagcggttctcctgcctcagcctcccgagtagctgggactacaggcgcgcgccaccaccacgaccagctaattttgtatttttagtagagacggggtttcaccgtgttagccaggatggtctcgatctcctgatctcgtgatctgcccgcctcggcctcccaaagtgccgggattacaggcgtgagccacagcgcccggcccatagtttgtatttttatagaacactctcgtttagaaataacttacttatgttcatttaatccttataatctctgttgccgagatgaagaaattgtgtctctcaaatggtgatttgaacaaaatctcacagctatcaaatccaaaggattgtttcaattcagtgtgtctaacttatcactcagtgttttcttccataactgaaaatagacttcatagtccaaaccaagctctctgctattgcgtttacaaagaaatgtgacgttccataaattgtgccgatctgagacctactgacttgtgtgaaacattttttctgagtatagttaccacaagaggtcgctgttgcaacgagttgcgtttaaagggtaacccatttattttcatttctgtacaaggtgttctagtatcttcaggtccctcataaaaacatctttgctccttcacttgttactgaggaaagcctggttatttatttcatgacctgtgatagctcctctgtcaaaatgttactagaagccatcaacactcactgattttttttttgcatgggaaaatggaaaaattgctgattcagaatgctttcggcaattctagacctagaagaggcacctcccaaatattttccagtgatttttttcattcctatattataagagaaaagaactcaaacaacataccactatcttttccacattaatgtgagtatgtaacaggttttgtttctagcattcggctgattcaatgagtactactgtgtcttttggattcaatgaatactactgtgtctttcggctcttttcctgaatggctttatttttcttttcagtttttgtgcttctgttataggatttatactaattatttcctgaaggaagtgtgtacagtaactacaaaaaattagatatataatcctacacgactgccttctactagccatggtactctgcgctctgaatcagatgagaagaaagggaaaggaactataatttactgttgactacgtgccacagattgaaaccctgaaatacatattattgttcccattttacagatgaagaaaccaagactcagaggagtgagctgcctgaggtcacaaggtggcagagttgagatttagatttagatctgtctgacacagcctgtgccttttcttcttgttcaccttacctcctccttggttaagtgagtgattccagaccaaatgtcctatcctagctggtcagcagggactaatgagaggtttgttcctctgttaaatatctgttacacagggtctgagaagaaggtattagttgtggacttagtgggattataaatgatcccagggaatcaggagatggaatgtccagtccagactgcctcatttgctctttcttggaataggattaggaatccctgtttcttcttggctaaataggggtcagtggagcactgcagggcataaagtaacaagtcaggcaggttacacttagaccatgactgtcaatgagtccatgagtgtcagaccgactacagtacatgaccaccctctcgggctgtggaaagtaatgtaatggggaataggagcccaatgtaatctaccttctcatagctttgcctcatttggaccaaatctttaagggattagacctctgcaaagatctaaaatgaaattcaggctgctgtgcttcagtaccagcagttttcactccctactcttcttggggctttagctgaactttgaggggagccctgctctgaggagctgctgccctgctattggctgctgtactggggcagcctgagtgacagctgctggtgtgggccctggcagttgctgctgggctcattgcagctcagacacagcaaaagagcctagaacctgggtcctagtttgcacctagaatatgaggcaagtggcgagagtgatcgtgttcctgaccctgagtgagttattttgggatgaagaggaatgggatctgggcctgatgatgctggaaaggaatctggaactttgcctgctagcagttgctctttatccaagatgtagagggatagcttcagggttccatttttctccaggcagctcctgagcatttatgtgaga

SEQ ID NO: 11907 - DNA, 2300 bp, Homo sapien
ctcatcactcaggtgtactttctatttcatattattaataacaaattatactcattatcctgtatttataaatataatgtgcatcacatacagagtgaaagaaaaaatgaccaagggaaagaaaaagtagataaattgggagcaaaatgaacattgcttatgcatattgaaatccatgtcagtactagaaaataaagctattccatgccattgtttttgacaataaggcaacattttatgaaaaaatcataggggtagaaatttttccagaccataattgtgagtagtgttatagtaaataggtggaacagaagcagaccacctaacgactagtattttcaactctgcatgctatatatccgaaggacagatattgacctaaactgttaagaaaagttcaaggaaaatgcaactaagaaatatgataaaggatctgggaattatatgatatgatgaatgagtaaaaggataaaacaatttaaatgaaaactttaaataaatacatttgatgtatataaatctaaatacattttgtaatatgtacatatctttgtattttaggaaagtgattctgtataatcacacttgagatatattagttatgccatgcagatgaggaattagattaattttctacattgcttggagatctactaagtcaaagcacagggaagggactccaacttgtgaaaaacagtcagaccaagtttccctggacggagagtaaatttgccattgtcagtttcctacatatattatgctactaacaggcattggttttatgcttacttatatttattattacaggaatgaatcagaaagactaaagaaattaaaatagatgatgtagggtttggatagaaaatttaaaatactgaaggactttatcacaggggaatatccaaacaatgattttagcaatagacaataaaatcgagggaaaagtttttgggtctgaaatctgagttagcagtgcccagggtaacaggaggggaaattccactacagatcattcattattcagtgatcacatttgaggacaagccactcattctgacaataggaataagaatacacttggaaaagatgtacatttgtttacattatctcaatctgtagtctgatgtttcctgagatgtttcctcttttatgtcaatactttgcaataagtaagccacatatccgtaatttcagatgatctgttcttccagaggaaaatatttcagagtgcatgtcagatttttcatcacaatctataggctaaactctttcctttcattagaccaatattattaactcatggaagcctttctccctccttttatcttttattgtataatttagtcattttgaagaaaacaacactcatgttttgacctctggcactgtcaatttcctgggaatggcaagaacaggaacaaggccaggcttggaggagcagagcctgagatagcatgcatctgatatatttagtgaacctgtcttactccaatttttgtgcttaaatgctagcttcagaaagagttttcctctgtgagtgctgaaacaggatggctaatttggctgattgattttctggccaattcaaaaaatagtagagggataaggaggaaacgttttatacctcagtagctttgtagactgaatcatggcattttcttaatttcaagaagactgtcattaataaacacgaaaaacctctaacttcttcaaatatatttaacgtgactcagtagtgtgccgagaagatgcaatggaattctaaaacctacgtttgcactttttctgtctgctaatccacataatttctgactggaggtacacttggaatttactttatttggccttctgctgtttgatgtgccagaatctcccacagatacaggataattggtttagcgtttggggatctggccacaaggtggcagagcttctctgctcatgtagaatgtacgaaaggatccttttggttgacttctgtgagtaggctgacggcagaagcagatgcctctgtggacagtttaagaaaccacagtgctttggaggaaaggaagagatacttgataatatagctctcttggctggagattgcaggtcccagtggggagaacaatgaagacatttgctggattttcgttcctgtttttgtggctgcagctggactgtgagtcgagagcttttggggaacagagggtttagtaaatactcattagaagtctgaggaggagactcatctggtcttttccagaatgtctgaagttactacagtgaaaaaaataaaaaagcaaactccagagaat

SEQ ID NO: 11908 - DNA, 2300 bp, Homo sapien
cttccaacactatgttgaataggagtggtgagagagggcatccctgtcttgtgccagttttcaaagggaatgcttccagtgtttgcccattcagtatgatattggctgtgggtttgtcatagatagcttttattattttgagatccgtcccatcaatacctaatttgttgagagtttttagcgtgaagtgttgttgaattttgtcgaaggccttttctgcatctattgagttaatcatgtggtttttgtctttggttctgtttatatgctggattatgtttattgatttgtgtatgttgaaccagccttgcatccctgggatgaagcccacttgatcatggtggataagctttttgatgtgctgctgggtttggtttgttagtattttattgaggatttttgcatcgatgttcatcagggatattggtctaaaattctctttttttggtgtgtctctgccagggtttgctatcaggatgatgctggcctcataaaatgagttagggaggattccctctttttctattgattggaatagtttcagaaggaatggtaccaggtccaccttgtacctctggtagaattcggctgtgaatccatctggtcctggaccctttttgttggtaagctattaattattgcctcaatttcagaacctgtttttggtctattcagagattcaacttcttcttggtttagtcttgggagggtgtacatgtcgaggaatttattcatttcttctagattttctagtttattcgcatagaggtgtttatagtattctctgatggtagtttgtatttctgtgggattggtgttgatatcccctttatcattttttattgcatctatttgattcttctctcttttcttctttattaatcttgctagtggtctatcaattttgttgatcttttcaaaaaaacagcttctggattcattgactttttgaagggttttttgtgtctctatctccttcagttttgctctgatcttagttatttcttgccttctgctagcttttgaatgtgtttgctcttgcttctctggttcttttaattttgatgttagggtgtcaattttagatctttcctgctttctcttatgggcatttagtgctataaatttccctctacacactgcttaaatgtgtcccagagattctggtatgttgtgtttttgttctcgttggtttcaaagaacatctttatttctgccttcatttcgttatataccctgtagtcattcaggagcaggttgttcagtttccatgtagttgagtggttttgagtgagtttcttaatcctgagttctagtttgattgcactgtggtctgagagacagtttgttataatttctgttcttttacatttactgaggagtgctttacttgaaactatgtggtcaattttggaataggtgtggtgtggtgctgagaagaatgtctcctgttgatttggggtggagagttctgtagatgtctattaggtccacttggtgcagagctgagttcaattcctggatatccttgttaactttctgtctcgttgatctgtctaatgttgacagtggggtgttaaagtctcccattattatggtgtgggagtctaagtctctttgtaggtctcaaggacttgctttatgaatctgggtgctcctgtattggctgcatatatttttaggatagttagctcttcctgtggaattgatccctttaccattatgtaatggccttctttgtttcttttgatctttgttggtttaaagtctgttttatcagagtctaggattgcaatccctgcattttcttgttttccatttgcttggtagatcttcctccatctctttattttgagcctatgtgtgtctctgcacgtgagatgggtttcctgagtacagcacactgatgggtcttgactctttatccaatttgctagtctgtgtcttttaattggagcatttagcacatttacatttaaggttaatattgttatgtgtgaatttgatcctgtcattatgatgttagctggttattttgctcgttagttgatgtagcttcttcctagccttgatgatctggcaacagagccagaccctgtctcaaaaaaaaaaaaagtaaaacagtaataaataaatagatacatatacagaagatacaaggagacaacttgcacgaggaaaagccacatggttcacaaacatatgggaaatgtttaaacctactggtattcacaaaagtgaaagcaaataacttaaaaaacctatcaaggaagagggccaaataggaacagctctggtct

SEQ ID NO: 11909 - DNA, 2300 bp, Homo sapien
gggagataatttggaaaaaatgcagtgaaacatactgctctggtgggagagtaaacttgtaagccattttaaaaagtaatttaaaaacatgacaataatctaaaaaatattcattttcttcattgtaatgattttctctagagaatctgtcttcaggaaaactctaaatgcatataataattatttacaaaggtatttggaaagttatgtacactaccccaaaatggaaaaccaaaatgtctcatctttaagggaaaggcttaatgacacaaatggaatattatgcaccaaataaatggtgtttacaaagataatctacaatgattattgaatagtaatgattattgaatagtaataattaaaaagaatcaagatatcgttgccacttaataaaaatctgaatagtgcaaatgttgggaaaaaacgcactgagatattgataatgcatatctttgcttgataaggtaagtagtgattttctctttcatcctatttttatcagttttccaaaatatgccttagttgattaaaagtctttccaatccaccattttctgtaaattttctaaaattactcttagctctgaagttcaatgaccctggttcagtcacctatacctcacaatgagaaagcagcaataacctcctgattggttttgcagccactattggattccttttcttatattaatagttcatatttattcagttcttactgtgtctgatgcattatataaagcattttatatacattagccaatgcattgtagtgatatcccccattttacagataaggaaattcatacttagagacattaagtagcttgctcaagctcactcagagattaaatggaggagtttcaaagccaggtttgtttgaggctggaatacaaactcttaactattctttcatgatgtctatcaacatacttctccaaattattcttgtagataagcagcctaattaatagaatgttaacagaatagaatgtccagtatatggacttccattttcataatattacctcctcaaaagcctcaaaagttccttgtttgctaacaaataacctacaaatgaatcctggcattcaaaaccttttgttttctagacctgaattctccttccaacttgattttctgctacattctagcccattctctctttcttctatctgtccatccgtctgttcagctgtcattgatctctccatggaatggcataaatgcatctaaggaagtgactacaatacatccatcctggcgttaaaaagtagaaaagaaaggatttctgatatatataatcagagagctgctgtattttaaaaataattttaaacaccctctcagagggtattctaggggtaaaaaacccttcactcgtttgaattctcgctgaatttaaagtgaatgtctacttatcatagcccaacaagataaagaaaaaaggccttttgaagtcaaagcaatactttttttttacctgtgggaaggcctattccctagatctgggaaagtttcctagaattcagccatacattttctgtgttttacattatctagagcacatgacatctgcaactgtggcaggaatgacagagtagttcaactgggcaatgaaatggagaacttggaaaacttgatcatttgacctgtatccagaattaatattgtcaattccatgttatgtactgagactcaattagcattcttctggacttgttacttacaagtgtggtctgagagccagctgtatcagcatcaccagtaaacttgttaaaatgtggaatatccagccccacctcagacctaatgaaacagaattcacagcttaacaaaatccccaggtgatttgcatacataattaagttttagaagccctgacctgggagcacgttccattattataacaactttctgaacacaagagggcagtatttcctaccccctcagagcctgtctcagatgtgaaacgaagttcactgcatagctggattaggccagtatgtgtaaggggctgaacaggcttgccattgattggctggataggaaggccagaacttccttctaggggtagaagaaccccagtaacacctatcaaactaaacagaatggctttttggctgagaaggctgggtctacatttcaggccacatttggggagacgaatggagtcattcctgggaggtgttttgctgattttgtggcttcaagtggactgtgagttggagatttcctgttgatggagacagagagatccagggctgcagtgcacaggatgaaggggaggggctaggatccatt

SEQ ID NO: 11910 - DNA, 2300 bp, Homo sapien
gtagttaagtcatcatctcctttacatttttattcttttatcagtgggaattttggaaagataggcagtgagcaggtatggtcatctgatatctggaattagaagcattattcatggacttcttataagtgagagacaatctacaggcaaaaagaagcaaggcaatgagaatcccaaggacagatttgatttcctgttgctagaaacaatcacagtcccagaaaagatgctttctaactttagaaaaaggtccctattgccctgaggaaaggcagcgtgtttctctcttctcattttccctaaaattgatctcctggtgtgacagttacttgtttagccccagggtctacaggctgaagtgggagggaagaaaaggcctctttcagaagaacaggcttctttcagaaggacagccttgctattgccacaatcaacactaccttgttttacaagacttgactcatttatgtaaaactactggttgcctatctatgtcagatttcatgatcaaacagctcacatatctttttttcttttagatgtttttcttagctctggtctgctggtggtactccttcttggattccagggtaaatgcaaatgtatttttactctgtccctagttccttcagaaattatttatattttactttgcaatgccttcatcaatcctctcagttttttctgtagatactaaagtctatcaatgatgtcttgatgatgtagtacccagaattgggtgtaatactctggttatgttcccagcaaatagcaatgttattttactctcttatctgaatatcatattataatttttgttgatctaaagccactgtatctttgtaattctgcttgaagaagacaaagataatcctactttcttttcctagatgagggctcatgttctaggtgtcaggcctctgagcctaagctaagccatcataacccctgtgacctgcacgtatacatccagatggcctggagcaactgaagcaccacaaaagaagtgaaatagtcagttcctgccttaactgatgacattccactatagtgatttgttcctgccccaccctaactgatcaattgaacttgtgacattccttctcctggacaatgagtctcaggagttccccaccagaacaccttgtgacccccgcccctgcccgcaagagaaaaccccctttaactgtaattttccactacctacccaaatcctataaaactgccccaccccatctccctttgctgactcctttttaggacttagtctgcctgcacccaggtgattaaaaagctttattgctcacacaaaacctgtttggtggtctcttcacagatgcgcataacactagacttttattttgtacatctgatcttatttttaattttaccaaagtaggtatctccacatcctaccgcaacctcctctcaacctgatgctcactgcaacaagaccatttaaagctcagtcagaagagttgatctaactatttttgcttaaaggatgtctccacagcttttatacaaagatactgagggactccaaaatctgctagattcattgtgagatctttttctctgtaaattcctcctctcttttacagtcctcatttttcattgaggctaggattaatgtaatatactacagagggcaacacagtacagattagggaagaaagaaatgttcactggaagtttttgacatgtctccaaacaaggaaagcacaggttcacttcttgtggggagtctgtatcctcagtcctgaatctggcctccagagggtgacgttgcacaagggacagatggctgtttccaatgatgatcaacaaacactttctgctcagccccttcttcctgcagctggcttactgaagcaccgtcactggagttctttgaagatgggacaaatggagagaatcaaagattgaaaagcacttaagattatctcagcagattttgtattcttaccaaaacaagagacttgcctagcccaaccttcctcacgctcgctattctcaagacctgggttccagccactttcctactggccccgaggagaatttccaaagagacgcctgcagtgtttccacagctcagccatgctcctgttgctcataccagtgctggggatgatttttgccctgagtgagtaacattctattatggtctctagttccacagaagtaactgttttctgattcaaatcttagtagaaatacttttcatagacaagtctgcactattttcactgatacaacattgattttttcaggagatgccagagcccagtctgtgagcc

SEQ ID NO: 11911 - DNA, 2300 bp, Homo sapien
agtggctcatgcctataatcccagcactttgggaggccaaggtgggtggatcacctgaggtcaggagttcaagaccagcctggccaacatggtgaaaccccatctctactaaaaatacaaaaaattagctgggcgtggtggtgggtgcctgtaatcctggttacttgggaggctgaggtaggagaatcacttgaacctgggaggtggaggttgcagtgagccgaggtcatgccattgcactccagcctgggcagcaagagcaaaactctgtttaaaaaaagaaaaaaagaaaagaaaactgaacaccgcattttctcattcacaagtgggaggtaaaaaatgagaacacatgaacacagggagggaacatcacacaccggagccagtcgggggttagggggagagcagagggagagcattaggacaaatacctaatgcatgtggggcttaaaacctggatgatgggttgataagtacggcaaaccaccatggcacatgtatacctatgtaacaaacctgcacgttctgcacaagtatcccagaactttaaaaaaaaaaaagtaatctcattgtagaggaaagcagctgttcacaagagcatataaaactaacaatggatctatattatttaggttcacgcagatttaagactgtgatgtctacatgcaactctctgtatatatctatctgtattgatagagatatgtacatatctatatctgtatctatctatctatatagagagatttattttaaggaatagtttcacacaattttaggggctgggaagtccaacttctgcagggcaggtcgtcaggctgggcaacctgggaatcactgattttgcagtttgagtttgaagacaagtctggaggcataatttcttcttctttggagagcctaagtgtttttcccttaagaccttcaactgattgaatgaggtccattcacattatgcagaaaatctgcattactcaaagtctactgattcaaatattaatctcatctaaaaacaccttcacagtgacatctagactgatgttggaccaaatatctgggtactggggcctatctcagtggatgcataaaattagccatcacacggtctttacctctagcaaatcttttccaaaagcctactttgcttatacaactataatataccaactttctttttattgtttctcgtataactatttccattctttcaacttctctgagctttaaatttcaaacttaaaataaatcctcatatatctacactctcaaatgttcataagcttcttatttcactgagaaaatagaaacaatcagaagagaattttcaaaaacttcaacacttaccagtcacttgcatctatgctcaaatactctgtctttcctctcattagaatgtcatcccctgtgtgcagggactttgcttattctcagcacttatcatcatacctgaaaatgtaggcatttgaaaaataattgttgaattaaaaatgaataataaaaataactctgtcattaccagaacaaaactatcatttattcattccctcaataaaaatttattatatgcctatttattgacaggccttattctagtaactgacaatgtagcagagaatagaacagataaaagtccctatcctaagggagcttatatttcagttgaaggctaagttcatgttagccactacaataagcctttacatgaatcatctcttcaatctttcaaaaattgttaggtaagtgttatcatacctattttcagatgagaaagctaaggctcaactctcctatttaatatcacatagagccagaatgcagagcttcaaatatatgtctaaattactaatctactgtgctgatatagacatgaagggctttatcctctatatcatgctgcaaataggaggaaaaaagcttgatcaaaagttctaagcaattgtagctctgaccccaagagggcagtatttgcattcgtcccgcctgcaggtctgaatgtgtagtatgtgtaacatagcgaagctggtctctgattggctagggataccctctgagaaaccctttggttagtgttaaaaaaaaagagaagatgttgaatacacaagtcaacttctgggagcagatctctgcagaataaaaatgaaaaagcatctgacgaccttcttggtgattttgtggctttatttttatagtaagttagtggagagttttagcaaagttaacatagtaagtcaagggaatattttcttaggatttggggtgaagatgtagtccactgggataggaggaagggagaaaatggg

SEQ ID NO: 11912 - DNA, 2300 bp, Homo sapien
actcccattttttccctaacttatttaacaaactaatacataaacaataattataattatattgtggaaaattatacagaataatctcattgtgtataatgagaacacaatgagtcaaagtgtgtttttccatgtgtataaaaatttcctttgttcgccgttgtaatttttaacagcacaacttatgtatttcaaatagacacaaaattagtagcatttacagtagtatcttaagctaaattgcctttgaatgagatcttgctttcaatactttgatgtccacaaggcatatctagaaaattttatgctttggaagatgaagactgcttaatccagcggggaaggggactatgatttctctttgactagttgccataacactgtccttaaggcatatgaaggacttttatatgttatttagacatcagtaggcacagaagctttgcagtacaactttgacatataaattctgtcattttttttttactttaaaataaattttttttttaaatgtcactttgctagcattgataacgctcttaggtccaccacaacattatatctattcacccatactatttttgttacaaatgttaaaaaggtgatttcttcctgaaaggactgtgcttcaggtccccattcaattttagatgttatatttgttttttataaattttccaagaatgtagtggctgcattcttgggttgctgtcactcttcctttggtttttacacttactgagaagtggctgttgtaatttctgtcatgtgcaatgtattcctggaaaaagggatttcaatatcagcatgttattcttcattctatttcctatgcagttgttggtgggaatgggaagggcctgccaggccatcattgatgtatactgattacaaggctcttgagtagaaaagagcctgcatcattgccggcctacagccaccagcttcttcaaggacacagagcagattatggactagaggaggaacagtggttgttgtgcttgttactctgtagacccagttaagtttcttgcatagttaaccctccatagatctggtttgctttttaggttaggatgaaaaggcaaagagaaagaccaaattcataaattttggagatttattcctagatataaacttaaaacaagaaaagaaataagaggaattagacaaatgaacagacatataaaagtctagatagtgaaggtaggtccatctcttttgcaacagcccaaacaaatactgttttgacatgacatgcacatgtcattggtgtaagacagaatgacgaattccaagctccagtccttggctttgttaaaaaatgttgcccaggctgtgagctcaaatcatatttctttatctagattttaggtcattctattttgaaagaattcttttgaattataggaaatttctttaaaaattggagataacagaatgctatggggatgtatggcctgacatagagaagagctacgtaatgtgaaatgctccttaaattgcaagaatctcactcaaagttttggaatagaatgcttcatgactgattgttgtgtgcaggaaagtggctattagaaataattcctcttactcatacaagagttgccatttgatatcaaacacatgcatgcataaacatcccccacagacattgacttggagcatttgcttctcaaatttttaatttaactaatatgtcagatttttacatttacctgttcacataatacaggtctacatcttgagtacgtctttgattactatcatgattccacaagatggcagtgtgttcttagggaccctgaggaaagctctcaagtgctcgtgtgtatgtgtgtgtgtgtgtgtgtgtgtgtgtgtgtgtgtgtgtgtgtgtgtgcttgagagagagagaaggagagaaagagagagaatgggaagggcgataagaggaggggttagtgatataccaggggttgtgaaaataaccttttttttctaattggtaggacagattctttttatgattcctaaagtggaagaaataaagtatctctgctatgttcatttctttttggattgaaaattttaatcctcagtgaaccagggcagaaaagaatgatgatatccttgagagttttactggtgatcctgtggcttcagttaagctgtgagttgggcatctctataggaacataatgtacaatattttgagatattgtctatcctaggctgggggctagaagcctgaattttttctctaactaagagagtagaaagcctgtaaaaacatgatttgaattctggggagtaagcat

SEQ ID NO: 11913 - DNA, 2300 bp, Homo sapien
atgaaggactgggtagcaggatggactccttatgtctttgtgtccatgttccccacaaagtttcttcttgaatggggtgcctggccagtagtgtgggtatgtgggtctgtcatgtgaattgacaggcttctttctaggatgaatgaggagggaactggtaattaaggtgcttctctttgttccctgaacctaatatcattggaaatggcctaattatattaattactcgtaataaaaactgaaaccatcccagatggctcaagtaaactctcatgaagattacatgccccaagttggcttcatatgcttctcacacacaaatacagaagcaggttggtgagaacagagagaggctagtgcagccattccacatgtggaccttcactacgttctcttgtgttcttttcctctcacccttcatcacctgctctctttctcagcccagaacctctccagggtcccacccagtaggttcccttcactcacgtttccactgtaatcttctcacagttcattctggcctggactttttccctctctgttttctccatcagtgtatttgcatccactttttatctacctcatgggaattgtgataactttcatctttttattagttttattattgatggattcaggtcattctgtttataattttacatttcatttcagtgggaattttagagagttaagaggacagcacatatgtttagtttgaagttttgtttcagaaccccaccctagtaacatttaaatttttaagctgactatataattttgtcttacatgtgataaaaaatttataggcagaatcaagaactagatcagaagcccaagggaaaactgatttcaggctggtacaattcaatggagtattcagaaagcagtttttgttctgaccttgtaaaatcccattttacctgagatttttctccttactgggttatttcatttttaggatccaatgatctctatgctacaatagattgggtggggaaggctttttgctcaaaagcttcattttattattggggcacagagcagtctgttcttgttcgctattgtctcccacccacatggcactgctgtttgctttgctctgttgagcgtcaccgtcaatatctctcaccatttctacacctctcacaggttcctctcatttctggtctgctgcttgcactccttccacctgtattgagttcatgtaggtttactttttaaaaatctctttaactattttgataatcacttatttatatgttatattttcttccatttatcattctgttcaagtttctttatagatggagaaacttaattgtggagatagaaaaactgcattaattttttttagtgtcagattctcataatttggcacaatatatcagtctattctgaacactgacagttggaatagtactctcactttctctttttaaatataagttatctaaattattttctcctaggttcacaaatattaaacttgttgacctgaaattaggaagtcttttccacactttccacttgacaaagaaaattcttgcctttaatcgtttgctttgattaattaatgatatgtgatccaggctgactttaagtatgagtctctgatctaatttattttttaaagagtcaactaaaggaataatctctttcacccactgtaatgctcacatccagctgcacagggccatatgaagctcagcccagactgagacaactgatcaccacccctcttcttgatgaacgactttactaatatagagtgtctcaatggttttccaaagtctacaacgttgtcttctgtgactaatttctcagggaagtaaattactcttctatttctacataattctcatttctcatgtatttaaaattaaaaccatatactctacggaagatgacgtcatcacagattcgggaagaaagaaacactttctgttggttttgatatcacatctctcaaatgagaaggaaacagttcacttccttggatctgtggttccacctgtgccctccagggggcgacgttgcactaaggaggcatctgtgttcattgccgaccatcctcatccactgagcctcctccctgcagctggctgatgtagctcactgatgtctgtgtagacagggagctgtgacgagagcaagaggtcagaacacatccagactccttaagagaaagcctttctgttttggaaacttttcaaagccagggacttgtccagcccaacctccccattgctcctagctcctgaggctcaggacccctggcttctgtcctccctgctcagggt

SEQ ID NO: 11914 - DNA, 2300 bp, Homo sapien
ccacttttattttttattacttctttcagtcaatcttattcattttttatatatgtacttttttttttgtcattaggattataagaatcatctaattacggtcttgattctttggatcttttttctccaaactcacgaaagtctttctttgatgctagaaaatgagcctgtgcacttgtttttaatatgagcttaaagaactattttccccaaaatataaaatcttctggattctgaacaatatctgaacccaagagcataataaggtgtgatacgactatccaaagactatgcttttccagtacctaaagcagagctattttattttcaattttctgctctctctgtgtttttcatttctgaattttcacttattttaaatggaccatgcattttgtgatttatttatttatttatttatttatttatttatttttttgagatgaagtcttgctctgtcgctcgggctggagtgtagtggtgcgatctcggctcactgtaacctctgcaccccaggttcaagcaattctcttgcttcagtctccctatactagctgggattacagacatgcactaccacgcccagctaatttttgtatttttagtagagatgggattttgccaagttggtcaggctggtctggaactcctgaccttgggtgatgcacctgcctcggcctcctaaagtgctgggattacaggtgtgagccactgcgtccagcctggaccatgcattttggtattttggggtgtgtttggagactattcaatctccctgacaatcaatgtatttcttcaaatgctgtcaacatcctccgatgagagcattctatttctgatcctattcctcttcaactatgagatgttgcctctaaatcaatagagaattgagaaattcctttgcattcttttagtgcagagcaaaaggcagtattccaaggcatcatacaatcctgtctttttcactttgaacacactgggatttgcaaacacccagcaactttgagagacattaaaatcatcaccagcctgaaagtcagcagaaattgctcctcatagtttattttgactatgtttttcctgccctgactttaaacttcactgtgatcccatctacttttgtcttatggaaacatggataaatctattctttccagatgatctttgtttttactcttttggattttggtttgttctcatttatatttctatttttttagttaggaagaaatttggtagatatgggatgtgagtatatagcattaggaatctaaagtccacactcaaagtctatgtatttacaaaatgtcagccatactctttctacacaaaaaacaatctgtacaggcagtaacaaatgaatcaagaacccaaggagagaactggccacatgctcctggaatcaaagaaaataagtattctgactctgtaaaagattctcattggccacagagaacctgtcgaatttctcctttctcttgttttcagagattgcttgtttggtgttggtgtatttccttcagccctagaggtttctgtagttgcgtttaccttagctctaggggcaaagcctttccatcctgtgttacaccttgtcattagtcatatagaggcactactcccattttaagggtcccgtcttttactctatggccgcacaagcatcttccaagggaaatatctctatcatcctccaccaccaacaaggcaactctgaaccatcaaaaactcatcccgaagcagctagtctgcgtccaacgattctcagaaacacagcttaattctgatatatttttaaaacctgatttctcaatgaggtaacgtattactctatttttacatgacatcttattgctaatggactataggcctaaaacaccgtcatagacttgggcaggaagaaacacatggtgtggatgttttgatacatctcagaaattaggagaaacacactaatgagctctctctgctaaactggttctgcacttggcctccagagggcgatgctgcacacactggagcttttgtttctgttgaagatcaatccactgctcagtttcttcttcctgcagctggttgagttctttccagacaaagacaagtgacaagaattagaggtttaaaaagcaaccagattcatctcagcagcttttgtagttttaaataagcaaggagtttctccagcgaaacttcctcacacctcttggtcttggtctcttcagacactttccttcctgttctctggagatcttgcagaaaagagcctgcagtgtttcccttgttcagccatgctcctggag

SEQ ID NO: 11915 - DNA, 2300 bp, Homo sapien
gaggctgagccattgttattctaccagcaaatcagtccatgactcactggcttctgtaggagtgagccaaaagtgatggtgccatcctcaacccctggatgtatttctgagaattttcctaaaaatagcaagatgtgtaccttatggtgggtggatattccttgaaagaaggatgtgaacataaggagcatcactctacattgtttaaaaatgatcactgaaattgggaagctaaggggaacattgcccctgtgtagctggcagttcatgaaagtgctggaaaagcttttccgggccaaccctttgataatgagtctggcaaaaaacgaaataatcaccaggctgggaattttgtccagggcacggctatattcaaggtacagttaatatacggaacgctgtgctccatgtgagtggtcatattcagaccattacattcagttctggatgtcgtaactcaaaaggacaaatattaacctatgtatctgtctccaagaagaaagtaatttgctcaatgaaggatttgataattgtatgaggaatgggtgagataactgaagatccttagaatggagaaatttcatatatgtaaaagcacacattatatatatacatatatttatgtattgagttgagattcttaatcatagctgtctgtaaatatttaagggtgtgagatgtgaataaataattagatttagtctctataactccagcagactagtgagtacaaatcacaggaaaggggctttcctcctggaaatgagaaagtcttggtttcccaggtaccatttctcatgatcagtattttactgtcagttttctatttgtactattctgctaacaggcacaggaaatatttagccttccattaatttattcttacagaagtaattttaaaatttcaaaagttaaagtagattagaaagttttttttttttttggcagaaacagataaacctggaaacatacaggactgaaggactttctcaatatcttggagaaaaacattatggtggagtttgggagaaaaatgatagatatggaatctgtgccagcaatggctgagacaacagcagttcatgacagaagagttgactcatactttagaggaaattccactaaagatatgagtcagtcactgtgtttaagcacatatcatattgatatcatccactttgatatcaaaaaataaaattatctcaataataaagttacatatgcttacattttttgaatctgcagcctgatgttttctgagaatttcttcttgttttttcaacactttgcagaaagcaagccacatagccataggaaaagacttcttaaaacatgccagatttctccttgcaaaccagcccagtctatgggtcaaactattcctattgttggagtattaataactcatggaacttgtccccctcctcctttatcattgtactttaattctttaccttttattaaagccatctttactgaagaaatattcaacattttgattgtcggtaccgtcaattctctgggaatagcaaggtcatggcccaggcttgagaagcagaacctgagataatacgcactcgaaatattgagtggtcctctctctcttgctctgatctttggcttacatattgcctaaagaaagagttttcttcataacaaacgagtcatgatagtagacttaacctaaaaggaaggcattattttttcttgtttatgagagcgaattatggtattttcttaatttcaaacataaactcagcccatcattgaataaatatcaacagcatctacttctttataatttatgaataatgactcagtagtgtgcataattatagagttagatctctacattcttactgtgcatttaatctctgattgaacacccagtctgtttgactcattgctgcttttgtgcacctgagtgcctcatagggttagagaaaaacattcaaccagcaagttcagtagttagggatgtggccacaagatggcagtgctcctctgctgaggcagaatacagggttcactttagtgtgtcctgaatgaataggtttatggtagcagcagagcctttttcttattggttggctacacagtgtgagaaacccctatggctgccagaggagagaagagacaacctgatgatagaagtaactcttataactggaggttgcaggtcaatgactgatcttaattgggaagaacaaggatgacatccattcgagctgtatttatattcctgtggctgcagctggactgtgagttgagggtatttgggtaacagagtatattagtga

SEQ ID NO: 11916 - DNA, 2300 bp, Homo sapien
ttgtttttcatagtacaacttctgtatttcaaatgaacacaaaattagtagcatttgcagtagtatcttaaaataaattgcctttgaataaaatcttgctttccaatactttgaggtccacgagacatttctagaaaattttatgccatggaaaatgaagaccacttaatccagtggagaaggggagtgtgatttctctttgattgattgccataacactgtccttaaggcatatgaaggagagttctatatgtcatctagacattattaggcacagaagctttttcagtacaactttgatgttatgtaaagtgtgtcatcttgctagcactgatatcgctcttgggtacaacattagatctattgacccatactatttttgttacaaatattcaaaaggtgatttttttctacaaggactgtgcttcaactccacattcaattttaaaagttatatatttttttaaataaattttccaagactgtggcgactgccatcttgggttgctccttctttggtttttacagttactgagaaatggcttttgtgatttctgccacttgcaacgtactcttagagaaagggatttcgatattagtatattctctttcattctatttcctatgaagttgttggtgggaatagaaaagacctgcccaagccatcattgatggatactggctacatggtccttgagtagaaaagagcctgcatccttcatggcctccagccacaagcttctgcaaggaaacaaagcatgttatgaacaagaggaggaacagtagttgtttgtgcttctttctctgtagacacaattaagtttcttgcatagataacccttcatagatctgattttctgtttaggttgagatggaaaggcagaaagagacaccaaatttataacttttggaaattaatttgaagatatgagctttttacaagaaaggcaacgagagaaactagaaaaataaacagtcacacaagatgtcattgaaagtctatgtactacttcctaaacatactttgtgtactcacttcccaagggtaagatgggtactgcacacagaggcagcccaccctaagggaaggatcatgggaaaggggaaagcctataaagctctagggtcaaggttaaacactgcgctttacctcagtgccgggcttggctctcttccaagtgtaccttcctttctttcctattctaaagccttttaaaataaatttccacccttgctctgaaaaaaaaaaaaaaagaaaggctatgtactgaaggcaggtttatctctattataccaacccatgtaagtactgttttgacatgcatgtgtcattggtgcaagatgcaatggctattcccaagcccctctattccctggtcttgttaaaaaatgttgctaaggctgtgagctagaaccatgcttgttaagctagattttaggtcattctgttttgaaagaattattttgaattacaagaaacttctttaaaaattggagataacagaatggtatagggatgtgtggcctgacatgaagagctatgcaatgtgaaatgctccttgaattgcaagaatctcacctaaatttttataatagaatacttcatgactgttatttcagtgtaggaaagtggctattagaaacaactgctcttactcatacaacaattgccatttgatatcatacacatacacacataaacatccccacagacattaacttggagcatttgcttctcaaatttttaactgatgtgtcagatttttaaagtgacttgtttacataataaggctctacattttgagtatatgtttgatcactatcatgattccacaagatggcagtgtgttcttagggaccttgaggacagctctcaagtgctcgtgtgtgtgtgtgtgtgtgtgtgtgtgtgtgtgtgtgtgtgagagagagagagaggaggaggaggaggaggaggaaggatgaggggaggggcttagtggtgaattaggggtgttaaaaagagcatcatttttttgaactggtaaagcagattctttttatgatttttaaagtagaaatatccattctaggtgcattttttaagggtttaaaatttgaatcctcagtgaaccagggcagagaagaatgatgaaatccttgagagttttactagtgatcctgtggcttcagttgagctgtgagtttggggcatctttatataggaaaataatgtacagtatctggagttactgtctattctagatctataggtagaagcatgattttttttctaactaagggaaagtaggggcaccagt

SEQ ID NO: 11917 - DNA, 2300 bp, Homo sapien
gcccatgttccccacaaggtttcttctggaatggggtgcctggccagtagtgtgggtatgtgggcatatcatgtgatttggcaggcttctttttaggatgaatgaacagggaagtggtaattaagttgctcctctttgttccttgcacctaatatcattgaagatggcctaattctgtcaaccactcataataaaactgcagtaatcccagcggttcatttaaactcttgtgaaaattaaatacccaagtaaaagttggcttactatgcctatcacacacaagtacagaagcaggatggtgagaacggagggaggctagtgtagctattccatgtgtggaccttcagtatgttctcttgtgttctgttcttcccactctccatcacctactttctttctcaacccggaacctctccagggtctcacccagtaggttcccttcacttgcatttccactgcaatcttctcatagttcattctgggctggacttctcccccttctctgtttcatccatcagtgtgctcacatctacttttcatttcatgggaattgtgatagctttcatcttttcattattacttttaccattatggattcaagtcattctttttatacttctaaattttatttcagtgggaatattggaaagataagacgagaatacatatgcttcttaggaattttgaatcagaagcacatcctagtaacatttaaatgttcaaactggctatatgattttgtcttacacataaaaaatctataggcagaatcaaggaatagatcagaagtgcaagggagaactgatttcaggctggcgtgagtgaacagagtacacagaaaggagggattttgttctgaccttgtgaaaagaatccttgttggccaggttctcatttcacctgagatttctctcctcatttggttttttaagttttagggtccaatgatctctatgctaaaataagttggatgaagatggcttcttattcaagagtttcatctttttaggccagaggcgaccgctccagttcaatacagcctatctcccactcacaggggactactgcttgcctagctctgttgagtatcactgtcaatctctcccagattttctatacctcccacaaggtcctctcatttcttgtctgctggttgcattcctcccaattttctgagttaacacaggtttattttacttttcttttcctaactcttcccaggattatttatttgttatattttcttacactcatcattccactcaagtttttccatagatgggcctctgttaatgttctttttagtgtgagatataatttggcatgatgtatcagactgtaggagctttgacaattggaacatgattctttttaaacatgaagtacctaagttgttttttcctagagttacaaatatcgaagttattgacctgaaaccaaggggcctctttaacatttttgcttaacaaaaaaaattttgctttatttgtttgctttgattaattaattagtgacatgtgatccatgctgattttaagtatgagactcaggtctagtttgtttatttttttaagaatcaaataaggaataatctctttcacccaccgtaatgctgacattcagaaacacagggccatatgaaactcagcccagactgaggcaactgatcacctcccttctccttgatgaatggttttacaaaataatatagagtgtctcaatggtattccaaagtctagaatgttgtcttctgtgactagttgctcagtaaagtaaattagtcttctatttttacattactctcatttctcatgtatttaggattaaaaccatgtactctacagaaggtgacgtcatcacagatttgggaagaaagaaacactttctgttggttttgataccacatttctcaaatgagaagcaaacagttcacttccttggatccgtggtttcgcctgtggccttcagggggcgacgttgcactaaggaggcatctgtgttcattgccgaccatcctcatccactgagcctcctccctgcagctggctgatgtagctcactggtgtctgtgtagatagggagctgtgatgagaacaagaggtcagaacacatccaggctccttaagagaaagcctttctttaaccatttttgaaacccttcaaaggcagagacttgtccagcctaacctgcctgctgctcctagctcctgaggctcagggcccttggcttctgtccgctctgctcagggccctccagcgtggccactgctcagccatgctcctgctgctcgtcccagtgc

SEQ ID NO: 11918 - DNA, 2300 bp, Homo sapien
aaagttatctcctattctactgtggtcctgcattaatttgtggttctcgataatattaatcaagaatggctatttggcgtgtgcttttaccaccatctttagttgtattaccctttttagttaatctaattcattttttatatttgcaaatttttctcatcaagattataagaccatttaattaagctcttaaatttttttgatatttcatttcttattttccaaatttatgaaggtctttctttggtgcaaaagaattgagaatgcatacttgtttttataaataattcaagtactatattttttcctaaagtctaaaaatttttgtattctgaattatatctggatttaagagtatgttaaggcatagtaggactattcaaacactattttttttagtacataaaacagagctgattagtttttaattttctctatttttttcatttctgactttttgcttcttttaaatgaaacatgtattttggtatttggggctgtgtttggagacccttaaatcttccgggaaatcatgtatttcttagaatgctgccaacacccttaagtgagaatattctatttatgatcttattcttatttaactaagaggtgttgcttctactactatagaggattgaagaattcctttacattcttccagtgcagagcaaaaggcaatgttccaagacatcacacaatcctatggcctttgactttgaacatactgggctttgcaaatgctcagcaactttgagaaaagttaaaatgaccaccattctgaaattcagaaggagttgctccttatagcttattttccaattttttttctgctctgactttaatcttcaatatgatcccacctactttctgtgtcctagaaatatgtgtcaccctttcctcaccagatgaccttcattttttttttactcttgtgaattttagtctatttccattttatttctattctttaatttaggaagaaatattcaagagaagggaaatgagcatatagcattaggattagaagttcacactcaaaggctacacttttacaaaatgacagcattactcaattttcttcattcaagaaaatcttttccaacaggaacaaatgaatcaagaacccaaggagagaactgggcttatgctttcaaatcaaaggaaagaagtattctgactttgtcaagggtcccattagccacagagaaagcagtgactttctgcattctcgtgttttcagagttttatttttttccccatgcactatctacatttattattatttgtttttatttttaaatttcaacttttatttctcgcttggtgtggttgtatttccttcagccccacaggtgtctgtagttttattttctttacccctagaggcaaagccttcccatcatgagttacgccttgtcattagttgcatggaggcactactctccttatgtgaaatcttttcctctatggctgcacaagcatcatccgagggaaatatctctaccatcctccatcagcactgtggcaacactgaaccatccaaaactcagtccagggcaattggtctgaacccaaactctcatggactcatatctaaattctgatatgcttttcaataacgattcctcttgatgtattactccatctttacatgaaatcttattgctaatggactctaggactaaaacaccatcatagatttggtcaggaagaaacacgtcttgtggaagttttgatacatctcagaaaacaggaagaacacactaatgaacagtctgtgctaaactctggttctgcacttggcctccagagagcgatgctgcacacactggagcttttgtttctgttgaagatcagtccactgctcagtttcttcttcctgcagctggttgagttctttccagacaaagacaagtgacaagaatcagagttttaaaagcaaccagattcatctctgcagcttttgtagttttatataaacaaagagcttgtccagcaaaccttccccacacttcttgttcttggtctcttcagccgctttccttcctgttctctggagatcttgcagaaaagagcctgcagtgtttccattgctcagccatgctcctggtgctcatcccactgctggggatacattttgtcctgagtgagtaaaatttctttatcatctctagttccacaggttctgactagaaatgcttgctttttatactgagtctgcactgctttcactgatagtacattactttttcaggaactgtcagagcccagtcagtgacccagcctgacatccgcatcac

SEQ ID NO: 11919 - DNA, 2300 bp, Homo sapien
ctggctgctgtaggagtgagccaaacatggtggtgccaccctcaacccccagaggtatttctaaggactttcctaaaaatagtaagatatattcattatgctgggtggatattccttgaaggaaggatgtggacatagtgagcattactctacattgtcaaaaaataataattagaatagggaagctaagggtaacatgtcctcaagtggttgatagttcataaaggtgtgagaaaatcttttctggaccaacacattgacaatgagttaggtaatattcaatgaaataatcatagggttgggaattttgtccaggggatggccatacctaaggcatagttaatatgtggaatactatgatccatatgagtggtcatatttagaccattacattcagttcttaatgctatactcaaaaggccaaatattgacctaaattatctgtcaccaaaaggagggaaactcatccaataaaggatttgagaattatattgtatgaggaatgagtgagaaaagagaaaatccttagaatggagaagttttacatatgtaaaaacacacattttatgtatacatatctatatttatatgttttagttgctatttttcatcataactgtccttacatacttaagggtgcaagatgtgaataagaaattatattcagtctttataattccaggggcctagtgagtacaagtcacaggaaatgcacttttcttctggaaaccagatagtcttggtatctgaggaaccatttcccatggtcacttatttagttttgcactctccctcctagcagacacaggcaatattttggcttccatagatttagttttatggaagtaatcagaacgtatcaaaaattaaagtagataagcaattttttttgcaagaagagataaacccagaaatgtacaagactgaaggactttatcaatatcttagggaagaacactgtagtggagtttgggagaaaaacggcagatatggaacctgagctagcaatggctaaggcaagagcagtccatgccagaggagttggctcatattttagaggcaagttccactgaagatatgagtcaatcattgtatttaaggacatgccatattgatatcattcattttggtatcagaaaataaaagcaccttaatagaaatttacatgtggtttcatttttggagcctgcagcctgatgttttctgagaatttctccttgttttttctgcactttgcagaatacaagccacatagcaataggaaaaggtttcttaaaacatgccagatttctccttgcaaaccagcccaatctatgggtcaaactttcctattgttggagtatttaataactcatggaacttgttcccttcctcctttatcattgtactttaattctttaccttttattaaagccatccttaccaaagaaagattccacatttcgactgttggtactgtcaagtctctgggaatagaaagtcatggggaagaccagtcttggagaagcagagcctgagataatatgcacgtgaaatattgagtagtcctctctctcttactcttatctttggcttacatattcctttaagaaagagtctttctccataacaaacaaatcatgatgaccgatttgactgcaagggaatgtattacttttgtttgtccaggacagtgaatcatggtgttttcctgatttcaaacatgtaaacttggtgcatcattgtataaacacctgcaacatctacctctttctaactttttaacaatgactcattagtttgcataaatatcaatcttgatatctacattcttactgtgaacttcatctcagagtgaagactttatttgtttgacctattgctccttttgtgcatctgagtccctcctagggttatagaaaaacattcaaactgcaagtttagtagctacgaatgtgaccacaagatggcagtgcttctctgctgatgcagaacacacagaggtttcattttagtggattctgattaaataggtttatggcagaagtagagcctttttctattggctgagtagacaatgtgagaaaccactatgattgttagaggaaagaaaggaatacccgatgatggaagtagctcttatggctggagattgcaggtttatgactgatcctatttgggaagaacaatgatggcaggcattcgagctttatttatgtacttgtggctgcagctggactgtaagtttagagttttgggtaacacagtatattagttgatgattttgagacatccagggggaagtcttgctttatttaggc

SEQ ID NO: 11920 - DNA, 2300 bp, Homo sapien
gacagtattccagttcatattccacttttacagttttcatggaattttggagcttccaaaaaagacatgaactgtctgcattccctagtattctagaaaagtctccccacaaatgtttaatattgcagtcaacatgtccctactgcgatgggtggtccctggagggtattaacaagtgttcattggcaatcatctggttccaccaaacagcctttctggctttgatatatcttatcctcactgatcaaacaaatcaataattcatctaaggtggagttattgacattttccatggatgcatctttaagttccataagaggtgcttgcataaggactttagtcagaaagccatgtttagcatgatcccctgctcacgtatttttttctagcttctaaagtgcctttcatacatggaactttgtcttcattaggaaatttatttcaatagcgtcaagacatcaaataatttatgtatttggtgtccatttttataaagatacatgaaatatatgagaaggttaagaagaggtaaagaaggttaaggaacctcatcggctccattatatttggaagttgtgacctgtgttaaagcattgactatcactgcttatatttatcataatttggcatgcaaaaatgagagtcacaatttcagctacttgcattaattttacttctaagagattgaattttataatagagtcgggtagttattacataaaaagttttgcgttattccttttcaactttgagtttaatacattaaaacaattaattcagaagttgatatgagactgtccaaaatatctgtttgagtgtggacacttcttaaatgacaaaagcacagttaaaagatttattgattgagaagtgtaatggagttgaacactatgaagataaatttgtaatatttcataattactccaccaactggtagaacaaataatggatgcttttacaaaatagataacttgtactgtatgtgatatcataagatatctgaagacgcttcaaccaattttgacaagaaagatctgaagacgcttcaaccaattttgacaaggctaagataagctattttaagacaagagcgataagctatggctactatattaataaataaattatggtaggcaaggcaatgacctttgttgtttgcagtgttgttgagtagtatcactagggcatggtctttaatgtttacacagaaagaaaatttgtcacaatcggtgatcctgtaatcagttgtcctgtatatgggatcgtccagaacacattctcttcagagcggggcatacagaacggcgtggcttgctggggcttatttggggtctgaattgaagtcatggaaaaaatataaattcgaaggtttgataacctaataaccaaactctgtaatctaatatgatctgtatgaacagagctggctgttgaaactgaatagaaaagagaatgggacctttaaaacacaacttgatatctgaggggttaattctaaactcttcgtcaaagagagattcgtttttctgctgtttggccccaagattggcaactggataggcattggaattgaggaggaatactgttatatcaatagataagtcaaaagatctgcagagatttgtacaaaccttcttatcataacatgatgtatttgtactttaggagaaacaacaacatacatagatgtgaggctagaggattattgtatcttacattgtctgtataattcattacaggtatcaaatatgtgtcaatctcccagttccatcacaggtgcaatgataaaatacagtagttggtcaaatgatcatttttcctctcaatgtgaccatgtttattttcagatttgttaacaaattaagagttggttgatccaaaagaaagtctgcattgggtgagcttctcagccagtacatagagaagtgtgaggtgacacacactagtttgctataccaggaaacctctgtttcctgttctagggcagcagtagcagcagcacatggcccagtaattcttctctcaccatgccaggttcacctcacagtacagagtcctgaaaataaagaagaagatttttttttatctagaaaaggaaccaaacatgtcactttctagcctgctgaaggtggtcacagcttcactgtggctaggtacgggtggcccagtgggaatggactttctgtatgaactaaggactttggaagtatctttatggaaactttgggaaggaggggtaatggggtacaaaaattgaatttctttgtcccaatccactttatccttaaatcttcaaattc

SEQ ID NO: 11921 - DNA, 2300 bp, Homo sapien
ttcttctttccctatttggaggccttttacttctttcttttgcctgcttgctctgggtaagacttctagtactatgctgaatgggagtacagagagtaggcattcttgtcttgttcccgttctcaaggtgaacgcttccagcttttgcccattaagtatgatattggctatgggtttgtcatagaccactcttattattttgaggtatattccttcaatacttagtttgttgagggtttttatcgtgaagagttattggattttatggagtgctttttctgtatctattgagatgatcacatgggttttggttttaattctgcttatgtggtgaatcgcatttactgatttgtgtgtgttgaaacaactttggatcccaggaatgaagcctacttgatcccaggaatgaagattagctttttgctgtgctgctggattcaggatgctagtttttgttgagaatttttgtgtctatgtgcatcagggatttgatctttagttttcttttatcattgtgtctttaacagatttttggtatcaggataatactggatttgtagaacgatttagggaagaatctcttcttgattttttggaatagtttcagcatgattggtatcagttctttgtatgtctggtagaagtcggctgtgaatccgtctggtatgtggcttttttattggtacattttttattactgataagctgcacttcactaaaatttaaaagttacgctcttatgaaatgcaatgtcaagaaaatgggagacaaaatgcaaactgagtaatccattgcacttgaacaaatctttcttgatattttagtttctctccatgtaagagacatatttcagctgcatttagtctgccatcttaccaaaaacaggtttttgttttcttttgttatgttataaaatgaaaactcacaggaagtaagcataatgaagtgtttgtttttactgcagacacttcataggaaaagaccagctttaataatctgtgtaatcatggggacatttttttgtgatgacctcagagtgttatctctgatagttgataaccgtcttggtataggacagtgttcacaaataaaatcttgtaaacaactatcaggctggcagcaacaaaaccatcagggaagtttttaaaaaatgaaaccctttgaatcttggaaattgtggtttgaaatgttggaaatcgtgattcctaaagttagtggtcttgtcccaacatctgtaattttaaatgactcacaagttaattcagttctcacacaaccaggttttagaacctcgattatcagccgatgtatctttatcaatttgtaaagcaagagaagaggaaagttctaactcatgcttcagtctgttgatgcaaatctacatgtggattccctacatcatcagaggaaattgattaaactttggcaataaaatgttggcatatgaccacagtagaaagcgtccttgaggccagatctccagattatagggttaacacttgttgcctgattgtcataagcaagcaacttgtcttggagtcattgaaatcgtgagggaataaactattaatctgaggtcatatcttatcagtaaatgtcagtcactgctctacatgttaggatacagtgctgaaaaacatagactcagtaacagcaagacttcttaacattccctctgatttcaactcaaaacccttgtctgacatcccattgaattataccactggtctgcaatggatacgtaaaaatattggcctgtattaaaatatccaagaaaatggaactctcacctacagtcatactctaggatgctttgctaaagatcttttgtttcaggtagtgtccaaagaacaaaattgacaaaatagaccatagagatgacaacatctgcccttcatatttacaaggaccacctgagactggcatgggccttataaatgaggtcagggttgaggacctatttctgacttttggaaggagtccaggaaaacattcatcccagttcagcccctgtccaccagagggagtggcttcctaacacaaactcatttcctgctatcactgtaggtttcactgtgatttcttcatgttaaggatcaagaccattatttgggtaacacactaaagatgaactattctccaggcttagtatctctgatactcttactgcttggttagtgagatgccttttaaaatttggtctctgtcttctatcaagccaaaaaaatctttaaccataatttgacctaagagcattatgctcaaggctaaacagatctctctctctctctctctctctt

SEQ ID NO: 11922 - DNA, 2300 bp, Homo sapien
gtggaacagaagagaacagtagttgtctgtccttgtttatctatagactcaattgagtttcttgcatagatagctccctgatagatttggtttgctggttatgtcaggatgaacaaaacctataacttttagagattgattcctaggtatcagctttatacaagaaaggcaataagagggacaggacaaatgaacaggcacattgggttttattgacagtctaggtactaaaggcaggttcatctcaattgcaccaacccaagcaagagctgttttggcacagatgcatcattggtgcaaaatggaatgacaaagtccaagctcctccagttcctggccttgttaaaaaatattgcttaggctatgggctgcaaccatgtttgttttgttcagctagattttaggccatttcatcttggaagacttattttgagttataagaaatttctttaaaagttgtatataacagagtagtataggaatatgtggcctgacattaagaagagctatacagtgtgaaattctccctgaattgcaagaatctcactcagatttctataatagaatctgttatgtctgattttttagttcaggaaagtggctattagaaataagtggtcttactgacccaagagttgccatttgatggaaactcatacacacatatatacccctctgcctttctcacacatacattgactttgacttttaatatagcttaaaagctttattaaaagtttttatttttaattgattcataatatttgtacatatttatgtggtccatgtgatattttgttaggtgcatagaatatacaataatcaaggcagggtgtttagaatatctattaccaagagcacttatcatttctgtattgagaatatttcaagtcctcacttctagctattttgaaagtacaatgtgttgttgttaactttagtcattctactctgctattgaaaattagaacttattccttctgtttctacccactaaccaacctccttttattcccccaaccacatccatttccttcccagtctctgataaccatcattctagtctctgtctccctgagatcaactctttttttttagcttccacctatgagtgaattcatgcaatatttatcttcttgtgcctggcttatttcatttaacataatgacttccagttccatccatgttgctgcaaaggacacgatttcatttatttttatacctgaatagtattccattgtgtaactatacaacattttctttatccattcaccagtagatagacactttgttgatttaatatctttactattgagaatagtgctacaataaacatgaggaggcaggtatgccttcaaaacacttctttcctttggataaatactcagtagttggattgctggattgtatggtagttctattactagatttttgagaaatttccctactgttttccagagtggctgtactaatttacattcctaccaacaatgtttgagagttccattttctatgaatcctcatcacatctattattttctatatttttaataatagcgattctaactgggataggatgatatctcattgtggttttgattcgcatttccttgatgattagtgatgttgagcatgttttaaatacctattggctatttgtcttcttttgagaaatgtcaatttagatcttctgcccatttttaaatgggattgtttgactttttttttttgctgttgagttgtttgagttccttgtatattctgaatttaactaaagtgtcatattttcacttttagcagttcacataacacaggtctgtagttggaatacatctttgatcactttcatgagtcctcaagatggcagtgtcttctcagggaccttggggcaagctctcatgtgctcctgcggtggggaggggaggggatgcatgtgcacttgcaagtgcacacacacacatgaataagagcaagacagagggagagatgagggaggagcttaatgatggagcagaggtgttaaaaagaacatcctttttctaattggtaggacagatttcttttatgattcctacagcagaaaaatgagaaacgtttgttattatttttttttcgtgtttaaggtttgaatcctcagtgaaccagggcagaaaagaatgatgaaatccttgagagttttactggtgatcctgtggcttcagttaagctgtgagttttgggcatctctgtagaaacataatgtatattgtttgcaattattgtgtattctaggcctgtgggtagaaacatgagtggttttt

SEQ ID NO: 11923 - DNA, 2300 bp, Homo sapien
aatttccaccttcttttatacctcctttgaaactagaaaaacaagaaaaaggaaatgagaagaaatgagaaaaaaataatgaaaatattcagagagaggataaaagagagtaaaagaaataagaggttgggggaaaaaaagatgacacatttaactgaatttcaaaatgtggtctatgcctcatatagtttctgtgttgcaaggttaaaaagttctagagatctgatgcacgacaatgtgaagatacttaccactactgaattgtacatgttaaaatagtcaagatggtaaatttaatgttatgtgtttttttaccacaataaaaaatgtgacctctacctcttgttcacagagcagaattgaccaggtggggctgcaaagtgaatggagaagtgttggatagaagaagagagatggaaataagctggggtggccatcatatacacgtgctatttctctatcaaccaaagtctcactggagacattttatatgttcatgatgactatatgtcctatgttaacagaattctcttaatttaattgtattgtatttactcctttaagggtgattaaataaacgatgcattcgatgagatattctttctttgtgagagctttcttataaataaaatcacaatcacttttcaaatcacatgtcctgattttttggctaaggaaattgggccactgaccctgataattttttcaggctgtacttgatccagatgaggctcccatttgtctctgagatatcttttccctttcttcactcccctcctgacttgtccgattactgggtactttaagtggaggcaatcctgagagcataaaaacctagacatttctgtgtctctagtcagcagtgcggcactcagcagggtactgacgtcagcaattacgcccgtacactgcaggaaaactagaggaaaatctctttgctccctgatctcattgtattccacctcatttaagtaacagcatatctcttacttttttctcagctatttggaggccagaggagagactttctcaagagaattagttttcttttttagaaaaaaatatatctgccggagacgctatctccatgacccatagttttctgctcttaatcccggagcttctgtctacttgaccccagatttatatctgaccccaaaatgggacacctcacttgagctctctcaacacagcttgactgggagctggagaaaatctttggttaaggaccagggattggggactctttcaatctaccatttttctagaatttccgtctttctgagccaaatgattgttcctttttttatggccttcttttcttttcttttttcttttttttttttaaagtgtatagaactaaaatcccaaagggccatttcctgtgtggggaaggtcagaatcaatgatggtggacggaaaataaaataacttgatctggcaatgtttaaacatttcactaaaatatctgtgtagaaatttaaatttctatgaagtgtaatcgatcaatattttttcttatgttttttgactgttatgcttagaaaatccatcaccattctaaatttattttaaaaattttttattttacttaaaatattaaatgttacgtcctttgaactttatttgataacaggtattaaggtaggcatcctaacttatctgttaacttccaaatgattgttaggattgcacattttcccccattttaactaagtttccaaatgtatttgtatatttgaactttgtattctacttcattaagccctatatgtggattttaaaaataacattctattgcaattagtatagcatcacacttttactgaggaggaaattctcattctctgaatttgaaggcttcctgaagcctgagttagctgcagtattgtatttggcctctagagagagatgttacacaaattgaatttgatagccaaaaacaacctgatctttttgaagaatagcttttggctatacatgccgggtaaactcatccacctctctgtcagagtgtctatgtggctgaatcgtttccagaaaagacctccagaaaatagcttcctgtttctccacaggtcagacatgaagcccaccctcatctcagtgcttgtgataatatttatactcagtaagtaaagcctctttttgttctatttttctatggtattctgatttagaataactttaatgaatattatccccagtctgtaagacttttcctgatccagaattggtgttataggaggaacaagagcccagagagtgactcagcccgagaagctcctctctgtctttaa

SEQ ID NO: 11924 - DNA, 2300 bp, Homo sapien
tcctcattgtgagacattagacacatcatttaatttctttgaaccagggtacatcttttaactactattctaaatttgctcacagactgtttcaaaattatctggaagagagcagacagattaaaatttcagtttgttaaataacactggttctttgctcaaaaagctttcatatgtctttatttcgcactgaaaaacataaagatttattttggcagtcatctgacccagacccttcctctagacttatgtcttggaaccctccaatctacatattgctctagccagcaatctcttcttctcatttctttttttcctttctctgttctcctgtcttctcatctttcccatctctctctctgttttacacacaaaataccttaaaatcaatttttgggaacatttataaaatactctagaagattcttgctattctttttgactgctctgcatcaggacccattttcttataacaataataatttttcagtcactaatgaatgtcaggcactgtgctaaatgacattttatgatctcatcgttaaccttcaacagctctgaaaaggtagtattattatttactcatgatccatgttctacagccaagataatgtaggcacagaagacagaaacagctactgaactgatagatgtaaacctgacttcgatggcctgactataaaacttcctctcttcctggacccgcctgcctcctgccatagaaactaaaacttctaggtattcactgctatgggctgaactgtgtttccacaaaatgtggacgtagaagcgctaacccccagtacctcagaacatgactctatttggagacagaacttttaaaggtaaagttaaaaggtggtcttgagggtaaccactaatttaataagactggcatccttaagaggagattgggacagatagcacaggcaaagggatgaccatgtgaagacacaacaagaaggcaaccatttatgagtcatggagaaaggcctcaaaagaaactaaacctgccagcactttgaccttgaaattgtagtccctaaaatcatgagaaaataaatgtttgttgtttaagccatgcagtctgtgatactttgttatgggagccctggtaaactaatacagcctactggttaggcttgatgtgggcacatggcttgggctccaacaattagatgaattgttccctaactttcactcaggagttacttttgcaaaaaaacaaaaacaaaaaacaaacaaaaaatgagtaagagtttcctttttgagagtggtggtaattgcaacaaggtggacatgagagtttacaggctacaaggcagtggaattgtagctgcatacattgtcctgcgtgaacagtcttgcataaactacgggcagtatctggagctcaggaaaggagccagtgggatactcagaggagtgcttctccagagtgattttctgtactgctgctgacttcatagcttttgagttcagttctctgaccctactggagattctgaggtaaatccagtattcattaatttattccttttctacttaatttaggcagagtccatttctgttgcccatcagtaaaaaccttgacttgtatataatctcattccagggaaaattttttaaaaggaagctcgtaggtacatgatcagaggtcatagtaactacagggaatttaacagtgcttctcagaggtagtctgaaaatattgagcaccaactgtctttcgtagttgagttcttacctgaattgaaatgtatctgttcctattctaagttagaattagatttcaataaaggcagagactggaatagctttgtaatttcttctgagtcagctctgaacacacgtcctgatggcagcaggatgatgttacgatcacaagagggcagtgcctccctctcctcagactaacttggctttaaatcagcctatctgcattgaaaggaaaggactgagcttgcctgtgactggctagggaggaacctgagactaggggacagaaagactagggattcacccagtaaagagagctcatctgtgactgaggagccttgctccatttcaggtcttctgtgatttcaataaggaagaagaatggaaactctcctgggagtgtctttggtgattctatggcttcaactggctagtgagttggggattttggtgatgggaatggcaagaccaaattttagagcccacagggctgaggggtgaagtgttcttattaatttggaaatgtaatttgaaaatgtaatgactgactcctggtcccggacctgtgtttctgcctaggg

SEQ ID NO: 11925 - DNA, 2300 bp, Homo sapien
aaagaacacacaagaaaatagggctgagtttttcaaactatagtccatgggtatttggaattgtatgaataaattgttggtgtataatgggggtcagaaaactatggcctagtgttcaaaacaacctgccacctatttttgtaaagttttattgcaaaatagccatgctcatctatttacacattgcttatgatggcttccatgctataacagcagagtttagtacttgcaacagagagtgtatgatttcaaatatatactatttgtccttttatagagaaaagtttaccaatccctgaggtatagaaattaaatgagaattattagatctgtgtgcttaggacaatgtaaaataatgaaggtacatttctaataatctagatgactaatagaataatccccttgaatttgatttttttgtcacttttaccaaattaagggtaaatgggataataatactctacaaatgaagacattgcagctgtttaaatggtgaaaagtttttggaaaattttggttatgatatagaacatagcacatagcactacagatgtatcacatagtactacagatagggcacactcccaagagcctgcatctttccattgaaagaggatgtgttgcaaaccttcattgtttgtatgcatcaacgtgcaattcaatagacataaaagtagcagtaaattaaaaacatttttttcagtgctgaattcttgggtgtttcattaaataataaaattgtataatggtgactgacatgagtatttctaaataggaaaagtgaagaaaaaatcctagtaatcactaatcacaataactcagacaatagcacatcaagctccaaataactttaatcaaatcagttattcaactgtacacatccatagctttcttttaataagtctacactaaccgttgagtttcagtggaaaatcatttcttacactaatgttttaatttgaattttatcgattttatattttgtttgaagtttttgtctgatttggtaattgtataaaacctgtgagcctaaaaagttgatacccaattttattgttgggtatatgaaacaccgtaatattaaaaaaaatggttagtatgagagtggctccttataagaagacctgcaccttactcaattttgaagaacacggaatgcacctgctaccaggccctggatctactcctaaatgaagccagtcacaccaggggcctaagacactagacacatcttcccacagactgtccttcatcaaagataattttgcccaccagatacagccattcattcattttttccaccaatttttaggggttttttttgagcatttcctatgagctaaggttctaggaaaagggctgctgatagtaataggattcaacttctgatgcaggagcactaagtgcagcttgagaaacaggacagaaatgattctaatatgatgtgataggacagaaaatatggtgggaaaaaggagagcactaactcagctcgagagatggcagaatgttttcacatggaggtgatgcactggttttcaaagaatgaacaggagtcatccaagtgaaagggagtggggagaaggaagggcattctaagcagaagtgctcaccccccggttttgggggaccagtgggaaatatgtcgagaaaaaaatctcacattttctttttttttatattctcaggatatcctgagatgcctaaaactaaattaacacttgttgtgaacacattagatgcagggaatggggagattcaagggaatcatattgctctgcgccttgaagaaggcgacaggaatcacccacacgatgaagtcagcagagtgtttgatgctccttccttgagtcccacccttcacctcggacaccgttttctttctgagtctgcaggttaagccgcaccccagggtgaaaatgaacatcattctgagactcagagcaggcgtcagggacagagaggagcctcaagagggcgctgctgccttcagcttgtggtttgacacaaatttcatctttccttccttcgcacgtctctttgttccagcctgtggcctgatcttgtagggcagtttactctgcttaacacgtgagtcaagattttgtagaagattccgccaaagactcaacaacataaagaaatatatatacctttcggtttggatatctctcaacaaaaccttctactgcttctcagccagccatgctgtctgcttcctgctcaggacttgtgatcttgttgatattcagtgagtaatgtttactcaaaacttctgagatgttctattccttagcttt

SEQ ID NO: 11926 - DNA, 2300 bp, Homo sapien
tatatacccagtaatgggatggctgggtcaaatggtatttctagttctagatccctgaggaatcgccacactgacttccacaatggttgaactagtttacagtcccaccaacagtgtaaaagtgttcctatttctccgcatcctctccagcacctgttgtttcctgactttttaatgatcgccattctaactggtgtgagatggtatctcactgtggttttgatttgcatttctctgatggccagtgatgatgagcattttttcatgtcttttggctgcataaatgtcttgttttgagaagtgtctgttcatatactttgcccactttttgatggggttttttgtttttttcttgtaaatttgtttgagttcattgtagattctggatattagccctttgtcagatgagtagattgcaaaaattttctcccattctgtaggttgcctgttcactctgatggtagtttcttttgctgtgcagaagctctttagtttaattagatctcatttgtcaattttgtcttttgttgccattgcttttggtgttttagacatgaagtccttgcccatgcctatgtcctgaatggtattgcctaggttttcttctagggagtttatggttttaggtctaacatgtaagtctttaatccatctggaattaattttcgtataaggtgtaaggaagggatccagtttcagctttctacatatggctatccagttttcccagcaccatttattaaatagggaatcctttccccatttcttgtttttgtcaggtttgtcaaagatcagatagttgtagatgtgtggcattatttctgagggctctgttctgttccattgatctatatctctgttttggtaccagtaccatgctgttttggttactgtagccttgtagtatagtttgaagtcaagtaccatgatgcctccagctttattcttttggcttaggattgacttggcaatgcaggctcttttttggtttcatatgaactttaaagtagttttttccaattctgtgaagaaagtcattggtagcttgatggggatggcattgaatctataaattaccttgggcagtatggccattttcacaatattgattcttcctatccatgagcatggaatgttcttccatttgtttgtatcctctttgatttcattgagcagtggtttgtagttctccttgaagaggtccttcacgtcccttgtaagttgggttcctaggtattttattctctttgaagctgttgtgaatgggagttcgctcacaatttggctctctgtctgttattggtgtataagaatgcttgtgatttttgcacactgattttgtatcctgagactttgctgaaattgcctatcagcttaaggagattttgggctgagacgatggggttttctagatgtacaatcatgtcatctgcaaacagggacaatttgacttgcgtaataagagctatctatgacaaacccacagccagtatcatactgaatgggcaaaaactggaagcattccctttgaaaactggcacaagacagggataccctctctcaccacccctattcaacatagtgttggaagttctggccacggcaatcaggcaggagaaggaaataaaccacgactggcaaagtagtaacaaagattgagactaaaagttttgccttcctgctagaaagtgaaaactccgtatggttagtttgtaccttgattctatctggagaaaaagacatatgtaagaccaaaaggtgcataactgtatcatcccatgtattcactatagctcataataaattgtaagtctcacattttccaccaaagatgaattaactaaccgtgattcaattttaccactgtatatttacagtccagtaagttatattgagacaaaattggtacttaggacagtctagcatcttccatctctacaggaagtatgtgacatgacacagtcaaactcatcatatatctgttaactatacttcctgtaaaaggcagaagcctcacacagcccagtaactttgctagtacctcttgagtgcaaggtggagaattaagatctggatttgagacggagcacggaacatttcactcaggggaagagctatgaacatgctgactgccagcctgttgagggcagtcatagcctccatctgtgttggtaagcgtgaccactagcacaggacttaggctcctgttagttcagaaggatgtggagagaggcagatctttttagtctaatgaggcttagaaagaaggggtaaagggcaatgaaatcagagcactaggt

SEQ ID NO: 11927 - DNA, 2300 bp, Homo sapien
cttattccttagatcaaaataactccaaatgataggcttaaaagattaaatataaaacataccagaaattttcaggatttaaaaaagtaagcttagagtgggtcaggttttctaagcaagaccaaaatttcaggagacattataaagatgaatgcatttgaatataccataaggaagagatatatgaaagcaaatatttctacgtggcaaaaatacaataaaacagcaaaaactaaacgccaaaatggaataaaaagcttcaaaatataaagtcacataaaacgtgactttaatatataaagagctttagtaaaccaacaaaaaattaactctccaaaagaaaattgtgctaatactataatagctaatgttacttatttgttatgtggtagccactattttaatttttatctaggtagtgtgtaatctacctatctacctatgtatctatcattatcaatcaatatatatctgtgggtttcaatacatatttcaagtgattctcacagtaattctttaaggtttgtactgttctttctccaccatccaatgataaaactaagctcaaagataaaactaagtcacagaaaatctctgagcaattttttcatagaaaataaatcatagagctagagtttgatcactggtattctgtctccaaaatgaacacttaaacataattttcaatagactattcaaagagagacatacaaatggattttaaaattattttttcaacccaggcttcagtaataatagagaaaattttgaaatggtattctgaattagcatttttcacctattaacttcagaaagataaaaatgtttaataatacattgtgttggcaaggaagtgaagcaatatttattaaatgaaaaatgcatgggttctctgttatcatttacatatttccaataatttttataaatatatttgtccatgttggcaaacatctttttatggggataaccatttcagcataatctttggtagtaaaagactggaaatgaaaatacaaaaatgcaaaactgtttaaatataatatagtacagccaaacaatggaatactacgtggccattttgcatggacaaaaaacaaggcacagaatgatatgtatgtttgtctgaaaataatgagtatgtacgtgtatgagagtgtttgaaagaacagatgcatagatgcctctataatgagaactgtgatactgaaggacagatgaggaggaaagacttacttttgctgtgtattatttatattgtgtaaaatatttataatttgcatggaataatctccctcgccacacacacacacacacacacacacacacacacacacacacacacacagtgactttcaggtctctctgaggtccagaaatggagacctcttttttctctctgctatgctttttcaaaacttccttccttctaatatctaccaattttgtgaccctgaattttggtcacagttggtctcaatcctgtagtcacacagaaaattatttgaagacatggatttcttaatttatgttccaaattctctgcacattgcatcagagaggtttctagacacatccacaagctatttgatcccctcaactccatcttttattttcagagctctagtctttttaaggtttcacctgctgaggttttgaggttttaaggttttaaggtttcacctgctgaggttcttgtgcattctagtgaaaaatatattttagtgagaaatataattacagctaccagtcggattcaactcctttgtaacttctggttgcagcttagctttaaaaaccattcaaaaaacaatctagagaattaagagtccaagtaaaataaggcttttctcattgccactttaaacctcatatgcactatgcccaccaaatatgaagaatatttttctttgtaggtggcataaagtgggtactgtgggacagtactgtggccacgaggtggcagtggttcaatttactctcattctacaactgcctttaatttcaaaagcatgaaaattactagaggacttgcatttgattggttgagcagccaacagaaaggctctttcctgcattacagaatatgaactaagatacagaagtggcgcctctgagaaaagaaggttggaattatcgtaatttgtttctaggctgagataccagcatggagaaaatgttggagtgtgcattcatagtcttgtggcttcagcttggctgtaagttggaggttaagaaatgagaaccattcgtgcaaagctgaggaagagagatgaagatttaatctcagctcattcagt

SEQ ID NO: 11928 - DNA, 2300 bp, Homo sapien
cgaggtgaccagtcaaatggcttcactgcctgtattagtctgttctttcattgctataaagaaatacttgagactgggtaatttgcaaaggaaagaggtttcattggctgttcaggttccgaaggttgtacaggaagcgtgttgttggtatctgtttggcttctggggaggcctcaggaaactctcaatcatggcagaaggtgaaggcagagccagcacttcacatggttggagtaggaggaagagagagaggacggggaaagtgccacacacttttaaatgaccagatctcaaaagaatgcactcaccatcacaagaacagcaccaaagggaaaatttacccccatgatccaaacacctcccaccaggtctgacctccaacattggggattacaatttgaaatgagatttgggtggggacacagatccaaaccatatcactgcccattcctgtggacaataaggctagtaccctggtcctgcaccagataaccctcaaaggcaccaccatgtgttactacactgtgggcagattggaccacatctgtctcccaggtgaagaggggagataaaatccatttaaagagggcattgcccaagaaaatgtgagattaatggaagaaggtagaaaatgaaatgagaagaaggaaaggggaaaaataaggaaaggtacatgaaatcaagaactgcaccagtaaagaaaaaacaaggagagagaagatcctggatattgctctttctccaatctaacattttcattcttggtaaaggtccggtgtcaagttcataaattgagcattatttttctgagaaatatctgggctctctcgattttttcaactatagcacatgcattgaaaagtaaatgaattttgaaaatttgctaacatgaaatcattatatcaatatttttatttcaacatttccctagttttctatgtacctgtattccatttttatgactaatcactttgtaaattaatgtgtaattgtttaagtatctacgcaatatagaataaaaagtgatacttcattgattttcttctgacaagttcctaatcactgttgggtttcatcacacttccactgtttctatacatttaaatacaaactcacagtaaacatacttttaaaaatcgtaaataggatcacactatatataaaatgctgtggttcaattgaataagagacagaagcttttgcaactcagaaagtttaacccaccttatacttttttgcaagtgtagtaagtaactcacaatacagagctaccataatgtattgactatctatattgaaagaatatttaaatttttttccacttttttaaccattgcatgcaatgtacagtgctgtaagtgtatttataagagtatttcttaagaaaaattcctggccaaatggaaattttgcattcagtaatatgtaaataacatatgtagacatttattaattatatttcagctatcagaatatcagagtatccatttcctgacattatcaacaaaactgaatattaatagtatgattctgaactccttttgcaatatgacaagtaagagatgatagaaagggccttttcacaaaaatgcaagttacgggaaaccagtccttaagcactgaagtggcaagaagagacagcagtcagaggaatctggagaaagttgctgtaacagtatggaaaacatttatatattttttcttttctaacataagcatttaagaatatatatttctctctatgcactgatttggctgcattctacaaatctcatattcaaacatttttgtttctttaggagaaggaggaggaggtgaaagtggaggagaaagaagcatttctctagcagtactgtgcttggttctgaagtggcagtgttttcatttctttcattccatttccacctcccacattttgcagatctgtgtgtgtgtgtgagagagagagagagagaggagagagagaggagagagagagagagagagagagagagagagagagagagagagagagagagagacttgtctcagattggctgggccaactctgtgtttcctgtagaaatgtttgaacatatgagagagcaaagcagagtgtttatcttgtgagccattctccatatttcagatataagatttcagttctcagtgagtctaagtgacagaaggaatggagaccctcttgggcctgcttatcctttggctgcagctgcaatgtgagttagagggaaatggaaatgagcaaagagcaggctgactccaggacgtttctcccaggaaagagggagaaagaaagggag

SEQ ID NO: 11929 - DNA, 2300 bp, Homo sapien
tcctgagtgacagagacagtccgtgttcttcagtacatttgcgtgtgtgtgtgtgtctgtgtgattgagtggccctgtaaaatatgaggctctgggcagggctcttgcctgagtctaagggtcatactgtccacaaccttgctcatcttctgtccttcttgtatttaaaacaaagggtcacttttcaaagtttgccatctttgcttttgttactctccagtctcgtcacctccacagaaggcatgtagcatcacatcccccatcaagtcacatcctgtaatagaagtttgacataattgttactgtcttggtgctcatgtggtgtttaaggatgctttttaaaaatgatatcctgtaaacctttattacattcagagagatgtttgtctcctcactatatcacaagctctctgaaggaaaaaccgtatccaattcatttttttttttaatttccaaggtctcaaacactcttaaatatattgacttaactataactgaatcaaattggtgagctcatattttttcagttcatacgtatgaattaaatggatgttctaattacataaaattacatttaaagtatttatcttcataaaagccaccgtggggtctcatggccctatttatggtactctccattctgtggacacttctgttgtttcatgtcaacccacaggtacagccctaggaaaagacagctgggctgagctgtccatatatgctgaggaagatgtagtctttctcaaggtttagcacgtcaggaggcatataggcttctcttaaattgagggacggctctgaaggatctagtagtgaatagttgttgaaagatttgagaaatatattgagtataaggatgagggccagtaagagtaaagagggaagaataattatgtgcaaggacaaactaaatcattatcagcacataagaaacatatttttgctgagtattcttttcaattgtagctctgtcctctaaaacaagataaatgacatatgaatattcaagttctaggttatatttgaaatgcatatatatatacctatatttaaatttttgtctttatattattatctttatctgtatctatcagaaaatcctggatcaaacagaatcatatacagcaaaagggaaagtggagaattccaaagaagggaattcggattttaaaaaatttttatttcctaagatttcctaagaaaaaaatatgaacttttatttcacaggtccaaaattatttctaaactgttgaaagccatcttttctttagtattctcctgtccctttcatgtaactagaaccccctaccctcaaccaaaaataaataaataaatagataaataaataagtaaataaataaaagagagagagagaaaaggaagaacatggaaacagaaggtaatgataggagaaagtggaaggaaaaaaggaagacagaaaaaaaagaaaaaagatttactggactgtaagataagctataaaggaagtttgtataaaataagaattagaaaaataaaacatattgcccatccagggtaatacgtagaaaaaaatttgatttgatcttattttttctctcacaatttacagtcttactagggtcatttcttataacaatatttaccacaattcttgattatttcagaggagtcctaatccacacttttcatatattctaataataaaaattattacatatataatacataacatgtatgtccttattactttacatgactggaatgactttcacctaaattggctaataaagaccttcttgtcagaacacattcttgttttgggggtttaaaatgtggacactcattctgtgatcctctccaggctcgaattagtattacagttgaggcacgttgtcctcccgaggaggcccctccctttccttctcacaggatctttcacattctttactatatccagaactattagaaaacatccctcaggttacggaataatgacctttctttttcccttccactccacccctttccaccccggctctcagccaggtttaagtcggcgggtggggcttcctgtcacagaacgctgtttaaaaactcagtagcatctgggcgtgagcaggctttgtcgggtggagctgattggttgcaggagcagcaacagttccagagccaagtcatgacaccgacctccccaaggtttagttaaatatatcttatggtgaaaatgcccggagcaagaaggcaaagcatcatgaagaggatattgggagctctgctggggctcttgagtgcccaggtttgctgtgagttggggctgt

SEQ ID NO: 11930 - DNA, 2300 bp, Homo sapien
gagatcccatgaagtgactccatctgacggccagtttctgcctctgaaggaaccccagagcagttgcggtgtcactgtttcagtagccctgttctctcctggtacctccagcatcccaatcaattcctccagatccgcctgagacatacctgacctcagcaaggacaaaaatctcctttcatctgaagaaatcattggctcaagaggaggactgagccacttatttcagtgttctgatagatgtaggggttgctgaaccgttttaagaagctgtaggaaattgtttgatgtaaactccctatatggccacaagggggcaatgcttcttcaaagaagattaacatttgtccaaatacacatattcagcaattagccagagattatccttttaaaatagtaaattatctcctactctgtttcaattcacgtgtctgtttcattcaatgcatctatgcatttatccattcatctacctaactagtatctgtatttattctagtctaacagagtggaaaacatcactttggaagtcaacacttttttgaattatacatgttatccttcaagcccacattaacttctgtagtataactttacaaggttttcacccacatacagcccaatatccagtcacactaatctgtgcctaaaattcccttatccattctttttatggggaaatctatcatggtttgtggcccagttcaagcatctccccatccgtactcttctttgactgggtccagaaacagatttcatcaccctttccttcgtcacatcatctagacacactggtgtctttggcaggttccattggctgatacctgagtcttgggactaggttgactgaagacttggactgtgtctctttcgtgaatgaaatgaggcccaagtactgcctaatttagtaggcactttgtggacagtatatatgtattgaatatatgcatatataaattaaaagaaaagaaagcacatcaaaacttaaacaacttttaaaaagcaccttagggtactggggaagaaaaggtttggattgtagattgaggaacgtggaccattgtctcctattggactgcgatggtgttttctttgagtggatttgagatgacaccaaatataaatacaaaaaaaatcatttttgtgcttctgaaaaaaatgtgcttctcatgttattttaacttatatgacttataatacagatcatccctatttcaggggtgctttagaatttatcttcaatttctcccttgtatcttgcctgtgttaatatcaaaagttaaatttattctttatattttcatagttgatcgattttgaagtgtgaataaaatatcgaatgtttattcaaactcaggataagagccaccaaaaatgactgcattacggatggttatagatctatatcttctgcagaatttttctatcctctctttccctttaaagatcacagctcctccagaacagataattccagtatttcctattttctttttctaggtacatttaaaaaaatatttaatttacctaatgtgtaatttagaaaaaaatatggagaaaaaataaaattgacttaattgtattatatcatttctgaggatcatctaaaatatggaatgaatacatctgaaaaattgcaacaaaatttaagttctctgaggacaaagggaccatatattctctatgttctgattcatgaccttagcttgtaatggggtattatgcccattgtgtgccctcaataaactttattaatactcacaataaaaaagaaatgccactgtacatgttaatcgtgcggtttcacaagagttcctctcttctaccattgtaaaataaggccctttctattgacatatccagccatcttaaaggtctgaggaaaagttgagggggcttgacagacagaaattctaaactgatgcttatctgtgtgtaaagaaaggattactgattcccaatgaatatatcttcagcaattctaaatttggacaaagtggggaagtgcttcctttgacagagacagctttaagtgaaagcacttgtgaaagggcggggcctgctgaaagaattcagttgagggtgaatttacagagtttcagctggttgggaagactggaagaccacctgggctgtcattgagctctggtgccaggaggaatggacaagatcttaggagcatcatttttagttctgtggcttcaactatgctgtgagttatggaagagaaactccaggatatgttactaacttgggtgaatgagaaaattggggtacagacaaactcatgcaggtagaca

SEQ ID NO: 11931 - DNA, 2300 bp, Homo sapien
tttgtctgagctgttgctttgccattgtgaagttccaattcccttggtttgatgggtaagtaggaaggacgggaggtgatgacttctggtttgtctcctgtgtcaaagccaaggattggtgagcagcttcacctttgactcaggttggtagcaagtgaacaatcaaaacatgaatgtatatttgtaatcaaagccatgattcataataaattggtttcagataagcccctcagatttatcacagatcaatttcctaaacttggaaattttaaatgactaatctccttttaagaattccttcaatattgtttcatgcatgtcctttaccagatataatcctttgtcatttgttaattaaattataagaaagggcaaaacgatgtttaggatagaaccaatttcccagcctagggattatcatagcacattcacacttgacccacccagaaaccacatttcagaggcagcttccatacagaactgagggaccctgcacctgtactgtcagggtacagagcagggctatttcaacaggaaggaaatcctgccatcatactgcttcccagtctactgtgagtattcatggtctccatctacttaggtacaaataattgcaaaccagagcatggctacctctcagcactcagaggtgaaacgggactaaggagtagatgtctcaaacaatgagaaactattccctgcaccactcagtgatatgctattttgacctttataaaagaactggaaatgttttagagaccttgtctgcactttctttcttagctatctcttggtccctttatattaattcgtccattaagttagtgaaactagaggctgggttcacacatataatcccagcactttgggaagccaagataaggtcacttgaggccaggagtttgagaccagtctgggcaacgtagagagactccatctctacaaagtaaaataaaaatttagccaggcctggtagctcgcaactggagtcctagccatttgggaggctgcggtgacacaattacttgagcctaggagttccaggctgcagtgagttctgattgtgccactgcacttcagtctgggtgacaaagagagacccccaactctaaaacaaaaatttttctatttaaatttttaaaaaagacaatgaaatcacatggaagattaacatctaaattccatacaatcacgtaacagcatacaaaaaattcagccaccaacttctgtggtattgacatgcacaaagttcttgcaaccttcagataacacgttctgtgggagtatattatagcattgtatcatttgcatcacagagagatcttgtatgcttatcatgacaaacaatgtcttatgcttatcattaaaaatttttaaaatgcccagccacagaatgtaacaagtgagactgaatactttggatcaatgggatagaaaatgtgatatcaggacaattctaggacacatgatctaagaagtataattctacttgtgaaggcaacaggactgaatatactgatcctcctcagtctagtaaataaaacttagtgtcagattttgaaatgattacattttattgctgttataatttcataaagagataaaaaactgagcagcttctgaaagtcgagaaggactgatttttatcatttgattttgaagtagctttacttattatagaacttaactagggccctagacctcagtaaggaggaagaaagagatgcagtaattgtttagaataggactgcctttcacagagaaagtcaaatatctgagtatttttcttttaaatttaattagtttctgatggcaaaaagtaaatatatgctaaatgaataatatcaatgtatgtcaactggttcaactgcagttcccctcaatacaaattgcttttcttatatcccttttctaggttctgtctatcctaatgactagggaaagacaactagacaaagtaaagattcaggggtgagccagacatttttcctcatctgtgcatagccatgtagtctatgaacatgagactcaatttcctgtttggggagatagcatcagaacccaggaactacatatacacaccgcagggccctggtaggcactgaactttgagcttcaggcagcacaactcacatttgtgcaaagagctacatgccacatgctgttctccagcctgctgtgtgtatttgtggccttcagctactctggtatggatggttccaagtgtgagtaaaaatgttaaggatggaaggattccaaacaggcatatggtatttctcatggacttgaggaggaaagga

SEQ ID NO: 11932 - DNA, 2300 bp, Homo sapien
aaagtcaaatatctgagtatttttcttttaaatttaattagtttctgatggcaaaaagtaaatatatgctaaatgaataatatcaatgtatgtcaactggttcaactgcagttcccctcaatacaaattgcttttcttatatcccttttctaggttctgtctatcctaatgactagggaaagacaactagacaaagtaaagattcaggggtgagccagacatttttcctcatctgtgcatagccatgtagtctatgaacatgagactcaatttcctgtttggggagatagcatcagaacccaggaactacatatacacaccgcagggccctggtaggcactgaactttgagcttcaggcagcacaactcacatttgtgcaaagagctacatgccacatgctgttctccagcctgctgtgtgtatttgtggccttcagctactctggtatggatggttccaagtgtgagtaaaaatgttaaggatggaaggattccaaacaggcatatggtatttctcatggacttgaggaggaaaggagaaattgtaaaaaagcgagcatattatgattttagtttggtttgtctctgggtcctaaattagtctagctcttacgatattttattcactatatcaaaggatcagctctgttttctgatttttcccacaggatcaagtgtggcccagaaggttactcaagcccagtcatcagtatccatgccagtgaggaaagcagtcaccctgaactgcctgtatgaaacaagttggtggtcatattatattttttggtacaagcaacttcccagcaaagagatgattttccttattcgccagggttctgatgaacagaatgcaaaaagtggtcgctattctgtcaacttcaagaaagcagcgaaatccgtcgccttaaccatttcagccttacagctagaagattcagcaaagtacttttgtgctcttggggaactcacagtgtttgaagtgatagtaaaagcaaaacaaaaaccctagggctcaataagagaacccctctactccccatcctttgctacaggagccaatctgaaatgcacacctgcagatctcaggcaagagagggtagtgactgtggtctgtggatttaatctgtggtctggatcagatggtttaattccaagtaaaacctccttctatctcacttggaaacaggtgttcagagcaactttcttctaatacttcaatttttacttaaaatagatcatacagaaaatgtgtaaagttgtctaaagttggaaagacttccacataataacttaaagtggcagtttcacttaacgatgctcacagcagaaatctgggtctagttatcttgaatcaccataaaaatcatttccttagccctttcctcttaagctttatgtcagttaggatacaatcagggaagcagaaccatcgtgaaagatgtagaataagattaattataaggattagacctcatgcaattgctggaacgggtggctctcggaagttacttagttgtttatgtttttatgaaattgtaacaggaataaaatgtaatctattcaaaatctgacactgagttttatgtactaggctgaagaggatcaggacattcagtcctattggcttcacaagtagaatagtacttcttagatcatgtgtcctagaattctcctgataccacatttctatcccattaatccaaactattcagtctcacttgttaaattctgtggctgggcatgtttttcatgtgtaaaataaagtcgtgataagcatgccagatttctgtgatacgatgccataatctgctcttactcctatgcaaagctgtttgctgaatttactctaggtcagctagactcacatttgggaaggagagttgaacatggacaagagcatgcaaaagctgtgatttgtaaagacattttggaacccatggtgacaggtggaacccacgaggacaaactaaaacttgtctgtctcttacctccttcaatctcatagtgttggtgaccttcagaagaaatggtgttatttgctatcatgctccctgggtacttggcccaagaaaaagagaagctgaaagaggagatctggggggagtgggggagttgtgaatcaacaataagatgagttagcagatcagagcaacatatgtgagttgccacagtgcctggagcctggcacctgccttacacaatttttttcaacttaatcgagaacaatatagggaaggattttcttagaaatatatttccaggtagttacgacgagacagtacaaagttaccacaataccc

SEQ ID NO: 11933 - DNA, 2300 bp, Homo sapien
cagcaagctatcacaagaccagaaaaccaaatactgcatgttctcactcataagtgggagttgaacaatgagaacacatggacacagggaggggaatatcgcacaccagggtctgtcaggggatgggggactaggggaggtataacattagcagaaatacctaacgtaggtgacaggtcgatgggtgcagcaaaccaccagggcatgtgtatacctatgtaacaaagctgcacgttctgaacatgtaccccaggacttaaagtatgatttaaaaaaaagaatggcttgtttgtctagcagccatccctaaccctagtcctcatgcttctgaactaggagtcattattgaggcttccaggatttcctttactacccatacatttatctccttttctgggaaggaaagctagaagttaaccattgagatactttctaatcctgttctaattttttagaacgtgatttaaatgtatgtggaaagtgctgtcccctgattttagtacataccccatgctgtttcctttgcttacttcagttgttcactggaaaggttttaaaggcacttcatacactaaatacctagaggttaaatttatattctgaaaaaaattaatgctatcttatattattaaatttcccttggatatatcttatttctccaattatattttgggctcacagggaatagggaatgttgctttgtaatctttttttctttcttttcctctcccctagatgaggctgtagctttgtaatttttaattcctcagagctcctagggaaattcaaagcacaaaaattactgtttaaaaaatacatgcatattgaatcaaactaacgttatatctggactgtgacagaagcaagacagcataattcttatttacttttaaacaactttattggagtatgtttacgttccataaattcatccattttaaatgtatggttcagtgatttttaattaataactgatttatgaaactattaccataatctatttgtaaatccttttcaacactctagaaagatccttcatgccaaacttatagttaatctctaacccaaccctggccccaggcaaccggcttacatctttatagatcttccttttctgaacatttcatataaatggaatcactcaatatgtaatcttttgtggctggattctttttcttaaaatagtatttttgaggctcatctgtgttgtagcatatattatgttttattttatttatttcatttttgcttatttattttattttatttattatttatttatttttgttgccgaatatcattcacatcttgtatgaacatactgcattttgtttattcattcaccagctgatggacatttgggttgttctcatttttttagccttaataaagaatatccacaaattagacttccattatttttagaacatatctaacatgtaaaacattcatggtgcatcacaaatgtaggtggcatatcagattccaattataaagtctagagctagacagatatatgttctaattcttaatatgccacttaggtaattgaccttgagtgaattatttaatctccttgagctttgggttattttttgtttgtaaattagaaacagtaatgtctctattgcatgactttcttattagatagatgtacataaagaaaaaggtaatttagatgtgtgcacatttataatttgagggggattcaaaagttgttttttaatgtttgaagattcaaagaaaaatgcttttcctgccacaaatgccatcccacctgtaactccctctaaatttgaataatagcagtccacagttaggcagcgcacttctgaaagggtgtcaattctcgttgtgttccacactcatgggggatttcctcaaagtttatgaagttggcctgaagaaagcagttacttcgacccctctttgtgaaccacaggaaactgaacatagggcagagcgtttctaggacatttatgggagctggtctctgattggctaggcaaccagatgcagaatcctgttttctgaagcagaatatttccacagattttggctgaaaaacgtttttctgctgtgggtacgtgagcaggaaacatggagaagaatcctttggcagccccattactaatcctctggtttcatcttgactgtaagtccaggggttacaggagacattcttagtctggggtgatgatgaggaaggaggaggatgcagtcagacactctaggttttatttggggatgtgtgaagaaaatgccaactctgtagagagaccaatttctatgtctgactc

SEQ ID NO: 11934 - DNA, 2300 bp, Homo sapien
aggctacaagacagaccatgctgcgagttgggaaagggcaagcttgacccgggcgagattcctctgtctgggtttatgcctcctacgtaaactgcaccagtactgctgccctggatgaagagaagaggatttctaaagcccccacaggtgctccttgcacactccttgctcttcttgaatggggaaggagtccttattgccttaaaattgttagctttgtcttcattttgagatccaaatccaatattcctacgaaggaaaaaaaagcatcccagtggcatgcatttcaaaagtttatcttaattcacaagatttgccatttttcagcacatccgaaaactgcttcttggtctgtttccatttcatgcagtaattcagatttagattcactttttaccctacacaaaatgttgagatttccgccattaatacatttacaaggcaacactttaaagacattagatttcttgtagtgggttgaatgatgacagaagatatgtccatgtcctaatccctagaaatagtgaatgtggtgttatttgaaaaagggtctttgcaaatgtaattgagttaagaatatcaagttaagatcaccctggattattcaggtaggccttaaatccaatgacaactgttcttttaagaaacacacggatgaggctgggcacattggctcatgcctgtaatcccagcactttgggaggctgaggcgggcgaatcacctgaggtcaggagttcgagactagcctggccaacatggtgaaaccctgtctttactaaaaatacaaaaattagccaggcatggtgatgcacacctgtaatcacagctactcgggaggctgaggcaggagaatcgcttgaacctgggaggtggaggttgctgtgagccactgcactccagcctgggtaacatagtgagactctgtctcaggaaaaaaaaaaaaaaaaaaagaagcacacagatgagaaggccatctaaagacagcggggtagaggttgcaattatgcagccacatccaagggatgcctggagccaccggaggctggaaaagatgaggaaggatcctcccctagaacgttcagagggaacatggccctgctgacaccttaatttcagacttctggcctctaggggtataaagaaaataaatttttgtcaagccaccaagtttgtttgctacggcaaccctaggaaagtagtatctcctaaaggtgatatttctaaatagctacaaccaaaccttgattgtttttatagaagggcacattgtcaaccaataccatttgaatatggtattgatatggttctaatattttaatactttttggaatattttaagtttaaatcgtgacacagtgtatatacaaacacacacttttttttttatcatttaatgaacacctgagtatccacaatttacccgctattagagtaggacatgttggtgaataatagacaaatactttccaatagaaattgattatctgttagataagactttttttctaattatattaatgtcttccctcatcacgctggcatgtgtaaaagtaacatagtgggatggcagacatgatctctaaattggataatttaccagggaaatcagggtgacgaaagagaaatttgtatttcttatcgtctgttttgaggtaatgcgttgtctaacaataaatcacaagtgtctcccacatttattaaaaagtctgtgacctaatatgtcccattaaggcacttataagcatgtgctacatggcacaacatgatgcttagtgacaatggaagcgacaaaatggaactttctcttttcttcggatgccctagttttaaatcacagactccatttttaagaggcaaattattcctccttgaacaatgtcaccatcagtaaactcttttcttccaatccttgacacacatacataccacctaaattagaaagcagctttattaataaaataatctgttgtcaaatcagcaatgtttgagtccaccacaggggggcagcatcggcaaacatagactctcctctgagagggtgggcaaaatagtgtgattggttttctcaacttgcagtcacctctttccctttctttccaaaatgcacacatctactttccaaaatagaccgcaactatttctattgatctggaagaagcttgtaccaggcaacccatttaggagaagttggatgaagagggagagggagatgctactcatcacatcaatgttggtcttatggatgcaattgtcacgtgagtttgagacgtccctgactgcttccagagaataaatccaa

SEQ ID NO: 11935 - DNA, 2300 bp, Homo sapien
tgatttttcaataccattaaaaaatcacctgttagtggcctcaattgtcttccaaaaaataaaggcgaacaaaccaaaagcaaaaaaggaaattgcattaattacttttcttctgcctttgttaatgtaacaacatgatatagtcctccctactttcagtaattgtttgtttcttcttatattttcggcagtactgtcctgttaacttacatctttgtgatctggtacagagtaggctcttagtgaatattttttaaatgaatggaatattattactatgacttttactctatatctttgtagcttgatttttcacacccgtgttggggaaatttattgtctatcattgaatttttgcctacaaatctgaccctgtgtttaccccattgtagtcttttgttcaaaatctattccagaaaactgaaagagtgcacagacaataatttaaagatttgctcagcataagttctctcagtaaatttgtcagttatgactcatctacgcattcatgaaacaagtaattattgagtgcttattctgtgccaatatctcttttttttttttttcttttgagacagagtcttgctctgtcgcccaggctggagtgcaatggcacaatctcagctcactgcaacctccgcctcccgggttcaagcaattctcctgcctcagcctcccaagtagctgggacaacaggcacttgccaccatgcccggctaattttttgtatttttagtagagacagggtttcaccgtgttagccaggatggtctcaatctcctgacctcatgatccgcccgcctcggcctcccaaagtgctgggattacaggcgtgagccaccatgcccggccgccaatatctcttataaacattgaatagtatgggcttttgaactagcctttaattatgggaatattagaaacaaaagaaaaattaactccaagtcagcaattgagaattataatgggaatattattgaaataacaaagtaatttaaaaaatagttaaaacctttcttggagtgttagaggactgataaaacaaagatgagtacagaggtattaaaactaagatacctaccttcaaacctgataaaagagtcagaagattgctggctgactttttgcctgattatagctacacagttcattcagtcagtcagtcacaagagggggctgcttcaccttaaaactcaggtttctttcttgcagaagggacgctaagcttatgttttccactaaagttccacagaaaacaggaaaaaaaatgatacacttttatcctctttagacaaattgtactttatgatctcttattaagtgtgttatggcttcaaaagttctggggcccttacactgatggactaagtcttttcagagcacctcccttaacactgctttctccaagttacacttccctaatcatctcttacctcccctattccttacacctttttcttcctttcctttacctattcttaccaccatcaccccaaacttctttgcttttcctggtctcttttctttccgcctcagtgtccttggtgcacacagtaggcataagcacgggcatagaaattaggaaatgaacatgaaggccatgagtttaaggaggatgagagccagcaccatttatgtcattagtcactatatcaagaacagatatattgagaaatggctacttagacaacagtcaacacatgattccagggacctctatagaaaacccgagtttggggagacttagctttcagtgtcaatgttatcaatttttattttccccctgagcacatcacttcctacttttgaacttcacttccattttctagaatgtagatgggaatttccaactccttacaacacagagctcactataggcttctgggatttaatgacactttccacaagctccatggagcagaggaaactttatttggtacattgaggaagaaatgatggaagaaaaggtctggatagatacatccttatgatcagttttcctcattctgtgccagcctcttagactttaaacctcataaatgatttcagtagacaccccctgagttgaggatgtctggttgatatcctcaccgtcttctcaggaacatgactaaacctggggaggaagacatagaaaagcaactgctctatcattggctgacaagatcctgacaacaacacaatgagagctgcactccttgcaagtctttactagtagctgttgcttctgttctctggaaattctttaaacctagaatcagacacaaaaactgaactctgggtccacaatcctcatttgt

SEQ ID NO: 11936 - DNA, 2300 bp, Homo sapien
attacctccatgatctctgaacttcagcccatcagatgacctcactctaacacctccttcttttatatgttatttcttcataaacttggcaaaactctacgcaatcataaaggcccagtaaacatgatacctttaaaaaaaagatttttccaagaggtgcctctacttcattatatccttcaggccaattcatgactatatttccttttcttatacccagtagttcttacttagaatagaaccccaggaggaagatatgactccagccacactgttctgaattccatcctttttataaggatgaaatccagaacagaaaaattctgtggcagaatttttcttctgactgaaactgcaaggagattcaagcactaaaaaagatcattccatattcccaatcagtataatgacaacgatagttaatcccagtgtcaaggaaattttcttctcatttccatcttgaagctaaatcgttattctacttttcagataaaagcatattatatctaaagggctcgggttatgggattcctcaaagaagcagtcaatagcttgtaatccttgagcagctcttttcttgttcccatgagccccacaggctgaccccctctattttaagcccctcaaggaatctggattcccacatacccacttacaggtaaaatttttaaaaagaaaatgcatatgcattgtattttcccatttaagatattaacaaatagtcatatggccaatctgactatctttactaatgactgtatgcaatggctgaaacaatcctctcggtacacaagattttgtgatatttgaatacatactatactcacaccacaacatctatatccttaaatcactataccaatgcacaaacagtttacatatcaattcatgattatgtgttcacatctttctgtctagtaactgctggggttacaagagtgaaaaaaaaagcacaaccttttccacaaggaacttgtagatgagcccaacaagtgcaattaccagatagtgtgatgagggctttgataagcatgaaccagggatctaataacagagtaatgcagtagaatatcaaaaaagtattctaaattaaataatctacaacagaattgttcatctttaatttagtaaaaataggtttatgacactcatgctctatggccctgtaaatgtagcatcatttcacaccacatatgccccctactacagttacagttactcagatactacatggctcagcacgcttgttgaggatatcagaaatgataagatggtactttcattattttctattattcttttattctggcttttaaatgatcaatgtttaaaaggatatattttccattttttttaataaggtcacaatactctttctgtaaccggaccccagtccagctgctctccacttgaaagccaaacagagagccgagggtagatgggaaaagcaggtttaatatgagagccagcaaactgagaagatggcaaactagcattctaaagtaccattttacatttttaaattcaccatgagattttaaaaatgaaacataggatgggagacatgcaggaattctgcagggtgcagggtttgtgtgtcttgttctcgaggctgtattgggtaattgcgcctctgggggtctggaagttgttatcttgacttcggcctggtggtggtggacaaattgttcacaagtccccctaagcttgatgatgcctcaatggggactgcgtggtttgtttctaggtttgactctgggatttcttaagcaagagaataattagacaagcatgcattactggcaaggagtgtccagaggggaagaaatgaagggatgagaggggagggaagggaaggaagaaaaagaaagtgggtgaggtccccagttacatttctactttaatcttgatatttatgcctaccaaatgcaattgggagaaacagagcattattggaaataaatcacttttctatctctccacaggagggtagtatttcaaaaggcaacatacattttgggttggaggaaggggcgggtggagagtgaatgattccattggctgccacactgaggctcctggctttctatggaactcaaagtgggtggcagcaagcactcttctagcccagagaagtctgttccaggacgggctctttcaggagcagctaaagtcaggggccatgtccaccatgtgatagaaagacaagatggtcctgaaattctccgtgtccattctttggattcagttggcatgtgagttgaaaaggttcccaattaaattaacagaaaatccctgat

SEQ ID NO: 11937 - DNA, 2300 bp, Homo sapien
gagttcatttgctgagcactcttggctataatttgtctgtgtacttttaaaattgcagatacctttgtccggaatgcccttttcctacaaagccaacttgttaatcttcctttatctcttaaggccccagctgaagggctctacctttgtagggtcttccctgactccacactgctaacctcctcagcagaactaatggatcaccgttatgctttcctcataaaaacactcatgtctcgtgctatgttgtaagtatatagttacacatttttctttctcttcaaattaccaggtatttatgaatgaagattgtcccataaccatatttgagactctaagccaggcacattgctaaatattgcataaaaactaaattaatattgattgatatataaatacacaaatcaatgaaaatttcttcactagaaagtctgaattatataggtttaaagtatataatatgcaacacagacaatttatcagtttctcctgaatcaattatttttaatagactatatatatacatacatatgtatatatatactatatgtgtatagtacatatatacatatgtatatatatactatatgtatatactatatattatatatgctatatgtatatactatatatattatatatactatatgtatatactatatatattatatatatactatatgtatatactatatatattatatatatactatatgtatatactatatatattatatatatatatactatatgtatatatattacatagacatatatattttttttgagatggagttttgctcttgttgcccaggctggagtccaatggcgtgatctcggcttactgcaacctccatctcctgggttcaagcgattctcctgcctcagcttcccaagcagctgggattacaggcaggtgccatcacgcccggctaatttcatatttttagtagagacagcgtttcgccacgttggccaggctggtctcaaactcctgacctcaggtgatccagccgccttggcctcccaaactgctgggattacaggtgtgagccatgatgcccagccagacttaatgtattaatggacttaaaacacttttaatagaggcattttaacttttctgagtatttgtttcattattcttcaagtgaaaattcaaaatgtttattaccataataaaatatgcatcaaatattattttattatgtgttatcagtccttgctaaaaataatttcaaaaaacattttggaatttaatctcagctgaaatcactagttgccctactaattcagcattaaaagtacaattgattcttcttccttcctccatcatagtaaaccatggggaaatacattacctgtggaccaagagtgaagataagcagctatgttgcctttttggcatcttctggtaaatttcatgaatatattgtctatagactttacaggattatgtcaccgtttttctcttttgaaaatacagaacacactaaatgatctcattcaagttccaatagagataatttcagttcagaaggtgatctaatacagaagataaattttgttgtgctgatttgtgtttttgagagaggtacccagaatttaaatttaatttaattatgttgtgctatttatcatatagaaaatatgggcatatttgaagaccatattagaattcaattgcactaaagagtaagctacgaaacttctttgtgttctaaattcatatcattgtattaaataaaacatcatacccatatgcgtccccaataagtatcaatccttattaatgtttttaaacaagatgtctgccttagtatgccagttgacaaggtgtcagtcatttgaccttatgtaattctctaattttcagctatcattttctactattgctgtgtgtgtgtgtgttctctaaaaacttttccttctctttcaatctcttgttttttaactttttatggagaaggcattataaaatcatctttaggaaatacagaaacacatttacagaaactttctacatttgaactaaagggggcagtgcttcctttcataaagataaataagcttagagctccacacaggttgttcatatgtaaaatgaagggtctgtggaaggacatgaataaagcacaggaggttgaagtcagatttgcagctttctaggcaggagacaagacaatctgcatcttcacaggagggatggccatgctcctgggggcatcagtgctgattctgtggcttcagccagactgtgagttgtgcatgggaggtttgaatatagtaagaaaagctac

SEQ ID NO: 11938 - DNA, 2300 bp, Homo sapien
tccagttactatatatccctgctcttaacaaaactatttcaaataccttaagacaataaatcagcttttcttcttttcagatatatttaacatgatttataaattactgaaacccattataaagttctgttacaatggacatttttcactctaactgctgttacatttaccccatttcatgtcttgcataatggggagggaatatattaatgctgtctttatccttctaaagcaacgtagaatcataccagaaaaaggaatactacatccaatctcatccctgtctttttgttcaagctcttcagactgcttcaactttcacatttcattcattcccacagttatctatttacgttcttttcttatctaatatatttgggaaacagcattgggaaaacatactttctagcattgttctagccataagtgtgttgtatcttcttgagcaagtgaatcaacttcttaacattgtatatcaggaccttcatctgtaatgcaagggcaatgatttccagctaacatcggtctcaagttttattcattttatcaattagcaattgttaactggttgcctgctgagttccgcataaatgttacatgctgggaaaaaaagagctatggaaaaatacatatcttctttgactaaattgtagtctagttagttatgtaggcagctaatcagacagagtaaagtgaaatgaggccaaccttgggaaagcaaacggaggtatgaaggcatatggaaagtcccacccccatcttagccttagaggtgagtcaggggcagcctgtagtatgtcttgcctatgctgagacctaaagatttagtaggagtcaatcaagttgaaagacagagaaggtagtaaaagtgatcttaaagatagaaacagcatgtacaaggtgacacagaacacaatgaacctgaggactaaaagccagaattatgctataattaaaattatgtatgttataaaatgttcaaaccaccactgcaaagcagttgtaccttaattctcagttttataaatgagtaaccataatatttgtgaggttaccaaatatgttttctatttacttgagatttcacttaataaggttattcatttgatacctaatatgtgtcttagactcgaaaacaatagatgcaaatgagaagaataaggcattgtttctgccttcagggagcatgtaatattgcagagtgtattacaatatagtataataaaagctatcataggagaagcgtagaatataaccacctaacagtggcatttaatttggaaacttaaatgtaagggaaagctgcctacgggaagtagtatctaggttaagatctgtaaaacagttagccaaaaatggagtcagagacagggtattacagaaaaagataaatagaatgtacaaagacatgaagtcaatatttagtttaagagaatgacattaaactaattcaggatggccagagcatacaactcaaaatgtatgtcagtaaatataaaactaaagcaataagcagaaaccactttgtgaaaataattaaaagccattataagatgtttgtacattacattatcttgaagacaatgatgagcagtgaaagaaatctgcacaagtaaataatataatgaaatgtcactgtttgaaagattactatgagttcacatacttatatattatatccatgtgtgggcatgtatataaaatatatatatgtagtaaaatacatataatacattttcccttgatacttcttttttctcttaattctggagtaattctttctgtaacacagtatattgataggaccttcttatagcaagaaaaaaacctatcctgtatgaaaacttactcaagaaaagccaaaatccacagtttaatcaacattcctcagtctggccacaggggagagctgtttaaaaagtattctaggtagatgcatttagttctctgcagttaaactgttgtgatgtgtctctgattggttgcccccaaagttgcaatatcctggaagcaattgcaacaggcctcattctgagttcaaagcaactcctgttaaggaagcccattcagaagctgactggatattctggcaggccaaggatggagactctcctgaaagtgctttcaggcaccttgttgtggcagttgacctgtgagtacacgattcagtctgggagaggttgtgatatgacagcatcttaatgacaatagctttctgtcttgggaagggcccttttaagaaccagacctaagaagtgaggaaaatgtaccgtaattatgtggtgatgcttaatgtttta

SEQ ID NO: 11939 - DNA, 2300 bp, Homo sapien
attaggtcccatctatatatctttgttcttgttacatttgcgtttgggttcttggtcatgaagtctttgcctaagccagtgtctagaagggtttttctgatggtatcttctagaatttttatggttttaggtcttagatttaagtccttgattcatcttgagttgatttttgcataaggtgagagatgaggatccagtttaattcttctacatgtggctagccaattatcccacaaccatttattgaatagggtgtcccttccccacattatgtttttgtttggtttgtcaaagatcagttggctgtaagaatttggcttcatttctggcttctctattctgttccattggtctaggtgcctatttttatactagtaccatgctgttttggtgactatggcattagagcatagcctgaagttgggtaatgtgatgcttccagatttgttcttttttggttagtcttgctttggcaatgtgggctcttttttgtttccttatgaattttaggaaataattctaaaaccccaaagtgactgaaaataatttgacctttcttagagaattatggtaggaagctctttgctgagccttgtcactagagggaggtagcacatccaaaataatctatctttagacctgaaacacaaaccctgaaagattgctaactgacttggttcctagttctatgtaaaggagttcacatatacagtcacaagagggagctgttacagctgcaaatccaagctccttccagggtgagcgaggttgtcattgagttgtataaggaatttatgttcattctttttgccaccttgtgctttattatctctttttgagtgtgtgcacagtttcaaagacatgggtaagccccttcccaaatgcagagcagaagtgaccctgaatgggaaaaacagagaagtgattaatacatagctcaattttaaatggtgaaatatttgttgctataatggactgacaagcttagttattgtagcagagataatgagtaattttaattttattccttcccatttctttaataaccacttttgaaaataactagaaaaaccccttcatagttacttctacctctcttatcaaatggcatcatttgatttccctctccaaacctcttcccatttcttcctttctccttcaatgtatgccactcctaggcatcatgaagatgagaaagcatatgttaaagaggagttcaagtggcatagaaataggggtcattcaagccattggctcctgtctcaaaaccagaggcacaggcaatgtctatctagaagacacttaggacattattccaggagccagtgtgggagacctgagtaccaggaaacttggcttctaacctgagttctaaatttgttctttcctttcacacttagcacagcaatattatacaattatgaaattacttttgttatatatgttgcaaataccttctttcattgtgtcatttgattttcaattttgcttatggtaattttttttaccaaaaagaagtttctaactgttgaaattaaattatatgctactgcttcttctaagacttactcgccctgaagatgtggatagaaattcccttctttcccttacagcacagggctcacatagacttcttggaataaagggctgttcttaccagctcaatgggttgtcaaactaccaattaatggtgggttttgtccttaccataataagggatgggtaatcccatttacttctttagatgtagcctacttgagtttcagccttgaaaatgatcttaatggaaactttctgaattaaagctagatttaaagaaaatattcttcccctctttttaaagttttatttttttaattaacaaataataatcgtattttatcttcttttaaaatgtatgtttaaacctgggggtgggctagacctaaccaggaagctgctctatctttagctgacgatttctggggagcactcaaattgaaacctgcctgatgtgggatgtgctgtggctgctgctttgttgcttgggacctcctctgacctaggatcagacacagagtctgagttctggggcctggaacctcaatgtgcacttgaacaatgaagttggtgacaagcattactgtactcctatctttgggtaagtgttctgggcctaagaaagcatagttttgtggctaatgacaaaagagagttatctgctgtctccatgttttctaccatgatttaccaattgcgggaaaaaatttgtttctatgtgtttcttgagggtgtctgagcgtcagtgtgaggggttggtc

SEQ ID NO: 11940 - DNA, 2300 bp, Homo sapien
acaagcagaattgaaatttatatagatatgcatatgtatatttatgcatttatatatttatgcatacatatgcataaaaaacttttaacaaaattttagcagactgaatctaacaatatataaaaaggataatacataataatgaagtggggttcgtctcaagaatgcaatttatatgtatatgaatttcaattctgggccaggcacaggggctcatgcctgtaatcttggcactttgggaggctgaggcaggcagatagcttgaggccaggaattcaagactagcatggccaacatggcaaaaccctgtctcgactaaaaatgaaaaattagccaggtgtggtggcacacacctgtaatcccagctactcaggaggctgaggcacgagaatcactggaacctggggggcagaggttgcagtaagccaagattacaccactgcattccagcctgggcaacagagtgagactctgtctcaaataaataaataaataaatttcaattctggcgtgtgtgtgtgtgtgtgtgtatgaatacacttgacagaagttgtctaaggcctgtacactaaaagatataaaaaaattctgagatacatttaagatctaaataaatggaaagagttattgtgtttgcagattagaagactcattaaaattctctccaaattgacctacagattcaatgtcattcaaatcaaaatcccaacagaaattttcatagaaattgacaagtgggtctaagatttatatgaaaatgccaagggactacaacaaaaaaattctttttaaaaaacacaaattgaggaacttacactactgatatgaatacttttatagttacaataatcaagagactatgatattgatataaagatagacaagtagaacattggaacacaataaaggatccaataataggccagcatgtacatagttgattttcaacaaaaataccacaacaatttgttatgaactgaatatttgtgatctcccctgcaaattcatgtgttgaaatcctaacccccagtgtgatggtattaggaagtaggtctttgaggaagtgattaggtcataaaagtgtagccatcttgaatgggattagttccattcagtgaaaccctagagaactttcttgttctttctgtcatgtgaggacaccacaagaagactgccatctatgaaccaggaagcaggccctcaccagacatgagatcttccagcccctcgatcttagacttcccagccttcagaaccatgagaaataaatttccattgttttagtcacacagtctatggtattttgttatggcagcccaagctaacaaacacaatctcaaaataaatatgctgaaagaaaccggacgacagaaagcagatacggtatgattctgtttacataaaactctagaaaatctatagtaagagaaggcagactagagattgcctggggttgaataggcattgggatgatatattggaaaggtatacagaaaggattaacaaggaacacaaggaatagagacacaaggaaactttggggagtggtgcatatgttctttatcttgattgtgatgatgatttcacatttgtatgaccatgtcaaaaattatcatattggaccttgtaaacatatgtaatttgttatatgcaaagtgtacctcagaaaagtagtttttaagaaggctcaaaacaaaagtagacagagataaatattgaaaaataatcactctgtactatagagaacagaattttttactttctcttaattatggagggtaaactttctcaagcatgcaagggtaacatatgttatgagattatattttctttatctcataagtggcatattttaatgcaataaatagatctatgtcatatataaattaactccagaaaacctgtccattattcagcatttctcagtctggccaaagagtggcagtgttaaaaaagtatttgagtaagattgtacagtgctgaacaaacaggaatccaggtatggcttctgattggtgcaatctcctgcaccaatgagcaaagtaacttctgctggggaagctcattcagtaaaatctgatttaactgtgttttctaaatagctaagggatggagactgttctgcaagtactcctagggatattggggttccaagcagcctgtgagtatgtggttagtctgggagaattgcgagatggtgacagcatcctgagggcaagagtcgagtcatcttctgttctgggaaggcccgtttgagagccagatatgtgttgggaaaaaaaatgacaatactttgtttt

SEQ ID NO: 11941 - DNA, 2300 bp, Homo sapien
agatatagtcccctgtatgtgtatgaaatctgtttggaatctcatgtactatatttaaaattcatttgttactttctattatgtaatatattctcatttgtttcaacatacaaaaaatactttaaatcgattatttaaatgtatgtcatgttcatcccagagcttaatgtcacccttcatacattcatacactactacttggcttattcttcttgaggagagagaaatgtattgccagtattctcaataggtacactttcaaggctgagacagcagggctcatgaagaactggaacaatataaaccattgccgagactgcaacagcaaccatgatgatctcaaggaggcgacagatctaatggtaatgggaaaacacacccttgaggaatcagtgagcccctgcagctccctgtcatctctgtgcctcccacattccattaagagaatatagaaggaatgcatttttcatctgaattaaggtgttttgctttctgtttattgtttctttattttccaaaaatatgtttttcaataaaatctggcagtgattaaaaagaaaaaaagcaacataagattgtatttttatttggtggaaagcagcaattcattttaggtaacatgccaccacataacaggaatagagaaggtaagaaaggtaaatatacatacagaagtaagtcatgggcaaacctaaacaactaagaaaaaattagcaatgaaattaaaaggagaaaaatgcccagggaggcagaaatagattttcctgctctcctacgtctaaagagcacaatgagatacaaaacacaaatgccagtagatggcagaagctatttacctaaatcaggattgaggctatgaggcatagcttagacactcagtccagatcctaggcatttgaaactccaagttgcagaatcaattttgatcttaaaaaccaaacttcttcaaaattcccttctgtaaaagtgaggtttgctactattcaaagttttatttgcttcttaaagaatagccagaatgttcctaccactgtgttgataagcaaaggtaacattgcctctatcaggggctttttctcttttatttaagtctctgccttttatgtcaagggattcttttaatgtctaatgatcctgggatgctcattcatacttagtaggatacaaatctgagattcaagcaaagaaaaatggctccagttcctgtttttaaatacttcttcacttcactctcaactaagcctgatagcccagaatttcatgttatttattcaatatcttcagaaaaatagtcttttttccacaaaagtggttggaaaggagtggacacctgactattccaggtcaaatgggaaatctgagagtataactgcaatttattcaattttactttgcattttctctataaagtctcctacccctaccctctctctgattttctgaggtaccaggtatcctactcactaagacttctggtgcacctgaatttttgttggcatttgcttctgtgggaccttagaatttgcctttcttcagttcatttaagtcagttaccacttgttcattcacctgcattttccaaaacatctcacatgctgttatcctttgcctgttctatgtgtcctttggggttcataacttttaaaaacatttttactctcatttcaccaggtactcagaaaggaatagagaagtatgtttccaattcaccatacttaattatcagtctagccttcactgatatttcagagcaattataaggtgcccaggggcagagtttccatctgtcttgttcatgtctccatatttctctaatatatagtgaatactcattaagtgtgttcatcaagtgaaacggagaaatagaagaaactgaaaaagtggcatgaaaggacaaaaatttagcatttcaccatatgggggcagtgtctctattcatagctaaccttcaaggttagctcaaaaccctgggaaaacatctggtaagagatccgattggctgatatctggaacagagatttaaatttcgtggtagtgtttttagtgtcactctaagcccaagagagtttcttgaagcaaaaaaaaaaaaaaaaaaacccattcaggaaataattctttgctgataaggatgctccttgaacatttattaataatcttgtggatgcagctgacatgtgagtcttgagagtttctgactcttccatagcgaattctaaagggaaggaaattctgtgagggcaggaggtgaggctttatcagagactatgaaaagaggaaaacagaaggaaaaaagctagaga

SEQ ID NO: 11942 - DNA, 2300 bp, Homo sapien
gccacgggggtttggtgtacggattatttcatcacccaggtaataagcatattacctgacatgtttttcaatactcaccttcctcccacccttcatcctcaagaaagcctgggtgtctgttgttcccttcttcgtgtccatgtgtactcaatgtttagctcccacatagaagtgagaacatgtgatatttggttttctttcccgtgttaatttgtttagaataatggccttcagctccatccatgttgctgcaaaggatgtgatctcattctttcttatggctgtgtagcattccatggtgtatatgtatcacattttctttatccagtctaccattgttgggcatttaggttgactccatgtcttcgttagtgtgaatagtgctgtgatgaacataggtgtgcatatgtctttatggtagaaaaatttatattcctttaggtatatacccaacaatgagattgctgggtcaaataataattctatagaaggctttttaaagtgtgggctagtattgaaggtaaagattgccttattcagttctgtatgctcctctgttcctggcacaaagaagacagtcaattaaaaatgtttacatgagaggccgggcacagtggctcatgcctgtaatcccagcactttgggaggccgaggcgggcagatcacaaggtcaggagttcaagaccatcctggccaacatggtgaaaccccgtctctactaaaaatataaaaaaaaaattagctgggagtgatgatgcgcacctatagtcccagctacttgggagactgaggcaggagaatcacttgaatccaggaggcagaggttgcagtgagccgagatcacaccactgcactccagcctggtgacagagcaagactctgtctcaaaaaaaaaaaaagttacatcattaaggggcaagatgctaattaattctcatatctgtgcctctgtgccacccagaaatgcagaaggaagcttataaacaaaaaacagtgggttaaattatctgaccttcatggggacagtacaaactatattcataagcagtaatagaacatggcattatttactttattgtggtgttgtcacatcatcagtctcttacttcatgtttctgggttttgtttcttgcttaagatctagagaattaggccactttatcattgtcacaaaaaaagtagtcttggaaaccaagcgatccatcacttcctctcaactgggcaattcagcttttctggaatgcaaatatgtttgtcttcaccttgagatttgaactttctaattagtaattctttttcttagtgatcataaagatcaagcaagaaagtactagtcttcctagacttgaacactacctacatacattatatgtattttactaaaaatagacattcctagacgatgacaagaaaactatgtaataacatttatggaatggaatgcaaccaaagctatactccaagtatactagcgaaggccaaactattctaacaaatatatgccaaacgttcagaggcttaatgaacaaagtttgtctttcttgtgaaaatctggagcagatattccaggtcagcagatgactctgccttacatgatctttgaggaactgaggttattctcatttggggactctgctatttctcagagacttaccatcatatgcagggtcatggcctggctatgccaggtttcacttagcaaggagatgaacgagtgggtatggagcaggcatgaccattcccttaagaatcatggacaagaaataatagaattactgactcctaagattatggacagctttgggtagcctgtccttcaatggtaagacaattttagaagtatctaccatctttcataaaacgtgtggacactagttttcagctattctgcaccagctcacaagatggcggtgttctattttgaatgacttccatgggtgattgagtgggagggatttgaatttaaatagaaccaaatgacactttttttaatggttggctgaattgccaaattgctatttccctttttctgagtgtgtgtctgtgtccgtgtgtgtgcatgtgtgtgtgcacgcacgcgcacacaggcagacgctaggggtagagtgtgatggttcaaaaagaaaaggaaacgcttaaaggtagtgaatcacgttttgcccaggaaaacacacttgataactgaaggatgatgaagtgtccacaggctttactagctatcttttggcttctactgagctgtaagtagggttactacaaagggtcaggggcaaccaggaaacctgaggattgatcctcag

SEQ ID NO: 11943 - DNA, 2300 bp, Homo sapien
aaaagagttaaactctgtaaaatagttaaagaggttgattctgagccaaatatgagtgaccatggcccatgacacagccctcaggaggttccgagaacatgtgcccaaggtggtcgcagtgcagcttggcttatacattttagggaggcatgggacttcaatcaaatacatttaaaaaatacattggtttgatccaggaaggtgggacaactcaaagcaaggggcaagggggtcagtgggagtgaggagcttccagcttataagtagatttaatatttttctggttgacaattggttgagtttatctaaagacctggaattaataggaaacgtctgtattgcgataagaggttataaagaccagagtttgatcaggcagatgaagcttccaagtagcaggtttcagagagaatggattgtaaatgcttcttatcagacttcaggtctgtgttgatgttaatgccagagaggtatgatgaagcatgtctgacccccacttcccattctggcctgaaccaatctctcaagttgaattttaagagagccctggccaagaaggaagtccactcagatggttgcggggggctggggggccttagaattttatttttgatctacagtttcctagaatcacctataataaactatttacacacaaattattgtgtcgaagctgacttttagggatccaaaaccaagatacaggaattcaaatcatgagacaagggtgaagattatccagaagaaatgttggtgccccttctcttattgctaccaagctgagctttgcagcacaagggattttagcagtctcattcaggatgggccccagtgcttacaaactccttaagcatctctctgagaggggacactcagccacctacctctgtgacagagaactcatgctcctcacacagcacccagtacataacagggcccccattcataatgcccagtttggggaccccaactcaggaattacataaggatccctgatgctccctctggaaatgcaaaattctaaagaatcagagtaaggtatttaaaaagagtttttttcacaatattttttcaaaatggaatgaaaatgataagagcaattcttgatataaatataaattaagctgaggcaatttagtgctgatgagaacttctgcaatagttatttcagagcttcttgatatagcataaacaaggtggttttgtttatttgtttgtttgcgtttgttttttgagatggagtttcactcttgtcgcccaggctggagtgtggtggcacaaactcagctcactgcaacctttgcctctcaggttcaagcgattctctgacctcagcctcctaagtagctgggattacaggcatgtactaccatgcccagctaatttttgtatttttaatagagatggagtttaaccatgttgcccgggatggtctcgaactcctgacctcaagtgatctgcccacctcggcctcccaaagtgctgggattacaggtgtgagccaccatgcctggccaacaagattatttttttaatccatgtaaaatgtgaacacaattacacactacatattctgcttttacttatctctgaatttagtcgatgctcttttcagccacaagcatatatcttttttctcattctttattttgagaaattataaaaatgtaaaaaaattgaatataaataggcatattcttatcactcaaaattaagtgtccttatttcataagatttgctttgtaattttttttaataagaagaaaaataaaatcacagtttgccatttgttgtgaatggagtcagaggcttctgctcaccattctggatcacgctctcctctccaagattaggtcgtattaaaaacaaatttgccagctccattttctctttatttttcttctaggctaactaaaagcactccagaaacattttttattttcatttgaaattataaccagaggcctattttctgagagaccaaaaagtattcagaaatgtttccctccttgaaacctagtcacccacccacctatcatagcatttcctgccctgaaggagaattctcaccaagcacagaggagaacccatcagagcaggagacttttcactctgcaggggagcgctgtcagcatgacacgagttagcttgctgtgggcagtcgtggtctccacctgtcttggtaaggaagatgtggttctttctttataaaggcatctaatggggctgtgaagcaggagggattaacagaacagcaactgcattgcctcttagagcccagctacctggaggcagaaata

SEQ ID NO: 11944 - DNA, 2300 bp, Homo sapien
ggcgtgtgatactcacatatttttctcctagtttttactttttatagtctaactagctaactccagtaagaaatcccatgatggtagttgccagatagggttgatatcccaagggagcacagtaaaatttctcagactgcccagaaggggttctgcttccacaaaaaagcagccgtctgcccaccccacccgtatttgcccacttgcaagttcttttatatacatcgctttatttggtcttcaatgttcaataatttgattaactgtggaagttggaactgattgaatgataaatacaagatactaaagttctgattgcataggtcccagaggatcacaaaaaagatctaaagtggcaagatctatctatggccacaccaccccaaatgtgcccaatctcatctaaaatggcaagatccattcagcattgcagcactggaatccccagtcagcattgcagttgcaggcccagtgagcccaggcaagaggcggaaaacatttactcttgagaccctaattagtgaactcatagatagctgcagctggcctgagactgggagagaagacagcccaatcgtctggagcttcctatacagactagagagtggtggcacatgcctgtagtcccagctactcggaaagctgtggtgggagcatcacttgagcccaggaggttgaggttgcataattgcgccactgcactccaacctgggtgacagagtgagaccctgtctcaaaagaaaaaaaaagagaggagaagggggtaaattgtaaaataatagcatatttgccaatttcctgtgaatttgtccagaaaatagtaggtagtgcagaaatttaacaccacgcaaacaagaaaagtagaccacctatggaagaaactcaacatgctgtactttaagaagtcctccggagttaagaacggctgtggcaaaatgcccactgttagcaccatttccaagtggaaataataaatgggaagggagagttaagaccaccactccctatacggcaagtcagcttttaatttagtcttttattctccttcttgttttacagggggaaaagtttacataaagctgaactatacagaagccttatctaagattggatgacacaaattaaatagggagagaaaattaatgcaaatgaaactagtagttctctgtattgtgagttttcatttttgctctgttgcctcttctataaaatgcagactaattcctgacctttcctccctcaaagaagaatgtgtgcatgaggaaaaaatcagatgccaatgaaaagctgtcagatgtgcaacacagaatgttcccaaatgaattttatgttgattgttctgagtcttctttcacaaagtcattaacagaagctcacaaaagcccttgccaccagtattgtagagctccttgacacagccaaaatcaggtattctttttttaaaaaagaaagtcttcagcaaattacagtataattagatatcaaaagtctggtttcaattttctctagactatctgaatgttattgttgttgtcattatttttcatcatttctcaaagtattaaaatacaatttggtcaaacaataatataaccaatacctgtattatcataacccagagataattttctgatattggcttcaagacagaggagggaaagaaaaaaaggaaagaaggaaggaagaaaaaaaaaaggaaaaaagaggagtaaggggaagggaaagagaaggaaagacgggaaggaaagagagagaaagagagagagaaaggaaagacaataaaagcttatagagaaaactgaagtcacagcattagcttggcctgtcttttccccacccatctcattctcctatccaaattatgtctttaaaaaacaatgtatcagctccctttcctcttcatgtttattcccaaataaattacagttccaacaacatcttttttcgttaaatattatggtccaagttttattctctgaagcaaaagacaaaaagtatcgaagagctttccctaagggagacatcataaacagcccacctgacatcccatttcctgttctgaagcagctacggcaccagtgcagctgatactcaaggttcagatcagaagaggaggcttctcaccctgcagcagggacctgtgagcatggcatgccctggcttcctgtgggcacttgtgatctccacctgtcttggtaaggaaggcgcatgtattcaccttaactagtattcaatagaacagagaagtgggaagaaagattaatagtgcaagaatctaatctcttcactgggcccagcta

SEQ ID NO: 11945 - DNA, 2300 bp, Homo sapien
acaaataccctgtgttctcacttagaagtgggagctaaatattgggtaaacatggtcataaacatggcaacaatagaaactgggactactagaggaagaaggaagggagtggagcaagggctgagaaactaactttcaggcgctatggtcgctgtattagtcccttttcatgctgctgataaaaacatgccaagactgggtaatttataaagaaaaagaggtttagtagactaacagttccaagtggctgggaaggcttcacaatcatggcagaaggcaaaagacacatcttaaatggtggcaggcaagagagaaatgagagccaagggaaagtggaagcctcttataaaaccatcaaatctcataagacttattcactaccaggagaacagtatgggggaagctgcccctatgattcaattatctcttactgggtctctcccacaacacatgggaattataggagctacaattcaagatatttgggtggggacacagccaaaccatatcactcactatctgggtgatgggatcatttgtgccccaactgtcagcatcatgcaatatacccagataacaaacctgcacttttttaccccctgaatctaaaataaaagttgaagggaaaaaaagaaagctgttccacattgattgcagtgagtataatgggcaaaaattactgcccccaacccgcagcccccaaatcctaacagaaatctgttacatacacacagacaagcatggattgagcattagctcagtagacaggtcggttgaatcccactttccagctgcatgatcataaacttattgtttaacctctgtaagcctgtttattcttctgtaaaatatagatcttgtgagaattaaatgagattatgcattcacttagcatagtgcctggcatacagtacagctcaatacatgttagttattattatcatcttttgtcctttcttccacaactttgtataagaagtgttggaggaactgaagaaaatgtgatgtgttcaacatggtacagaaaaggtacaccatgggcagatggtcaaggtgagtcatagactaacccagttcacaggagtagctactcatgttagaggagtcctaaagaaataaaagccttccttccctcccactctccctccatcaatggtccacagagttgagagaacacaactgtggtaggcatctaccattttgttcacttagaatggcaactcattcctggtaaaatataaattctaaccatgtgttatgaatggagactgctatcttacttatgaatgggctgatgaatccacccagaggtggatgcctgacccagctgaaccaatcatgttatgtatacaccactctagtcacaaattgcccccctggatgggaacctggctcagactgaagcaatcaaagacttacctcaatatttttaaatctgggatcagaaaggatcctcagtacttctttggtggctacactgtgagatgaatcccaaccaaaaaatgtttacaatcatgcctcctgctttgtggtggaatctggtctgaggaatgaaactaagacacgaatgaaaggaaaagtcttaaaggattaagttccctggcaccctggatgcctgaagtccagatacacttctgctcttgccaaggttattggagtcagtgcatttctcttcttgcctaagcacatttgagttacatttctgtcacttgtaacatcaatgagacgttaaagagttaattcactaggaaatttttaggaacaccttgctggcttacaagaagcatcaattctacgaattactttctcaggaatttctctaaatatcctgaagagggcactgtttccattcataacttctgtccaaacccacccccattcttttgtttttttttaatttttctttttatttcttttttttctttttttttttatgaaagggagggactgagtaaattgcaggatgtgattctaattggttggaacatcttttgaaatcgtgtttctgtagagaaagaaaaactaccatatttggatagccctggccaactttcaaggctcctaaatctgagttttcagtgaactggacagaaaaaaaaaatgaagaagctactagcaatgattctgtggcttcaactagaccgtgagctgggggttcattgaaaagggagccatgggaggaaaggaattgtccatacaatgtttgggggtagagacaaggttcaatgcgactcatttgggttccctcgggaggaacaggattattggggtaaccagtgaatgcctccttctgaaatgtt

SEQ ID NO: 11946 - DNA, 2300 bp, Homo sapien
tcctaatgacacagtaggggagactaacagaggagttgagtgcaaattgcaaggggtatgagaggggctgggtgtgagcagtttctttttcctatccagacagggccctggagtgcaggagtgtatgtgggaagttggacaggcttcgtgatttgctatcccaggttaagtagcacatgagactgcatcttagaaatggggaaaggaaagatttgtcaaaacattgcccatatctgtcctctaattatagctcactgatcaaaactacaagcctagtaatgtaacgaaggaaagttctttgacatcagttatttaaaatatgtacaatgtgattttctgaaatacctttgtatttaaaatgtaatttaaattacccttaaaattaaaataaatcaataactgttttagtccattttgtgctgctataatagaatacctgagaatgtgtaatttatgaagaacagagacttatttcttacagttttggaagatgggaaatccaaggtccaggggcctgcatctggggagggccttcttgctgcaccatactatggccaaaggcagagggcaaaagagtgcatgcaagagggagaaacggataaagtgccaaactcattcttttatcaggaacccactcccaagatatctaacccactcccatgataatgtcattaatctattcatgaggacagagccctcatgaccttttaaaggtcccacctctcaacactgttgcattggggattaaatttccaacatatgaactttggggggcacattcaaaccataacaataataaaacattaatattcctggggaaaatgagcaattcacaaaaagtagtacaaatggccactttataaagaggtatataaattctttagtcatcaaagaaacatttaaaaaagtgattcattttttccagctatcaaaatagtgaaggttactgacacacacacacacacacacacacacacacacacacacacatatcatggaatttttttctgttactccaagaacctcctatggcaccatgagtcttgagccatttactatgtaaccagaaataaagactgcaaatactcaactgtaagccaagccacttctagtctaagtgcaagattgcatatttgaagagaaatatttccatttctgagaaaccagataaaattatgccaggactgaggaagaaaaaaagagaaaaaaaaaaagagcagtcaggaaaaaaaaagcagtcaaaaaaaaaaaaaagaacaaagttaagtagactttgcaaaatgacttcaattgaattacaccatcattatcaaataaatcttcaagtccagataaaaaaggaataagtgtaccctcagcactacccttttctagaagagagaaccaaaaatatcttgattcactaccgttttcagtgaagaatattgcaaatgtgaaagatggtaataacaggagcaatcaaacaatagacagtcctgagaggttactgctcttttactgtaaagctaaactttgaaatgtgaatgctaagtctttgttaacacaattataataataattacattttagatagaatttcatatttattcttgcattgttgaagttaattctattttttgatattcagattcagctttagcttcccccagatattgactttaacatctcaccattcggcatttggtcacaatgtgtgttcagtggaccatgttttaaggaaataattagacgtatgaagagggtttatgtaagcatagatttatcacaatgttgtttgtaaaaactgaaaatattgaaacaactgtctaaaatactgacatgttgtgatgtctaagttctagtggaaattattctcccttagaataagtgttgtagcgataacagacttaggagtgtggtgagtcccctttgcacaaaaagaccacctcacacccaacatgactcttaagaatgaggacagtagtgaggacacactgcagaacactgagaggcagatgacgtcttataacctgttcattaacttgccacttgggggtgctattcaccagtgaaatcataatttatgcatgaattctgagtacaactgtgaatcctcacttcaacagtgatgccctctgctaggccagagacactaacaatgaactcctctctggactttctaattctgatcttaatgtttggtaagtacattttattaaaattttttgtattatttcaaaataataaatacttctccaaaagatacaacaactctggccaaacccataaaatcagtacttttttccccctacaggaggaac

SEQ ID NO: 11947 - DNA, 2300 bp, Homo sapien
ttccgtggacttcaaacgtgtcaaatatttgcaagatatttaataatttgtttttcactatatcaatgggaaaaatatatatatattatcatttgttgagtgttgtgtttatcacaggccctgttgtactacatatgtaataagaactaacatttatttatcaagggcttaatgtgcatgaagtgttgttctaaatgctttgcatacattaattcacttaatcttcactacaacctcatgaagtaggtgcaatccttattatagataaggaaactatctttaatacagaagaattaactaacttgcccaagaacacagagttagtaagggaagacctggcatacaaatacagtttgacaagcccaaagcctgcattcttaaattctatactttgttacctcccaatgttatctgtaatccccaccacaaaactataattttggtattgttacacccattttatgaataaggagactgaggattggagtattgaatagaaaaatccagtagaatctagtaagtagtaagactaaggctcaaacctaagttcatttggatctagactgtatcctctattcactttgtcattctgcgtaatgctagacttggtgaattctcagctgaaagaacggccatgtataaatatacaatttagaaaaatgtccctattgttacacctcatgattttatccttcactttgacctgttcacattgatcttatgtaaattcacacaaggtatgcccattaaatgtacaaatagcaaattttgagatcggtatatgatgatcatgtcctaatgatctccagctaatatgtttatttacagcataaattaaagattgaaaatcatctgaacaaactggaaagatagactgaaactgtcaaaatagaatttaatggagataactatatatttatacagtagttttataaaaatgagttgtaatgtctggaagaagggatcctgaatttttagtatttgttgtgtaacgcgctcatagtaattaaggaaaagattttctgaaaggatattagaaattctcataaaatcaatttgtgcaaaatacagctaggactcacagaaagaagaaaatcaccaattggctatgctttccgaatctacttttctctggatgtatgatctgttctcctcctgggaaaccagattccactgtaagcctgtcatattctactccacaataacttcagtttgaacatacccagctctgtttgctaagagatgagtctggtttgaatagcacagggctttaaagctctagttacactgtctaactgcggtttctgtacctctagttcaaattaatgagcgtagtatcttcccagatccaataagctattgccagaaaaaggaggttatttggtacaagcatgacctctatgtcatctctttagaaaggaatcccaaaagtggaaaaggactacatgctcaaaataattcaccaatgtgataaaacaactgaaactatcatagataacaataaaacaagtggaaaccagatgagtacagtaatactctgacagggcaacaatatttgaatcacatttgaagagacgtgaacaaactgtagcaagtctaaaaataagaaagataaaactaataaagtagtctgaaataataccatgtgcagaaagaaacaaggatgtcacataaagaaaccagagatatttataaggacacctttacaaaaaagaacagatctggccttgagttttcaaaagatataatgtgaaatgcagctactctacttgatctatcatagctggctgaagtctaacaatcaacaagcttctgttctcccacactaccctcacctttcttctaggactcctagtaggaggatgctaagtttggttctctatctgtattgtgggtgagaggggctgtttgtttgttttagagacagggtcttgctctgttgcccaggctagagtggagtaacatgatcatatctcactgtatcctcaaactcctgggctcaagtatttgacctgcataataaatgtctacgcctcatgccactaggtggcaatgtgggtgttatactgaaaagatcacagatggttcactttgcaagtaaaactgtaaatgttcttaagtgtgcatttctgctgcttctgatgggctgaaaatcccctttgatttctaaagtaaatgtagagacgttttaaaaataaaggactcctttgtccaagatatattccgaaatcctccaacagagacctgtgtgagcttctgctgcagtaataatggtgaagatccggcaatttttgttggct

SEQ ID NO: 11948 - DNA, 2300 bp, Homo sapien
aatgcaatatgactggcattctatatgacagccaagtgaagacaaagacacgcagggagagaaaaccatgagacagtgcaggcggagactggagtgatacaggtgcgagccaagccaaagaccatcagagtttccagcaaaccaccaaaatctaggaagaggtgaggaaggattcccctacaggtttcagagggtgcatggccctgctgacaccttgatttcaaactttcagcttccagaactgtgaaacaatacgtttatattgttttaactacccagtttgtggtactttgttaaggcagctacaggaaattaatacagaagggttatgggaaaccaaaaagaaggtggtgaaacacccagggctggcaacaaagaaccgctgccatgccaggcctgaagcgtgtaggggaggagccttcactgaaacctgcagctgtggaagaggagttatagcttccagtgaaggaaggcactctcctccttccctccagtctcctgaaggtgtctccattggccaaaccaaatgggatggagagccggtggatgctgccaattaaggtcaggctcagagtaagaagtagagtggatgtgcagaggcaaacagactcagtctcaactgcaatgccacttcctcttcagggaagccttccctgacctcctgaccaaacctggcctctgtaacatgctcccatagtccttctgcttctgcagaatacttatagctgcaatggagggataaattatgcaaattattaagtgatgactggctctcatgctagaacataagctccatgaaagaaaacactgtgtctgccattcatcaatggcagaccctgaatcctgagggcctggcatatagtaagaatgactaggttttataggatgtgccaagaactaagcagcctgatagaaaaaggtcaagtatttaagtccaaacagattgaccttggcaattttcaaagagctatagacagcagacagcattatgttctgctgggggacagggttgctgatgatataatgtgtaacatcaaagaatgtgaccaccttgaatacttgctaatagtcctccaagagcagtaggcaggatgggcagttgtgcaaagtgaggcgaggcagaggtgggtggggagagcaactactatggggtcaagaaacttcatctgctcctatctgaatttttttcagggcagtctgttcccagtcacactggggaacttaagaaagcttagatgagtctttcctccactaacctgggaatgtaagtcctgcatccaccctccaatatggaagccacctttgctcttgcctttttgcttaccaagtgactctcttcccagcttctgctgcactctctagttctcattattaatttacctgtttgatttcaaaatttcaaagattgacctttaaactcaaaagtggaggtcccaaaaatcctaacctcccctcttttgaagtccatgtaaatttagcccgtcataagttgagatgtagtagtggtttctaagttttttacaatgtttggctttgtgtaatttaacacaggtaacctaagaacccttcagaaaagaagctagatgagctcaataaagatcaggaaactctggctcacatttggaagaccatgtttcattggattgctctttaacacatgggtaaatcacccttatccaactttgcctagagggagtttgcagtgaacacaacaatcattacaacatcttcagtctttgtgcacatgctattgatctcctcatttggtggttcttttgattacagctgtaaatgccaataattcttcttggtatgaactatgaacatcaccacatagtgtctaacatgtacatctaacctgaaactggaacaacaatatcaaatttaacgtctagggaaggaagcagaaaccctgtcaccaattaaataagctgccttaatctcctctcagttggcctaacttacctgaaccgtactattggtcttgaaggtggcactgtcatcccattagcaggcagcaggccctgcgagcctcctgtgatcagctagatttctctggggaatgaaacagctgctgatagggactgacttcctcagtcacaagtgtttcacaagtgtgttggttcagaggagggaccaggcagaaggtggttgagaggcagagctgcccctgagtgagccatgcagaggatctcctccctcatccatctctctctcttctgggcaggtaaggcagaccccagaacttgggccaagcaagactcagcagcaaagaaacatcaaggctcacaggaccttgt

SEQ ID NO: 11949 - DNA, 2300 bp, Homo sapien
ggaactggggaaatatattcaaatggaaatatagagtgatttaagacttgctttatacatagtctttggcatctttgtgttggagaggggaaggttttcatctggagtcacattcacttatgccactttgggcctccacactaacacaagagtgtgttggcttgtacttggttacttctgagtagatgaggcttgccataaacccactggagaatgaggtatgatattaggaagacaaaagtagactacagagttggagtcgtctaaggtgacagtgctttttcttccattgaaggtgtatgatctggatatctcccatttatagtccacagaactgctacattggagtctttacccaggagcctcagaggactcaaatatcctgaagaatctaagattcagttctgagcctttacaggagcaatatgttgatagctcaaccttttccaataacaagtcacagtgatgaagtagctggacctggatttacgcaggaactccttagtcttttggagccagacacttttaagggtcataacatcagtggagttcaggctcagtctcaaaatgctgctctgagaaaaatgctcacaaacgtcgcaaggtggtgctaaatttcagacacacatgagtttggggtgggacagagaagcaagcaacagcaacaacaaaaaaaccctccaaaacagagtaaggagacccgttttacatcactttcctattgagatataaatggtcttagaatgatcattgttggaggtgtaaggctcagggtgggagagagtgggaggagaactaagaggtgggaaatttgaagagaatcaatactctgagtagatatcaaagtatgattttaaaaaatataggctcaaggattaagaacagactgagatatttataaataaatgctgcagaaaacaccaagtgaatgactgggtatggaacaataatattgagatcttttttttttttttttgagactgagcctcacttagttgtccaggctggtcttgaacccctggctcaagcaatcctcccacctcagccttctgagtagattgagagtgtcttttgctgatgtcctgttccaaggcagtgcaggcttgagctctttgctcctgacagctgcctgggataacagagaaatgaaggaggaaatctctttataaaggtttctaaagaaattaaaaaaattaacttgtacattgactttgtaatggaagtgagaacatacaggaaagccctttggggagttagctttagaagggaaataccgggaaatacaagtaagacaaggcacttacagaaaaagtagaaatttcatgtttaataaatggtcaaatttaacatagctctgaatatataattttccattagaatattggtaacaacattgcagtaaacttgagtctgggtaccccgcactgagtaaaaatggtagattctattttgtgtgagttcagtcaaagagacatgggggacaattagtccggtctctgcttctgttgtttagcagagcctccagcccggaagcacactgagatgtcttgtgtttttcagatctttaatttttgaatgctgtactgtacccaaggacctcgctttttttcactgtgcatatgcatgatgtgggacatcccatattggagacacagatgacttattgaaagccctgcctaagacttaattaatatcagcatttcaagtagcttgcaagattggattctgtggctatatactataggaatatagacttcctggtctttttcttactgcctccaaatataaccagataatcctctgtctggtttcttgggagccacttgtatcttactttcttgcaggaacattctaaagggttccttcagaaaacttgggaaagtgtaagactaaagacaaaccacagcctgaagcctaggctgctgacttgagcacagatgggagaatgttaacagccaagaaatatgaggtctttggctcttttcccagaactgccaggctaagaccttggcagagactcaacaggaaactgaactctatttgcatatccttttatacatgggagattaaaagcttcaaccttgagtgatcacagtttttgagaatcatgatgaggcattaaagaagaggaggagtgtctcaagggaggtgagctggaggtgatgcaaggtaggtgtgaggttagccacgactttcaatcccctttgattaatcaagagtgtatttcgtttagttccttttttcgattttatccttactgggtcacataaaggaatcagctgcaggaatccatactcctg

SEQ ID NO: 11950 - DNA, 2300 bp, Homo sapien
acacacacacacacacacacacacacacacacacacacacacacacacacacgataatataaactatatgagggcagggagcttatcttttcactgatatgtctccagcccctgggcttgtgttgaccgcatcacagacaatcagtaaatatctgtgtaaaaaaaaggaatgcaatttcttcacttaaaaactcaccattcacctagatttaggaaataaaaatacaagacacccagttaaatgtgcatttcaaataaacaacaaaaatttcagtaatacgggtagctgggacatgccatatttggaacacatttatactaaaaaagtattcattgtttatctgaaattcaaattccactgggcatcctgtgttttatctggcaatgctaggcatgcagaataccaaaagtaagcaccaggcaggccagagtcccaccatgagcatcttcagggcccctggatgtggaagagggatgttgagggcccaggggctgccttgccggtgcattggctgcccaggcctgcactgccgcctgccggcaggggtccagtccacgagacccagctccctgctggcggaagtccatttcagagcttccggttctcccaagtccaaggattatgctcactccccacccacagtctcttagtgtctgtccctgctctaaagatgttgtctgggcttgatattaatatgagagctgactgttcccttcctgatctagaccataaccatcttcaagttaaattgctcctcctcttctaactgcccaacctcacccacgtctgaccatacccaagcacagagaagtgggtttaatggaccttcacacagaaggacacatcctctcctataatgctttacatggaaggttcagacataacctgagtcctgcttggggtagcatcatcatgactctcttgccctggtgtccttgcaatattccttgaaaggcatccctcccccaaggaagggcaggcactgagcacagcaatgcagtataatggctaagagtgggatcccggagccagcctgcttgggttcacatcagctccggcttttaccagttgtgtgaccttaagcatgccctaactctccaagtctcaattgctccatctgcaaaatggagatagtaatagcttttctcacaggactattggaaaatttagtgaggtcacacatgcaatacacccagcagataaatgatctatgaatgtcaggtattgctgttgcatatttaatttaaatgttgccatttttattaaatagacatatgaatagagttcctaagagtgttactctcatcaatgctgctcagggaaaagatgctgagtaaatctaaattttaaagttgcaaaatctagcaaaagattgttgatatgttgtatcaatcaatggttaaaaaaaaaagactgacatctttaatttgctttcagtgctgcaagcatgtcctagagctccgtgatcccctgagacctgtgatcctctgagacatgagccagctgtgctctccccaagtccctaagagcattaggagcatgagaagtgagcattccagccccttgttcttatgtcttccaaacattgtaacaggcttgttcatgagaggccacaatgcatgatcaagtgaccccaccactgaggaataggagaaagcctcaagattcagtggcccactaaggacgtattgccctaagtttctccaacccatcttcctattggcatctggagactatgcctcttcccaaggtgctgagggtgctgcagaccccacttgccctgcaggccccacccgcccaccagcgaagaagggctgcctttcattagcccaaaactgccactcaagaggggtcctcagacaaggtgggagccaagagatttggcgaacgtcacccttgtcccacagcttggatcttgatcactcatatcactcagaagagggacttttctctcttgtttcctttgaggtgggcggctttgtttttgacattgtagcgccctctgctgctactaattatcgcatctccataaataggtcatactggaggttgatagaaaatagatcagggaaggaaaacattctttgttcacaattcaagtcaaagctgctgcttctgtctccattcccttttcaactctgagactggcagctgcttctctgttggcccaaagggactatcctccaccagtcacccaaagaggactgtctttaaggatatgagatagcaccctaagaggataaatggacattttcttgtctacaaaaagcctaatgcaacagtagaggacatagggaaa

SEQ ID NO: 11951 - DNA, 2300 bp, Homo sapien
tgagagaaaaaggctattatttagctaagaagacgtatccattttttttaaggacagcagtcagggattcaaacgacccttcccatctcttcactatttcacagtattcactgtctaaagggcttcccaccctctcttcagcctccgcaggacataagcaaaaccagatgcctgccctcagctgaggccctcaaacagacaggcacccaaagtgttgctgtggcaataatctctgtgttccacttactgcaggaaaacagaatttaatcatgggttccttggactccagccttgccatatagttcctgcagctagagtccactgcatggaaaatctggcatacgattactgtccagagctctggaagaatgctagccttgcacagatattttctttgcctggttaggctgtcaaacaccctgacctcgtcaatgttttaaagggtaggagttgttacagttctcagtcccctaagaggctgaccaagtgctgagaggggctcccagcttctctgcattctggaaaacccactgcagagccccgccctagtgtgcttccggtaagaaaccaaagaaaaaagcctactgtctggtccctagcattggctgcccaccctctgaaaagcgactgagtccttgagtctcctgggatgttcatatgaatccccttgaagctttaatttgataagacctcagtggagactgcggaacccctgggatttaacatcatatattattcattgttgctgttgccacagacgtgctgattttgcccctgctgagcaaggcacttctgcacatgggaacttgatggctaaccacactgcatgttcttcaggcagggcctatcccagaacgttccaagctgtctgctagcaagtctgcattaactccctcaatgctgcatgcacggtgtccctgagtccttcaccacccgccccgccaccagagccagtctttttaagaattttgcctgggctgtgtttttcaaagtgcctctctctagtgtgcatctcttcttaatcacagaaagcagatctgagtaagtaaaactggggcatttggcctttactcaacatcagggcacttaggagaccggggccctttgataagtttttcccattttcattttatctgaattttacaagtcagtcttctccagccttagtttataagcaccactttcagaagtccaccagcagcgcagattttcaagaagtgccattagcaaccactgtgccttacttttatatctaacatttaaaaacttttctaagtactcacacattaccattagggaagggtgggtgtatatttgaaggagagaatgtactgctctattctcacgactcagaggacagatgaattttccccttctcaggtgaactaagtaaagtggaggctgaatccactattttggtaaccaaggaaaaagtggggttaaatgctctgcctgagttaaccagacagttaactgactggacctcagttaccagactggggattgagaacagttcttttcagagaggtaaagtgaaggtaaaagaagaaaaggagcctgcttatagaattttcagcattagttaatgaagttgcagggttccattatttcaggcgataaatttaagaggagtgttagtatctaagtcaggacaatttatatttggtctactgcatttgcgtagtcacgatatgccaatttcctctttatcttttcggcaaacatttcctgacccttagctggatccctcaggattctgtattcagtttttctccttgcaccaataatcttgtttaagatgaatgataggaatgttttgggctgaaagtaatttagtctttgtacagtggagttctaatccctctgatgggcaccatatccccccagcacaaacattagatttggaacctaagctggaatgttttggaggggcaagtaattaaatcagaagtgtttgaatccccccttcccccactcccttcaaacttacttggattcacggttaagagagttccttttccaaatgtcagtttatagttgctacctccactattctcacagccacagaaggctttacagaaacaggaacagaagctgctctttgcagaagggtcctgggggtcaatatagtcacgattgctcaactcttcattaagctacaggtttataggttatttgataataagtccagaatgcagctgctgtaggtgagtgctggagttccagaggacaatatatcatatatatatagatatatatatatgtatatatctttaaagtttttgaaatttaattttaat

SEQ ID NO: 11952 - DNA, 2300 bp, Homo sapien
aacacttacttggtttaacagagagtttagtgccttttccaaagatgagatttccttggcttcctccataattcacacagtcctatggggctttacaataatcaacaggtgggaaggatggaggggaaggctgagcaagtgagatcaccttcccctctagtggaagtctccccaccttgcagcctctgtttccagttcctttgcaaggtcaggacagttctctaaaattaacagctggctgtgcagatagatctgaacttgatcgtaaatcccctgttttgttcctaggacactgggttctgacagaatgcttgtgccagaggcacaatagcaaggttgggcagaaacatcccacccagcacaggaggtcaacattgaggtcccaggggctactttagggaccaggagcaccatgccactttctcagccatatttctttttctttctttttttgagatgtagtctcgctctgtcgccaggctggagtgcagtggcacgatctcggcccacggcaacctccgccttccgggttcaagcgattctcctgcctcagcctcctgagtagctgggactaccggcgcatgccaccatgcccagctaattttttgtatttttagtagagatggggtttcaccatgttggccaggatggtctgcatctcttgacctcatgatcttcccgcctcggcctcccaaagtgctgggattacaggagtgagctaccgcacccggcttatatttagcatttttatatatccagagccaagccaatgaagaaaccagtgaaattttctacttcttcgttgacctaatccttaagattgccaggaattcatcaactaacagacttccaaccagctcagggtctcaggcacaaagaaaccaggtacttagatcctcttgggagtggcagtgtcttaaccccacagaaactgcccagaacagcaccattgctcactcaggtcagcttttaagattgacccattcccccaacttacttggttttactgtcagtctggtccctgctccaaagcgcatgtcattgttattgtcacagtaatacatgctctaacaaaaacctcctggggaaaacttgcagccacctccagcatggcagggacaagggggagcagcactgacaagtaccacgccacacacagttccattctccttttcctacagaaatggggtcattttgtcatgcttctagactgtaaatatgggcacttatcatggcactgagcacagttaattgagaccccaaattggcacactgggacataatcagctttcaaacaggtcccaaatggtgcataaaccaacactgcaaacaaattatgcccaggtacactatttgtcttcagggacaactttttatgaagaactacctgagaacttctacaatttgcatcttactcatgggtcaaaatactcaaactactcatctatgtaatttcatataaattatcatgtatttgtttcataattgcacataatgaaacatggcagtgctttgggggagaggagttggcatttgtttatgttcttagagggtcaagattttgctttacttcaccaatgttctaacaagttaaggatataggatgttaagcaagtttccttagtgtgtctccaaaacagtcattggaaggtcattctagcccacttcatcccattacgcataacacatatcactctggagaagttatccgagtattcaggactctctgttctctatttgagagccctttcattttgttgcccagagtgatatcatcagagacaaagtcctgatgataaattaattcccaaaccactgttctaaaggaaatacatagggtaataaagactgaagaagcttggagcagagaggttctgttttcacaggtggaaaggaaagcctccgtaacaggtataaaaatagcacaagaactgactgaatgcaggtatgtgtcctcagtgagatcacctcccactggaaggaaggaaggactacatccagccaggatatcccctctgcagtatcccctgttttaaaggaacacacagttaagttacctcacggtttctgttacctaccgagcgtgacctgaagtcttgttccagtcccaaaggtgagtttactggcagtgccggtatttacactgtgagatgcttcataacagaaacctgttgcttgactttccatctggtgttcactccctcactcagaactctccccatgatctctcccagatgggcagcctgggtgagccctcacagatgcatttccctttcccaaactccacagtattaattcct

SEQ ID NO: 11953 - DNA, 2300 bp, Homo sapien
agccccattaccttattgtcacagctggttcgtgtgcagaagattgttgatgaaatactactgaaatgtgagatggcagacatttttgcaaacagggtgcctgcaggaaagcacccctgtttctgtaattctaacagaaaaaaacccaataacaacaaaaaacacactgaattctgcaagtgtggagacagcttgtataattttcaatattgctttttataatctatcacgattaccctctccctcacagcttcacaacttggataaatattctgttttattacagataatctagtggacatggggaggccctctgcagtcctgggattctctgcctctcccatagggttggcttggccagcctagttaagggggtgaagtccatgtgggggcctgctttgtccctacggtgaggaagggggctacctaaacagaagcattgatgtgataaatcaagggctctgttctctctctagagaaagttacattgttctgctatctcgatagggaagaaagccatgccaagcttggaactcctgctgccctcccttcactggagtcctcagtccactcgccttatttttctgtttttctttctttttgtttttgagacggagtctcgctctatcacccaggctggaatgcagtgccacgatctaggctcactgcaatctctgctcccgggttcaagcgattctcttgccttagcttcccaagtagctggaattacaggtgcccgccaccacgcccggctaatttttgtatttttagtagagatggggtttcattatgttgatcaggctggtcttgaactcttgacctcaagctatccacctgcctcagcctcccaaagtgatagaattacaggcatgagccactgcgcccagcccactcatcttattttttaattctaccagacaacacaagcatcaactcaacagggtccttgccacttatctgttgaggacacacttccttggctatgccattgctttggtagcttcccttttcatggccttgtttctgtctctatcacaaagctttgcttcttatctctgcctttcccaaagccataacgtgctttgtggacctttgaaaaacagtgattgcagcattagtacaatttatcaaactgccccgagacctgataaccaaatccagcctccagggaaacatgtattcatatcttgctcacacatcagacatagttaacaactgcatgctaagcatagcaattaaattcagctgtgtttcaacaggtcccattggatttctttccagagaggacaattagtaaaccacaaaaactcacggggtgtgaccaacagcgaggtgcctttgccgaagttgagtgcatacccggaatttgagttccacagtgcgttctccctaaacaaaaaaccccttgcagtagccaccatgtcccttctcctatgattcctattaaagctaatgtctgaaaaccaatcacacagcagtcacacagactgtgggtcatccatgggcccttgatggtgtaaataaagcttccctcttccatgagaccattgctgacaaggtcaccactccccacagtgatgtgggtgatcaatattgagatctgccatctgagggagggggccctgtgacatgttatgaagtctggagttttcctatgtccagcagaacgacgtgctggtctggactgggaacagccaggggcatggacagaaacaattctgtggggttcaagggtgaaggtggggggaagatatcacagagaaaggagttggtaagtctcttctcactcactctgcattgcactttagttgcacttactgcttttgttttcacttcaccaatgttctaacaagttaagggtataggatgttaagcaagtttccttagtgtgtctccaaaacagtcattggaaggtcattctagcccacttcatcccattacacataacacatatcactctggaaaagttatctgagtattcaggactctctgttctctatttgagagccctttcattctgttgcccagagtgacaaagtactgatgataaatcaggactttgaatccccaacacttacttggtttaacagagagtttagtgccttttccaaagatgagatttccttggcttcctccataattcacacagtcctatggggctttacaataatcaacaggtgggaaggatggaggggaaggctgagcaagtgagatcaccttcccctctagtggaagtctccccaccttgcagcctctgtttccagttcctttgcaaggtcaggacagttctctaaaattaa

SEQ ID NO: 11954 - DNA, 2300 bp, Homo sapien
aagatactcagatctgtttctctcttcctaattaggctgtcaatctgtttagctaataagtcgtataaagtgtcttcatcccttctaaggaaaggagtcatataaatgcaaactagcagcagcaataagtcaaatggcttgctgggcatcttttcttcgtgtgaagagatgctgtttagtagaaagggaaactttctgtgtggagaggagacagactgggaaaaagcacaacagcatttgtttttattaggctgagtctatacagcacaaagtgaaacagatttggcaattatttaggtaatgtgccattcaattcatgcaattttgagcacaaagaagttttctcaaggaagtccctaaatatctgcatcagctaccaacattaatcaaagtaactggacaattgggctgtatagacacaaactaataaatgcaccctgagatggttctttggaaaggcttatattttataaatctaacattaaaactagcccaatatttgtaatcactgtcttcattttggcactgcaattaacagttcccaatttttcttacaacatgtcttacatttagagccgcaaaggtaagggtgaccttctccctagagagttttatcagtttaacacatggaagctcatttagaaattcattaggtgtctgggatgtgagaacttgtcattacagactaagagcttttttgtcaagaggtaaggacttacaggggaataacggtgagtctcgttccagtcccaaagaagaggttgtttgccccagtttgacacagtgtttctgcccagtacaaaaacactttcctactaagccaaattttcttcatctccttcctccttctttaacttatttattttatatttttaaatatatatttttagagacaggatcttactttgttgtccaggctggagtgcagtggtgtgttcttggctcactgtaaccttgacctcctgggcacaagtgatcctcctgcctcaacctcttcagtagctaggatgacaggtgcatgctaccatgcctggctatttttaaaaaaattttatttatttattttttgtagagatgggggtctcactgtgttgcccagggtggtcttgaactcctggcctcaagtgatcctcctgcctcagccttccaaaatgctgagattacaggtgagagacactgctcccagcttccttcttctttttttgagatggagtctcactctgtcgcgcacgctggagtgcagtggcgcgatctcagcagtggcacaaactccacctcccaggttcacgccattctcctgcctcagcctctgtagtagttgggactacaggcgcccgccacgcctggctaattttttgtatttttttttagtagagacggggtttcactgtgttagccaggatggtctcgaactcctgacctcgtgatccacccgcctcggcctcccaaagtgctgggattacaggcgtgagccaccgtgcccggccccagcttccttcttctataacgtttgccaggggtatgttacacacatttggacttctacttggtgataacctttgccaaaccttacaacaagaagtgctgtcttccatgtttcctaacaatccagacaactaatagtcccctttctctctctctccccatgttttttccccccaaaaaaacatatcatttccatgctacccattttgtccttggaagactgtacttgaataattctggtggtcacaagggtggattctactttagtatattattatgaaaaatcaccttcttttgtgtgaaccacccacatttgatgtttttatttcttccaagtcagccaaactcacattctctcagccttaacctaagaattccagatccaatacacccttctttttgccactagctgaaaccaagtgagttagaaaggatcatatcaaccagactttacacacattctacttacttttataaaaggaaaatataacctaagagtaagagtttttggttagaagttgagacagagaagattaaacaaaaaatgaacagagtggataactgcacttcacttggaaacatccagacctacctggttttacttggtaaagttgtcccttgcccaaagattagtttgcctgtgttgccagagccacactctaatgctgtactttacaaaaactataaatggggatcatttccatttttcttccttccctccagcaacctgacatagtagcaataaaaacatattaactgaaaacttttaatcgggctgccattatgcaaagtccattataggtattagctcttta

SEQ ID NO: 11955 - DNA, 2300 bp, Homo sapien
ggttatcattttgacaataaacttcagctagcatagtccctactattcatgttaataatatcttgacttgaaccatcatattttccccacatcattcacaatgcatttcaatgctgtaacccactgcaccatccccagcccttttatcttcacaacgttctctaataaggtaaacaggatcatacatcatcaaacatatgtcacagacagaaaagctgacacacagacaagttaaataatttaagtcaaaccaaaaaaaaatcataactgggattagagcttgagattccctattttcttacagtgaagtgtcttgagctgtcacttaatgcattgaaaacataataagcacaggccataggcattttcagaacatgaaacttgactgaaacaaaaactgactgtttgattgctttggtgttttaaatgtatccccaaatctcctttgctattgatagtcatttggtgccagtgacagggaagagcagaggggcttaggaggtttttgtagatctcagtatcactgtgtcttataacaccgacaagctcatctttgggactgggaccagattacaagtctttccaagtaagtactagaaaccaaggagccattttgaaaaggtgttttctttttctttttcttttttttttaaatgaagttttgctccttgttgcgcaggctggagtgcagtggcatgatctcggctcactacaacctccacctcccgggttcaagcgattctcctgtctcagcctcccgagtagctgggattacaggcacctgccaccacgcctggctaatttttgtatttttagtagaaacagtgtttcaccatgttggccaggctggtcttgaactcctgacctcaagtgatctgcctgcctcggcctgccaaagattacaggccactgcgcccagccttaaaaggtgttttctataaacaggaacgttctcacagcactgcaggccacccttaccaactccgagctctgtaggggcctttagcacctatagctgcagaaccttctataaaccaattaatctatatgtgaacaatttaacctatatgtgaacaccatggtgctgactaaaatcttatcagcagtgaaaagaaggcactagagcgtcagatgcattatgactctaaacaaatgatctgtttccctcttttgcatttttatttaaaatatcagggaaggtgaagcaagttcaacttctccaatttgaaaactgtttctgaattatgcttcccttgtatgcagagagacctagattgactttggatgtttagtcattcgatttaatcaaatgtaattaaatgagcaaataatctccaatagccaatattcctatgttgtttcattgttttatgtgctttgctctagactttttgtctgggctttgtctctaataggatccccggaaggacagtgaaggtttttgttaaggtttttgtgtctgtgtggatagcaactatcagttaatctggggcgctgggaccaagctaattataaagccaggtaagtctcagagatgtgactgcacgggagaggagacactagttgaataatgcacaaagtgtagcatgcagattatatttttaagaacaagtcagcctgctggagacaatgcactcaacccaaatggggtctccactcccagtgagaagcatgtcagccgctaactcttttgtttggtctagtagcttccggaatgaataatgcttaagtagccctctaagagagcagaccaggttgttagggaatatctaattccctctgatatggttaaaactctttgccaagggcagaaaccagcctcattccattggaagagcaaattcagagaaaaaggaaagggtcacacagccaaagacggtaaaatgttcaaaggtgaaaaatagccaagtctgcagctctcctgacatccttgctcaggctgctgtcccacgtggagagcagatgcctgcaaagctctcggtcacttgctggagtcactcagggttctgggccttgggatgtaacttaaatgacagtgtcagggcactgtcagaggaatatgaaggctgcagcgatgcctgcaagtcagcttttgctacactgggactgaggtgttctaagcctggaaagacacaaagctgtcctcatcccaacctgccgtgcccctccttgagggttagtgtaaggctctgaaggactgtgtgaattatggcggtgctacaaacaagctcatctttggaactggcactctgcttgctgtccagccaagtacgtaagtagtggcatgtgtcaggtggatt

SEQ ID NO: 11956 - DNA, 2300 bp, Homo sapien
gcagcctaccaggtaaaacagtcaattgtgtcccagatccaaaggtcagttgccttgcagaaccagaagaaacactatgatttgctcaacaacaaaaaccagatcaaacaggccaggttggcaaagcactgaataaagagctggcagtgcttccttttgaattaggcctgcatcactgttaatctaggtttggtctggagtagccaaactgactttctacaaatcctaaactaaccctccttcgtctttacaatcccattttcttttaggggacctttgctttccactttccactacaaagttctaaacattaactgtgtatttttgatatatgtatagagcaaatactctctgattttaggtgtcaaaacagcacttgaatcttttcatccaaggagactcacaaagtccagaatagagaatacgcctcctctgttgtgggcatcactggattatgtcatcagagaactgtctgaattcttgaatcctcctgagactgagtctatagaatcaaagtgaggtaggtacagagctggcattgtccagttaatttggccactcatttcacactgataaaataactttataataatcaattatcagacaaattcctagttttctacttcacttttgggcatttcccttctcctgactaaagtggtatgtgtgttagttatctgctcaaggactttaaactgcagcaaaaattagttttagtatttcctaaggaagtgatgatagtataagagagccatgcccaagagaaatcagggtaagcattgtcatatctgggaagaaacatggaatccacctccagaatgtaagtttcatgaaggcaatatcacactgagtttgcttcctgttggatccctggtttcagcaacgagcctggcagagggcaagtacatgaaaatatttgtcagatgaatcttgcggactcttcaaacttcaagtttgagccaactgacaggtttggcaaattagagacctaaaatctagttctagctcagccatagactggctgtggggccgggatctgtctcttccctgagcctcagttttctcatccatggagaaagtcaaaaaggaatgttgtcaaggttctctctgctccgtgaggctacgctgtacgaatttttggctgaaagtctcagaaacaggaagtgtccctcagtagtcatgagtaaactttttaaaaaaaagtggtttttcagactttgagagagactaatcacattacttttggttaatgatcattatttacaaggttctttccttctataaattgacataatcttagccaaatagaatagtgccttagaaggtttgttaaggaattagaaatcttgtcaccaattactgcacaaatccagggatatgatcccagccaatacaacaagtagccagtcatacattttagtcccaacacatatatcaggagcaattcccagaggcacacttacatagcccattttgcactgagatgctagatcctagccaggacgacgattggcttcctatttgatgctcatccccctctctaaacattcttcatatggtgtataattgggtctaaatcagcccttaatccacagacattgcttaatccagggatacaattttatacttactgggtttcacagataactccgttccctgtccgaagataagctttcctccctggttataaatcacactgtgttacatatcctgtcaaaaacacatccagtctgcctgaacacatttctaatcctccacccccaaatccacagcagattgctcccacaccacagcatgaatcatggctatcctgcttattgtaacttttttccttataagggaaataagggtattcacacaggagactgatagagaataatgagaattactatttatccaaaaacgtttctatttaacaccagtctgatctctcatttttgcttaatggctttgggtactgctgttcagggaaatggcttcctttcagatgtgtttctcatagtctcggctagaaatatttggcatgcagggcatgccaaatactaagggcaggtgaggctccagggaatggggcttacctggggtgaccacaacctgggtccctgctccaaactgcaatttcccccagctgtcagttgtcacactgtgacaaacacctctacaaaatggcttccccagagaagacagctgctgaatgaagacaaactgctcatggggaaacaatcttgctacaaaatgaggcaactgcatgatatgagatataagcttttccccctttctcttttaatttctcttctttc

SEQ ID NO: 11957 - DNA, 2300 bp, Homo sapien
gaaatagagcctcatttaaatatcttaaatataggcacctctatgtttgaagacttatttagaaatagctactagaataggctaaaaatgtaagtgaccaactagacttggtgtgagacagtttttgtagcacgtaggctggtcctagtgcaaatattttcagaagcagaggttccccttatggaatctgttcccattattcagcaattcttctaagttaaaatgaaatttttttctattcattttcattaactcctattactaaaagccttagcaaaaagcttctctttctcttcttggtctctgataaataattctctgctcacattaccctttctagtatgcattgttgctgtctctccccatcttcaacctcaggcccattaagttacatgtacagaatacatttgtagattagtaaatcagtgcaaatagtatttaattgaggcagcctaccaggtaaaacagtcaattgtgtcccagatccaaaggtcagttgccttgcagaaccagaagaaacactatgatttgctcaacaacaaaaaccagatcaaacaggccaggttggcaaagcactgaataaagagctggcagtgcttccttttgaattaggcctgcatcactgttaatctaggtttggtctggagtagccaaactgactttctacaaatcctaaactaaccctccttcgtctttacaatcccattttcttttaggggacctttgctttccactttccactacaaagttctaaacattaactgtgtatttttgatatatgtatagagcaaatactctctgattttaggtgtcaaaacagcacttgaatcttttcatccaaggagactcacaaagtccagaatagagaatacgcctcctctgttgtgggcatcactggattatgtcatcagagaactgtctgaattcttgaatcctcctgagactgagtctatagaatcaaagtgaggtaggtacagagctggcattgtccagttaatttggccactcatttcacactgataaaataactttataataatcaattatcagacaaattcctagttttctacttcacttttgggcatttcccttctcctgactaaagtggtatgtgtgttagttatctgctcaaggactttaaactgcagcaaaaattagttttagtatttcctaaggaagtgatgatagtataagagagccatgcccaagagaaatcagggtaagcattgtcatatctgggaagaaacatggaatccacctccagaatgtaagtttcatgaaggcaatatcacactgagtttgcttcctgttggatccctggtttcagcaacgagcctggcagagggcaagtacatgaaaatatttgtcagatgaatcttgcggactcttcaaacttcaagtttgagccaactgacaggtttggcaaattagagacctaaaatctagttctagctcagccatagactggctgtggggccgggatctgtctcttccctgagcctcagttttctcatccatggagaaagtcaaaaaggaatgttgtcaaggttctctctgctccgtgaggctacgctgtacgaatttttggctgaaagtctcagaaacaggaagtgtccctcagtagtcatgagtaaactttttaaaaaaaagtggtttttcagactttgagagagactaatcacattacttttggttaatgatcattatttacaaggttctttccttctataaattgacataatcttagccaaatagaatagtgccttagaaggtttgttaaggaattagaaatcttgtcaccaattactgcacaaatccagggatatgatcccagccaatacaacaagtagccagtcatacattttagtcccaacacatatatcaggagcaattcccagaggcacacttacatagcccattttgcactgagatgctagatcctagccaggacgacgattggcttcctatttgatgctcatccccctctctaaacattcttcatatggtgtataattgggtctaaatcagcccttaatccacagacattgcttaatccagggatacaattttatacttactgggtttcacagataactccgttccctgtccgaagataagctttcctccctggttataaatcacactgtgttacatatcctgtcaaaaacacatccagtctgcctgaacacatttctaatcctccacccccaaatccacagcagattgctcccacaccacagcatgaatcatggctatcctgcttattgtaacttttttccttataagggaaataagggtat

SEQ ID NO: 11958 - DNA, 2300 bp, Homo sapien
atcatttgaccacccatctctttcaaggagatttcacatatattatctcatctgaatttcatagcatcctttggaagtagtcaaggctggaataataatctccacattttaggttaactgaggctgggagagcttggtgatcttctcatggctgcctagtgagtgagtggctgagccggggtccatactgttttttggcttctagttgaatgccttaatgatttattttgcacacgttcatgtattgatcatattaccttgcctttcaagtatgcctcctttcttattctctccctcaatgaaagagacaataccatcaacaaaacaataatcccccaaaagaaaaccctccagctcaattccttttcagagcagcgactttttaatcctcacacactttctgtgaaccggaagataatggttaccaatatttcagttacattaattgggaaaaatgagggccagaggaaataaatcagaataatggttcatcagaggctgcaggctggtacagagagcaatattttgaaccttagaaattgtaagtccttgctctgctattgtgaccatattcaaatcaactactctgaatagacagaaacgccacgtccaagttcctctgcctcttgggaaaatcagttaagaaatgtgaagaaataagaaaagtaccttttactatgtgccttctcttaagaaaatagattctagaaaatgtcaagatgacaatatcctttatccatgctgaatttgtacataagtgcatgtttatgcataagagcaacatgaaacattttaaagacaagtttgagacattaatttgggccaatacggcacattgaattgcaaattgatgacaaggctcaattgtgggtcaagccccagtactcacttggtttaactagcaccctggttcctcctccaaaagttagcttgttgcctgcagctttgatcacacaatgatttaaggcccagcaaaaaccacagggaccaagaaaataacactcagttggtgctcaacaaaggacattttctatggtcttggaaaagtggagggtttgcaatgtgcagggtaatcctatctcctagcactgtatcctcttcatagagctggaatgcttgcaagtgggcacatatttgggtctaagcccttcacatagttattgtctactctgctttgggaattcggatcttgctctgtgaataaggataatattaatagctctcaaccataacctcattcaggggcccacttggcatttttgtctcacaaaggcaattttctctgaaaacagaaagccctgtaagctccagggagtcttcagagtaaggctattcatacattcagaatggaaatgctgaatgaacacactcatatacatgcatgcacttgctaacagggtttctgtattcaatcgagtgcccaggaaaggccccaaagagaggacgagtacttcagtcctaggtcctcccagctgccatatccactggatactgcggatcaactttactttctcagtgaaagtttcagacccagactccctccagctactctagagcccatccatcggtgaggctaagtgctgaggaagcatggaaacaggcttcttggggaaagtttacagagaaccacggagaggccattctcaataagaaagagtgcagcgacagatggagcctctgacagggagacggccaagagtcacaggacccaagaaaaacacaccttagaaagctggtctagtttgcttgcccattctgggtggagggccatgtccttcaccaaatattgtgggtggaccagagcaggtgttttaggatgctcacatgttttagtgggacctcccttctttgcctttggtggggaccatcaagttctctctgattcctgggttcctaaaagggactttccatcgcctttgtctccctctgcttcctcgtcctaatctacctaggactggggtcctccaggaggggaagtacacatatctctttagtttcaagactaaaggagttaattcatctccccttttaatttctccacagtaatattttcctggaatagaaagcgactcactcaccaggccagacagtcaactgagttcctcttccaaagtatagcctccccagggttgagcctctgtcggcacaatgctggtcccctttacatgaacccagccctaatgtttcccatcccctctcccctcagctttggagtacagggttgaaaatttgcctccatcctccttaagcatctgtaagtcttcttcttgtgcagacagcagtctaagctagacagtcag

SEQ ID NO: 11959 - DNA, 2300 bp, Homo sapien
aggtcagaagaactggaagtgctcagccagactttctgcctttttctttaggatcaactctctaggatctttcagtctgttgcgtttggttcatccacatggctattttttttcacagctagctcttctatcctctgtgccattactttaacatttcttccttcattggaatccacttaagtctgcataaaccattaatttcttgacacttgggccttccaaatactgcagtaagtttagtgggtctcagtagccacattaagcctcctactttagtgacatattgcctacttaccaggttttactgataatcttgtcccactcccaaagatgaatgtgctataaatcacagcactgtgctgcctgacaaaaatgaccgagttaccttgataatagattaatgtggttagcatgcagctatctccctcatgggagctctggctggattccccctttttgatactggaataaagactaagccatggaattaagcctgagaaagcctcttttcagggcaccatagtggtacaatagatgtagtggaaagcctgagaacagtccaagtgatattctctagacaactctgaaacttatttctttcgaggagatttacataatttcaccaagtaatcttgttttactagccaaaggatagcagctctgacccccatttttacctaggaatcaacacctgtacataatctcattttaccactgtttagcaaattgctcatatccttgtagataatctttctttcttctatcaattaaaatttttttaagagcatggaataggacaggggctatggttggagtattaggggtgagagacaacatccaattttcccatgtgtttaaatggctttcctcatcaaatgtcaatattccttaactcaaagaaataggaggcatttggtcacctgtgcaatatatgactacaggataagtacaagcactatgatcaataattatcaggtacttactggaactcactgataaggtgggttcccttcccaaagatcagagcagttccctgcctggttggcacagtgaaatgaggccctgcaaatacctcatgtacctgctcactcaaatccaccttggatataactataaatgatggaaatttgcaaaaatctcagtaggttttagtatttgggtatgaaatagcaaagctctgtaatttcatgaaaaagagcggcagttggtgctaagtcctttattcactcagtaactgttcactgaacacctccgatgtgtaaagacattgtgccggcactagggatacggtgagagccacttagacactgtccccgtcctcctggtgtctacggtctagaagaaggcaaacaataaatacacagatagtataatgttaagtgatgaaagtgtgtgaattaaaatcaggctaaataacagggtagagagcagccaggcagtgctgtgtttgatggcttgttagattggctgggtaagacaggcctctctgaggtgatgtctaaagtgaagtctaggcatggaggaattaatcatcatcccttttgcgataaatggaggggctgaaagagcagatcctggatccgagtcacacagagtgtccacatggacctttagatcatgtcttctccctgctgaagtgttagatgtaaaactaaccatgtaaattcctggttagaaaagggtaaagtaagaccgattttctctcagagtgactttgggatgttatctgggcacctggaagcttttgccctggccatggagggcactgaggttgcagggggctgccagctgcaagagaaagtgttcgcatttcagagcagacttctctgatgcaactgaccactgggctaaggagacgtcttccatactgcttctctgttaagcttccattctgcttccctgttaacaatgcaaactgctacctggcagaagtgaggatggagaaggcatgaagaattctgctccccatgaaatatggataaatcgagaacatttggcagtccacttagatttccaaaaaagcttattacttgtctcaaaaactaatcaattaagaattcattagtaataatacttactaagatccacctttaacatggttccccttgcaaagagcagcttctggccatctgaaaacccacagtgatctattgtaccacaaaaaccaaaggatgcttcatttccaagcagagtacttctcccagggttcttttgcttggttgaaacctaatctaacactaagcacatatttagctaaactcacgaaaaattttaagctcacgcactctttggaatggtgg

SEQ ID NO: 11960 - DNA, 2300 bp, Homo sapien
catggctctatttgaatcccaatctagcatttcttcctccccactacacgctcaaatgtactgtgtcatttgcttaattttcttcttccctttggcctggaaacctgatttctttgggtgtttaacttcaattaagcaagaatttatcaagtatttacttttgtaaaaggaccatatcagacacttcatggaatattagagactgtctattctcaaggatcttttggttcaaataggcagatatctcagtaagaaaagatttctgtagctgcataggtcacagattgtctaagattccacagctaaatttgggatatggagggttagaggaatgtgaagggtgcccggggagagaccacgtctaggcttaaacaggagtgaggctatttctggaaaaaccatcgtttgtcctaattgtctagggtattactcccttctccatcctgacctagtgaattagttctactgttatttccaactcttctattagctattttcatttttaaatgaagagtccatggaggctcaatcttaaattcacagaacattgataataaaacaaggatgatgaaatccatgaggataacacgcaatacatatggaagccttaaaccagataaggggaaaacatgggtgggatggggtcaacatgtacctggagagactagaagcatagtccccttcccaaaggtgagggtgctgtatcctgaattcacactatagcaaatccccatacaaaaatgatttgcagtgttaggtatttcaacccatgatctacatagggaaaaggaaagaaaaccttcatttatgagccaaatggattaataatctgcatatattccactacctcatttgggcttcaactgtgccatgagcttaaatattatcctcattttacaaatgagggataggtgatctgaggctgagcaggttgggccagcactgctaacaaagatgtaagtatcctggatccacaagacactttggcagaggatggataaatcttaggaggagctttcagagaagaatcctcttccttgttccttctagagagggattacagctatattagggttcttttgctagaaccagacatcagaactctagtaacagtgctcctaaaaaactccagctcattttgcattatacaatcatttcctgagacatgaagacattttaccctcaatctttctgttgcctctctgacaccttacttaccaggcctgaccagcagtctggtcccactcccgaagatcaatttatagctgctatccatcccacagtgtttcttagtcagtcaaaaacacccagaagcccacacatccttttcatacctaagacctagagatatggccttttcacctacaaggagatacgggttacattttcacttcctttttacacaggccatttgactcaaatttggggtatttactgcatatcacttgaaatgaagtttctacctgcccaactctctgggtctgtcgccatcaaattcatgattttcaactccatttatccaacagatgtagctagcccttctttcatttccattacagttatcaatttttagattcctgacatagtgtcacccctaattttaacttcaatcaatctgaaacttcacggaatagcattcagatcatcatgagtggcagcttcctgctcccccgagtcaactcattttagaagctcagtgactcagtggtagccttgttacttacctgagtcctatccagcccccagaaccaagcatccctctgattaaaggacacccactctgctttaagcttggtaaaaagtaccacttgtcttctctttagttcttttctttgcaaatctactgttttccattggcttcacaggcaatgtcttagttttttttgatattaagaagaaacacacactggacaaaacaatactaagaacatgctaaaggatgttcttatacaatccttttcagtctcctgaaacagccagagaagagcaggcccataatatctctttatgtgctccaaatgttacggtctgagagaagacaacacaaggaagaggaaagcataggaaattggactcacttgggatgacttggagctttgttccaattccaaaggtaactttctggtaacccccagaattcacactgtaatgcctgcctttacaaaatgacttcccttcccctgcccttttcatttgggtagcatttgagccactatatttcagtagaagagaaagtgctttttaccaatgcctagggctacagatcacatgtaaatggctatttcactaagaacctacaa

SEQ ID NO: 11961 - DNA, 2300 bp, Homo sapien
tggcccattttgtcgcagtgcaaatcactgtgggaaatactggaggcttcaaaactatctttggagcaggaacaagactatttgttaaagcaagtaagttccatgaaataacctgatttatattacagttgaagaacatctgttttcattgatttttttctttttagggggaaggggacatagttttgtctgccagttaaattagaagatacattggcaataataatgttgcactgtacagtatccatgggcatcactcttgcaagaaacatgtataattaacaaacagttaagtgtggatggtaaaacttccctaggtcctatctagaactgaaactctgtaattatattaataacttttttaacttgaatattagtgacatttttatataacccaaggtatacaaagcagaatcttcagttgggttctatctgatttgttgtcatcttccaatggtcttaggaaaattaaggttaaatagtaagattagatgcctcctaccactttggtacatgcatgcagacatagaaacacccttagtaactaacttgcatgtgacttggcaatcctagctatggcccagtgacagggtcccattttgtacagagttatgtcagagtgtgaacacaggctttcagaaacttgtatttggaactggcacccgacttctggtcagtccaagtaagtcaaatctgcagaaatgtgtagccctatcctcaatattgggcatatatggatataattattctggtctataatagattattattactactattttgttcttattaatcataacaatgctgctaatttcaaatatacattttctgccatattattatttttacctttaaggagaattattgtcaagatatcaggagggaaatatttgaatttcctttgagtcaagtttcttatttgttcgtcagttcccacctctctgctgagggtcatatgaacctcacgatgttttggtttttataccgccttcttattatctctcttagaaatgcttccttggtttttccttgcctaagcacttagattttgcagctcacatttacccagagtatacttagcttttaacctctcccaaaactggcctccctgtcccaataattatgcacagtaaaagtcagttcaattcagtaaatgattattgagtatcatcaacaaaccagggaatcatcattggttttaaaagaaagaaacaaagaaaagaatttttaaaaccctaagctatcttaggcttctgatctcaagaacttccagtcttatcagagaaactaagcactcataataaaaagtctaacaaaaatttatatgtgtatgtgccaagataggggggtgggtttcctgagggctggagacaggacaggtatgaccatgcacagccgcattctttggcagagaacacacatgattcccccaaatatgtttctggaaacggaattgagtctgttctgtgctgagatctttgactttcttgaggacaaaagcccccttggcagttagcatccttgagcgggggtgaggacagaaacaggaatgagtcaggcgtgagtcacccaagactctcactcagccccaagaggatggagtgactctgagtcatgccgaggcatgtctttagcatgtgctccagcagtgtgcatttatggcaaggtgaaaaatacatttttgcacatgtcactaggaaaatggtaccttcttctcaggcatggcagatgaagtaggaaaatgcccgcctgctctctggtatctttagaaatactcacacccatccagcctatgtaggatacaatgtttttcatgaagttttatgaagattctgtttttcccaaaggagaaatagccaaagctgtgtttattgatagctgtgatgaggaaaatgaaggccaacaggtagcagtggggtctggtgctgtttataccttttagggaggttccttcaagtcttcataccacccattacaaggaaaactttagcatccgcctttcagggtttccagatcttagagctactgtgaaggggatgtgtcttcagagaaggggtgggcaaaaccaggaggtttttgtaatacacttacacagtgtgactatgggaacaacagactcgcttttgggaaggggaaccaagtggtggtcataccaagtaagtgagctgggatcctcctgcacaaatggccacagcacccccatcgctaccctgtgctggagagcctcttatcatatttccatgggagcgggggaaggacatgccattcatcagtgctatatcgaagaaccttaggcggcc

SEQ ID NO: 11962 - DNA, 2300 bp, Homo sapien
gagcttaaggtatagtggaggatgtgtgtatgtaccaggcaatgagaattggaggctagtcatgtcttctgttgtgcttccattgcaacttgcatgtacctccactatgacgtggtgacaataggctatagttgtctgtttgcactctgagctcccagatggcagagactctccctccttccctggatgaaagagaacctccctccttccctcctttcctccttttcttccttcttccctccctcccggtccttcctctacttcctctcctttctttcctttccttcccttcccttccctcccattcccttcctcacacttaacatagtgcttggaataaaataattgtccaataaatatttgttgaatacataaaccctctaaatatttccattcgtttctaatgcagttctgttatcttctttcattaagactatttcatttcttctttaatttctatatggttcctttttacaaactttttattatttttatggcattatttaggctctaagttcttcctatatctctcaattggatgtgcagttttgagaaagtgtgtccaatgcccagagtctttgggaagcataattcatcacctttcatgaaaactaaatggaacaaaaataaatcttttggcataatcagtcacagtttcttttctgataaagatcttttgtctcaaaggaatctgtctctgcaatgatgaaatggccaattcccattggcaaatactaccgttagaaaacagactattaagctagtggctaggaattaaaatttcaagatattcaagcctcataaagaaacatgaaaaattagttcaggaagtacagattcatcatctaagaaagcagagtagggcctttctgtgtctttggccagagcctaagtttgggtacttacttggttgcacttggagtcttgttccactcccaaaagtaagtgctctcctgcccgtgtccacaccctggtacatcacagtacaaaatcctgccctctgccagctgggggcagctgcccatgaccctcatacactcacagtttcttgggagaaaaacttttaagcagcctattctatggtttgatgatacatttttctttctctctaactgtatgcgcaataaacagtccccctaagtttctccttccctccctgccatacctgtattctgccacccaacccaatgactctgctgatctcttcagaagtgctgagtcaccatgccatggtcgctatggtaagaaggctcaggatgggcaaaccaaaggccaaacagatggcctttgaggtgtgaagtcttccttcacagaatgcaggaggcatggtggtggcacggttaataacaaggccctagagtcaaacagatttgagttaaactctagctctgtcattcgtggctatataatcttggataatttacttatcccaagcctctgtttcctcacctgtaaaatgggcaaaatatcggctacctattattaggatgtgtgtaatcactgaatgaggattacataaaagacaagagaatggccactggtacgtgtcaggcattcagtaaatagtagctcataatgggatgattcccagcaatgctttacactgggggaaaggatgaggcttcttgcagccagaagcccagaaacgcatccctgtaccatccattccagtaccacagagtgcctcagcaccctggctggtatgctctaattcaggggaaggtatctcacggattctaggggaggtggtgacagagtctcaggtggaagagacataggagtgagggggcagagtagaccccttggttgccaagaagaaagttctgttttagaaacctaaccaagagtgaagtcttttttcacaacttggggatttgtcctctgaaatcattgtgcaaaacccttgtccggcacagcctcaatcatctcatcagacctgacactgatagttactcccaggcaacaaaggactcctttaatgatggaatagatcacaacacaaactctcactactacagtatccttccataatataatctgtctgcaaaatttcccttgatcatttctataatacttacacggatgaacaataaggctggttcctcttccaaatgtaggtatgtagcttcctcctgatgcacacagtgaggacagcctttgataaaacctgtttcatgtgacctccctctaccaattgccccatggtattgggcaacatcctgggaaaccctcctgaatactctctgagttgtagaaagtctcctactgctgtccttagagcccccgagtgctggagccca

SEQ ID NO: 11963 - DNA, 2300 bp, Homo sapien
agtcaaattttaatgtgtttgacctagagaaacatgaatattcaagatagatagtaatgcttttcccttcccagacctctgtaagaaaattagttacaacatctacagcaagcctcaccatagtaataagtgatatctccagagaaaggattagtgacactggcccatggggttgcacgtggtgccacctgggatgactcaccagatataatgaatacatgggtccctttcccaaatgtgagtttatcaattgttcctccagtattcataccgtaggtgacaccattgcacaaactcacaggacctacctattacttaaataagagaaacactgatctcccccacaaggcaggagaacaggataatcacactcctaagggttagaccttctttttttttttttttttttgtttttttgagaaggagtcttgctctgttgcccaggctggagtgcaatgatgcgatctcagctcactgcaatctctgcctcccgggttcaacaattctcctgcctcagtctcccgagtagctgagactacaggcgcgtgccatcacgcccggctaatttttgtatttttagtagagatagggtttcactgtgttagccaggatggtcttgatctcctgaccttgtgatctccctgcctcggcctcccaaagtgctaggattacaggcgtgagccaccacgccaggcctaaaccttctgctcttttgcactgaaatttcgcttctgatacaaaagttctcctcctgttccattctgctgtgattccctgggctgaggttgtgacttcatatgatttcaataaaccaataattccctagaacaaaaacctcaattccaggcagcagtatcttggatatgtttgtggaaggttcaggagtactcgctcattgcctgcctcatggttcctaaggtcccagcctaaggatgatgtctgcagagcaccgagagctggatgggaggattttctggggatgggtggaagaaaccattttggagcccacagaggaaaatacctgggttcaagttggcattttggacaaagaagaaatagttgtccgtcctcccttgctctcctgcttcattctacttacttggccggatgctgagtctggtccctgatccaaagattatcttggaagcactgctgtacccccactgtgggtaaggtctttgagataaccttcttgatgctaatctgctggaagccactggggtcccagagcaacattctaaaaggctccttgggtctttgttgcttacatcttttatttcccaaggaagcgattctcctttccctttatgatagtgtaaaccttagtataagcaaagcctcaataataataattataataatattttagaaaagctactacttattgatcactttttacattctggccattatctcatattattatgatgtagttatagtcattttgctgctgagaaagtggaggctttattgaaaacagccagtgagagtagagcccagattttccccaggtctgtgggcctccctctacattgctgcctctataccttgtaattgcatgtggtatacttgccgttcagttaggggtctgggccacttttacccttaggaggaagctgaaaactctcctaactccagagaggaagattctatgagtagggatccccataccatgtttattagccaatccagggaatttagctacatgctgcaataaaagagaatttgtgtttgccattaactcatctctttcccccaagggcacttagctaatttcctgaatgttcagattatctggtgccgatattatcagcttcgcttgaaagcactcattatttggaactctttttatgtttctataaattattctgctcagattttcatttacgcaattggctcttggcacttctgtgtttcatatgagaaatgggaacattttaagtcaccaagagagcttgtaggaatggaaaatgagtgcttctcaatatatccccaagtttgctatagatcatcacctgttttctcatagacaagtggtcagttctttttgcactggtcacttgcagggtcatactcacatgggtgtacagccagcctggtccctgctccaaaaatcagcttattgtagccaccagaaaacacacaatcagatggtgctttacaagaactctgacctgggcagggcaagcctggctggggcactccatctcctgtccctgttttccaggctcccccaagtcaaactttctctgacaagagagaaaagtctcacctaccaggtcttcattccacctactcac

SEQ ID NO: 11964 - DNA, 2300 bp, Homo sapien
ttagaagtttgccacccatgtgcctgatagtcttgtttctaaatatctttcatatcattgctactttttcatcctctgttttagcctctcaatatctcttatgaagactactgtaatcctccttactggccttccggcctctggtttccagtccatcttctactgtgtttgcaggcttgatttgacttgcaaatctgattgtgtcactcccatgtacaatttgtgtttcccaaagtaaaattaaaactttttttttgacatacaggctctttcatgatctggcttcctcgctgtctgcagcttcatctcttgcctctgcctcctctatactctgctccaacagtattgagctacttgtcattctctgaacactctcatgtgtcaaactatttgcctttgcttgactgccttcaaaattccttcactttttagacttctcagctcaagtgcaatttccttttttttttgttactgtttttaaagagaacaaggtcttgctatgttgcccaggctggcctcaaactccttggctcaagcagtcctgcctcagcctcctgagtagctaggactataggcacacagcactatgcctggcttattgccctttggaacccttccctgactctccagcagattgaggtctttcctctgtattcctttttcaccttgtatgtgtgtgtgtgagagagatatggcattgtgctgtatttgggtgtctgccttctctctggaaggtgagcccttgagggcaggggctgtcttctcatctctccatcctcagtgctgaacactgtatatgttaaatggtgagcaggcctatagtcatgtcaggaatagtgagcaatgatgtgctaggttctctgccaaggtgctgggaattcaactgtgaagcacacagacgtggcttctactctcacagagtttgtaattagtgggaaatacagacaagtaaatatggatatggtgctgatggagaattattggtgagaatgggaacacaatgtgcatccaaccctgcctagtggtcctgcaataatatttctcttatacattcgccttcctaaagtaggcttcataaatcactctatttttcctcttttcctttattcttagttggtgatcttgcttttattttttcactaaaaaaaagaagtagataagaattccttcatcttttcaccactgaatcataacagatcacctacttttatacccatactctctgacttctcatggtggatgatgtgtctctttcctgtgaaagctctgcttgtgcagaggatccagtcttcccttgctcactcagggactccgcttctgcaattattcctctgttccgtgtcattaatttctgtttctctcctggatcattcccatcatacaaacatgttctaatattgtctatttaaaaaaaatccgtttgaccacagataatcttctagctaccatcccatttcctttccatcattacagaatttcttgaaagaataattaatgttcctacttcctcccttaactattcattccttaacccactcttggtattggtctgtcctcgctacttcactgaattacttcactgaaactactcttgccatgttgcaacgtttagcatttaatgtaggtattggcttctgtgtaaaaggaaagttttttcttgaatacaacactctcctgcttgttctgtctcacctcactgctttttcctttctgctgttttgtgctgggcgcttctctgactgagagcatggttgtagataccttcactttgtatttttttttaaatagataaacttaaataacacctgtatacctacaactactcctttatatttttagttttgaactgtcccccgaattccaaattagtaaatccagttgccaacttgatgtcttcacttgatgtctgatatgtaccttgaacttaacatgtccaagatcaaacctgctcatccagccatctgcctcttcaccagttagtacgtggtgtcaatgttggttgtggttttttttttttttttttttgagacatagtctcactctgtcacccaggctggagtgcagtggcacaatctcggctcactgcaacctccatctcccgggtttaagcaattctcctgcctcagcctcctgagtagctgggattacaggcacgctcccccatgcccggctaatttttgtatttttagtagagacgaggtttcgccatgttggccaggctggtcacgaactcctgacctcaggtgattcacccacctcggcctcccaaagtgctgggattacaggcgtgagccgccatg

SEQ ID NO: 11965 - DNA, 2300 bp, Homo sapien
aggaagctaccctcctacttgttgatgaggcagagagaaaggttcaacttgtcagagaaattgatgcttcctgccatattatattgaaataagaaccagcttgttatccactctttttttttctttctcagcaacataggtttaggctgaacttatgttcatatagctgcacaaatctccacgggtatgaatataaatctatctattcaaatagactctaaaggtttcttaggttatttctcttctttctagaacttaagtaaggctttgatcaccactgataatacatccgttagttaatgcgtgtagagtttccagtctaaaggcaaataaaaagtgaaaaggggccggcgcagtggctcactcctataatcccagcactttgggaggctgaagcaggcagatcacctgaggtcaggagttcaagatcagcttggccaacatggcgaaaccccgtttctactaaaaatacaaaaattagccgggcgtggtggcaggtgcctctaatcccagctactcgggaggctgaggcaggagaatggcttgaacccaggaggtggaggttgcagtgagccgagatcgcaccattcactgcactccagcctgggtgacaagagcaaaacttcatctcaaaaaaaaaaaaaaaaaaagtgaaaaggcaggaacgctgttgttcacctgctgttttaggaattttgctcacgtacagttcaaaatattaagaagctgaaaataaagtacctggtcatgtgtggaaaaacttacagctaaaaggtgagatgaactgggtctagaaggtcggattcacgtgaaattaaaagggcaacgaaagccagaacttaatttcttaaaaaaagttaaaacaggccgggtgcagtggctcatgcctgtaatcccagcactttgggaggccgaggctggcggatcacaaggtcaggagttcgggaccagcctggctaacaatggtgaaactccgtctctactgaaaatacaaaaattagccgggcgtggtggcgcgtgcctgtagtcccagctactagggaggcggaggttgcagtgggccgagatcgcgacactgcactccagcctggccgacagagcaaggctccgtctcaaaaaaaaaaaaaaaaaaacagttaaaaccctcaaaataatcccacttgttaaaatacaaaacctgaaaccatttcagtttcttctgcaaaatgagttggagagagtagggttgaaccaggcatgctctttcgggcctttcgacgctgacatcccgggatattacaccaggttcaagataccagcttgcggaaagagagctgctaaacttgaccatatgctttttgcacgacattcgacagctgtccctcccttcaccagctcttttaaggctgcaaatatatctgattcacgtgagagtccctacaagttagtacaacgtcaggccccaaggaggcgcccaataaatgttggcattgcagggccagatcccgagttccagttcagaaccctgctgaggtcaggcttcctccctgcctcccgcccctcaccacacccactcactcccccaagtaattaagtctaaactggggcctgtgcagtgattggccgcgccgggtctcactgcggatgaacttgacttgttccaatgatctgtgacagacatctgcagacagcgcccttaacagaattagggtcaggctggtatcaaaccccaggaacgccaggcattgcctcaaagtagatgcaaaccgttaaatcttccaggactcagaaggaccagagagagccggatacctctggttagctacgcggtccccagtaaagcttattcccctcttcctcccagtgtgtcttgttgccagagcaactgtgggcgtcaccgagctgacgggcggaaacagaacagaaagagtacacgtccccagctcattgatagggccattgcgcagacgcattaacttttctgagttgtagttgagtctgttgatgcagtccgcgtctgcgcattagttgttacgcgccctggccggcctcagcgcctgcgcaaattggcacaccggggagggcggagttaggtcacgagggtgcgcatgcgcaaacagcacatccggtgtggtcgacgggtcctccaagagtttggggcgcggactggagtaccttgcgtgcagttatgtcggcgtcggtagtgtctgtcatttcgcggttcttagaagagtacttgagctccactccgcagcgtctgaagttgctggacgcgtacctgctgtatatactgctgaccggggcgctgcagttcggttact

SEQ ID NO: 11966 - DNA, 2300 bp, Homo sapien
ggagtgcaatggcacgatctcaactcactgcaacctcctcctcccgtgttcaagcaattctcctgcctcagcctcctgagtagctgggattacaggcacgcgccaccacacctggctaatttttgtattcttagtagagatggggtttcaccatgttggccaggctggtctcaaactcttgacctcgtgatccatctgcctcggcctcccaaagtgatgggattacaggcgtgagccaccatgcccagcccagaaatctgaatttctaataaatccaccagatgattctatgcatactgaagtttagaaccactgtgctttgttgaaagattgaacgaagccaagtttgttggctcacccctgtaatcccagcactttgagagcccaaggcagaaagatagcttgagccaaggagtttgagaccagcctgggcaaaataacaagaccccatctttacaaaaactaaaaaaaaaattagctgggcacatgtagtcctagctacttagaagactgaggcaagaggaccccttgagcccaggagttcaaggctgcagtgagccatgatcatgacactgcattccagcttaggtgacagtgagaatcagtctcaaaaaaaaaaaaggttgcatgaaagagacaagtcctctgctagttgaactactttgtaccacatctggcaaattcctaagcccctaaactctataaatgctggttctcctaaacgttaagtctttataatgatcagcttaacactgtgttgctacaaagaagaaatctcagaatcatctgggtcctgcaggaaggctaaagaaaaatgctttgataaacccctgtgcaccagcattctctcacccatcctccaccactccccagtctggttttttttgtttgtttgcttgtttgtttttggtttttgagatggagtctcactctgtctctcaggctggagtgcagtgtcacaattttggctcactgcaacctccgcctcctgggttcaagcaattctccctgccgcagcctccccagtagctaggattacaggtgcctgctaccacacctggctaattttttgtatttttagtaagagatggggtttcaccatgttggccagactggtctcgaactactgaccgcaagtgatccacccactttggcctcccaaggtgcagggattacaggcgtgagccaccgcgccccacccctagtctggttttaactaaggggatgatctgaaatctgacagttccagggaggtcaggccctgtttaccggtacaagcaaattcagcagccagcctcaagatttagctcctctgctgagcaaactgaagtgcactcaggacctctgggccaagccagccttatctccctgtccccgcatttacataccgaaaggagacctagccttattggtgagtccttcaactgttatcctccaaactgagggtgacctggagttgagctatattttccctggaaaataggttggggtcagagtcaacatcagagcagagatatgcccattttggcagatgtcatataggtttaggtttgccagagaaaatacaggatgcctacttatgtcccaaatactgcatggcccatacttattctaaaaaagtatttgctttatttaaatctggaatttacatttaactaggtgtcctgtattttagtttcgaaatctggcatccaggccctttgtaggagcattcaaccaatggcgttgtctccacaaacatttaagcctcttactagaaggaacattaacaagggtcgatttcaggaggacacagttacaatgggaagcccaaagagtgggtgcgagcgtgcaggcgtagttctaccactttttagttatgagagaagggagggctgtcggagctcctgcaaggactcccccaaatgtgtgaccaggattactgtcccattctgagaccgtcagagacatctctgccgggacacatgccagtgattgaaaacacagcaagggccccactagctgaaaccaagttgcagagttttgagggtcccaccgccgaccgccggcccgccgcgagccctgccccctgcgcggccacgcccccttgctccccgcggcctcccgggtcagctggtgctggcgtcaggcgctgggcgggctcgccaggacctggcaaggcttgtttactatggccgatgatctggagcagcagtgagttaatcctgtccctttctctctttctctctctctctctgggccatgatcctgggactgtctgtggctgaggaacagttgtagacaccttcccgctcttcctt

SEQ ID NO: 11967 - DNA, 2300 bp, Homo sapien
acacaggttccctctggtcttgttttctagattgtaaaatgagtagaaagctcacctatgtcctcacctctaatgacatgcggtaacacagataactcatcctgttttctccttcatacccagggaccttaagtcattgcaaggtagaggttaaaagcaccagctttggaattacacacacacacacacacacacacacacacacacacacacacacccctgctggacgtgaatcatagtgttatcattgatgagtagaatggttttggcccattaaataacctgtctttgagcatctgtatatgtaaggacacttgtaagatgcccagtacaaatgagatgctcaatgaatgacagtttgtattattccttgttaaccccatatgatatttctcttttcttgaactctgcctgagttacaggacagatatctacagctataggaagggcctgtgaacactggcatattcaaggtagggcactctaagggggagtgaggggaaccattaccaaatccccttggcccacactgggcatcctgatacatcatttgaagcacagaattttagattaggatgtttccttaggaatcaactagtctagcctctgtattttacagatgagcaaactgatgcccaaagaggtcatacaagttagaaaaaaagaaccagaactagagccccttatctcaaatccaggtttctctccctgaaccttccagcctcagcttttcaaggtcatgtacaaatattcacagaacataaccacatttttacatttatgtctgttttctcaagggaggtgtgatctaaactctgaaggccagagttccaattttagcactgtcacttaccagcaatgtgactgtgggcacattatttagcttttctgtgtcagagcttcctcatctttaaaagggaggtaataatatctacctcatagggttgctataaagattaaaagtgttaatgcatctaaagcacatagaatattgcctagcacaaactcccaatcaactttctttccccccagctaaatcataagttgtctacattcccagtgttttgcaagtagcaactctcagtggatgtttgaagtttgaaagaaaaactggggttgcagctgggagtgatacatcaatggttttagccagatgagagttgtcaatatcaatcgatctaatcctagggagactcagaatccttttaatattctactggaattccttgtaggcttgaagcacggggaccaagaccacaggattttgtcagccttaagagacaaattttctctctaaatcacagactgtgacaagtcagatcataacacctggatcccacattgtcctgttactgtacaaagcagagttcaggagaaacgctacccaaggaacagcatcatagactgctcagcagagagtccttggtgggagaattactttgctttccttcttcaccaaaaatgttacaagtaaacactggaaatggtgcctggcacactgtatgtgctcaaaactatgcgggaggtaagggctggggtgggaaattgaggcaaggagcagaaaagacattcagccatgaacttaacctggctaggacggtctctgtcaacttgatgggggtgaagcacaaggggttctgtgctgggagagaatcctgttctagacctctgtgatcttgggcaagtctcctaatttctatggacaccagcttcttcatttttaaaaaggagctgaactacctgcatgtcctccagctctaatattctgcctccctaagtcctttaaagcattgcaaatttcctcttggaaaagtcatcttagaaagtaaaacattcccctggacatttctttcaagcccagcaagctattaattatggtcataaagttaattagttccccggacttccagttctacaggtctgaaaaacaggattactgggtccaggaaaggcccagttctggtgaaaccaaggctcggctgggagctgagtcattcttctcgtagcaactttttcttactcctgtcagattgcgaactgctagtcacaccacctacaggtggtatcccaaacctgatgcccttgaaagagtggtagcaaatcccaatagctctaaatctgaaaccattgcattaaagatgttgttacgattattaaaagcattatcaactaggatcacatgcggctacgtgtctcggtgggcgacagctaaagaaacttgcaagcccgttgttccacaccaatttcagcgcgatggagacctctccagtctctccacatcttctctttgccgggcggag

SEQ ID NO: 11968 - DNA, 2300 bp, Homo sapien
ctcactgcaagctccgcctcccaggttcatgccattctcctgcctcagcctcccaagtaactgggactacaggcacctgccaccatgcccggctaattttttgtgtttttagtagagacggggtttcatcgtgttaacgaggctggtctcgatctgacctcgtgatccgcctgcctcggcctcccgaagtgctgggattacaggcgtgagccaccgcgcctggcctgttttttgttttttgtatttttttctcttcatcggcatgggaaaagcttttcctatgccaggaacaggtggagcagaatagctaccagagtctcactctgtctcccaggctgatgtgcagtggtgtgatctcagctcactgcaacctccgcctcctgggttcaagccattcccctgcctgagcctcctgagtagctgggactgcaggtgtaccccaccacacctggctaatttttgtgttttcagtagagacggggtttcaccatgttggctaggctggtcttgaactcctagcctctagtgatccatccgcatcagcctcccaaagtgctgggattacaggcatgagccaccacacccaatctgtgtgaaattttatgaaaacctgctggtgattcatgcccagtaaccactggatcccatccctgtggttcacccaacacctgcagcagggagaggtcagaaccaaagcctccaacataacccacagtggcaggcaagcccctctgaaccatgcacttgtccaggcaagcaccacatcttcacctgctctgtgtcacctagcacttggtagctgtcagcaaattctgtgggtaaaagggagaaaaggaggtggaggaccatggggagctagccataatgaatagtatcaatatctccagccttctgacctcacactgccagcacccttctccgctggggagctttttactctgatgaagtgcaaagcagaaaagtgcaatcttttccaatggaaaagattggtgatgcctgtcttgtactgatgattgtgcttacagagtaatattcaatagccaattattatgagttaattgctgatggctaagtaagagttatctctctaggtccttcaagaaaaacagaatgattccagataaagaaaaaaagcatttgattagaagataggagtttaggagttctgagagagaggaaggataccaagacacgggtgccaaaggacagtaagtgggcagaggctcccagcaccgtggtctccaacagagtctatagtcctttgccaaaaagaaggtctgctcgagctactctcccctattctcacctctggccaggctcatgcaggagcatcagagctatcatagttggggaagttggccagcagccatgagggactatgcaggagggagggccaggcccatgcagatcctcatggcacccccaacccagccccttcttacctccctcttgcttctcataaacagagagaagaccagagagaaagagagagatcagggatcagaagttgaccagtagacctcatttttacagtctgttgttgcatgtatgtataccataatgaggtgaaacgaacagattgttgtaaaacagtgccctgagtctgagacacgattgtgtttagttcacctctccacatattctaatacaggcctgaaaatgagagcgctgtcgggaggtggtctagttccatccgctaccatcagaagattaaaaggccataagggtgtctgggagaaggagaacatagctcaggctataagagaagagcatctcagccatggattctgatggggagggcttgtgattcttgcagggaaagatctcggggcttcattgagctgaaaacaacctggctcctcagtgttgttagattgtctctaaattctctggtaatgagctgactttgtgatttgaagtcacctggaccttcccagtagattcctgcactctttctgccgctgtagtgttaaatgaataaagcaaacaaacccttaggagaaataaggtttagttaaagttctcaaaacatacacaggcaggagtcttccctgccccacctcccaaattggcctgtctgtgtttttctatcccctcccagggcctggtctggtgcagcgattccggccggacttcaaacgcaagtttgcagacttctttgaagatgataccatatcagagtatatttaccactgcaacgcacagaatcccaggtgagggccgctccccaggccagcttggggcagacagttgttaggagataaaactcttagctgctggagttctgggctttatttctt

SEQ ID NO: 11969 - DNA, 2300 bp, Homo sapien
gtgggctcaaatagcctttctttgctccacacgcagtcacctgaggtggctccagtgggctggagaatccactttttaaatggccttcttcacgtggctggcaaaagttggtgttgactgctggctgggagttcaactgaggctgttggcccaaacctcagttcttcttcacatggttggttgggcttttcacaggcagtaagtctgagaagtcaaacttctaacacagcagctggcttcccccgaatgcaaaaacagaagctatcaggccttcttaaggcatagtcccaaactggcataacatcacttccaacgcattctactattgattaaagcaagtgacaggcccaatcagactcaagagaagagaactcctaaaggtgcaaatattgggaagcctggttcatttggggccaccaaagtagcagtgtactgtaagatagtcaccctgccaagtgttctgtagctgtatatttgtaattacttctaattgtattgagttttaaaagtaatctctaaaaaaaaatcagtgtttccatatcaaaaatctattgatgtttataatagcatccaacatatgcaagtgttagctcataccactaattattactaaatcagtattatagttctttgcctcctattttcgccatatctgtcaggtacattcataatcgttccaaatgagcagtcactgaaataatttcaggttattgtatctttctgaaactataatttgttgtttagaaagtaatctgcatattgagagactttgtaagggttcaaacataatcaaactccacctttctgaccagtaacttttttccctgaagatgaatgcttttaacttcaagaaacagaacacccaagcaacagacttagagtctaaacagtaaagacctttaatcatctttttttttttttttttgagatggagtctgtcgcccaggctagagtgaggtggctccacctcggctcactgcaacctccacctcccggattcaagcgattctcctgcctcagcctccctagtagctgggactacaggtatgcaccaccacgcccgcctagttattttgtttttttgttttttgtatttttagtagagacaggatttcaccatgttggccaggctggtctcgatctcttgacctagttatcgagaccacctcagcctcccaaagtgatgagattacaggtatgagccactgcacccggccaagacctttaattaacttacacaacaaagtctggagataggcagttccaagcatggtacagcagctcaatgatatcatcaagtatttgggtgttttctatctttgccctcaaccatcttcagcacgtgagtttttctttcctttttttttttttttttgagacggagtctcgctcttgttgcccaggctggagtgcagtggcacaatcccggctcactgcaacctctgcatcccgggttcaagtgattctcctgcctcagcctcccgagtagctgggattacaggcgcccaccaccacgcccggctaatttttgtatttttagtagaaatggggtttcaccatgttggccaggatggtctcgacctcctgatctcgtgatccacccacctcggcctcccaaagtactgggattacagacctgagccaccgcgcccggcctgcacgtgagcttttcatctggaaacttgtcccctcatggtcagtcctcacaccaccccacttacagaagaaaaaaatggaaaggtgaagtctcctctggaagcttcgtctttttatctgggaggaaaatatttcccagaagctgccttcttttaatttctgtcagactctagactaccctcaaatttcactggacctgcgattacaatattacctagcaataagaatcaaaagaatcgaacatcattgagtgggaaaaatcctctgcaagtacagccaagccttttctgaggctatttttaaacttacaaatcagaggacaatcgcgacattagaggaaaattacccaggtttacgccatcactaacgatgatagcttacgatgatagctaacccagctcttcaacttcctttcaatctccagaaaaggctctctgcgtgctaatggtaacgtggctttacagatttttacccacttcaaatatggccgccaagctccgttctcttttaccgcctgatctgcggctacaattctggcttcatgcccgcctccaaaagtgcttcctctcgaggggttgtggttcttactgcgcaggcgcaaaagcaagtcctcttccgggcaaaatggcgatgggactaatgtg

SEQ ID NO: 11970 - DNA, 2300 bp, Homo sapien
tgttggagcctttcgtctaggctatagactgaaggatgacagaggctttctttctttttaatctagtctgcttacatcttcccccaggtaattcatgtagataattcctgtccaaaagcaaggtctaaggtggcatcggtggctcacgcctgtaatcccatcactttgggaggcagaagcaggtggatcagttgaggccaggagttcaagaccggcctggccaacatggcaaaacctcgtctctactagaaatacaaaaattaggctgggcacaatggctcatgcctgtaatcctagcactttgggaggccgaggtgggcggattgcctgagtttaggagtttaagaccatcctggtcaatgtggtgaaaccccgactctactaaaaacaaaaaagattagctgggcgtggtggtgtgcacctgtaatcccagctactcgggaggctgaggcaggagaattgcttgaacccagtaggtggaggttgcagtgagccgagattgcaccactgcactccagcctgggcgacagagtaagtgtctgtctcaaaataaataaaataaaataaaataaaataaaataaaaataccgaaataaaaacacaaaaattagccaggtgtaatcctagttactcaggaggctgatgcatgagaattgcttgaaccaggaggtggtggaggttgcagtgagtcaagatcgtgccactgcactccagcctgggggacagagtgagactctgtctcaaaaaaagaaaataaataaaaaaaaaaaaaaataaaaggaaggcctagagactaaggcaggccagggggatggggagatggagagatagtatacttgtgtgattaagagtatatgagctctggaggttccatgagataatgtgcttaagtccttagcagtgtgtctggcccagtaagtgctcaataagtgatagcaattattattacaggagcattttggagaaaaggagagtctcctccagaaggatttcagatcattgtgagcctgtcttgggagaagcatgatctctgggaacgctcacaccagaatcctcctcctagattaaattaaaagtttaaagagctagaatgggaggatgtatggtagagatgtctcccagagatatttagatctctattctctggttgtagaataaccaaagagggttagaacagataggagaagaaacagacagttggatttcagaatggatagggtctatttctgttggtaaaagagactcagaataccagatttaaagtaaataataaagatagcataaactatgtgatttccaaaaagtgctcagcttcctctgcctgttctgggcctgtctgtccaacagaattcagtgaaatctgatttcctcatattcttttttaattttttttttttgagatggagtcttgctgtgttgcccaggctggagtgcagtggcctaatgtgggttcactgcaagctccgcctcccgggttcatgccattctcctcattctcctgcctcagcctcccgaatagctgggactacaggtgcccgccaccacgcccggctaatttttatttttttgtgtttttagtagagacggggtttcaccgtgttagccaggatggtcttgatctcctgaccttgtgatccgcctgcctcagcctcccaaagtgctgggattacaggcgtgagccaccgcgtctggcctgatttcctcatattttttaggaaagtggagtcaacttatatttgaggaaggcgtttataggaatttatgcttatcccagagatcttggtatgttttgtcaagaatgaaaaggcacgtgggtctggtggggatgcagtcagatatttgatctcttgactgtgtttcttttgaagtagtctgaggctcagactttggggcagtggcccaggcttggaggcaaccccccagtctctctttgcatggggaagtgtgcagagttctcttagaacacccagtcacatggtgtagagactgctcttacacttcctgtaatctcagcatgggaacaagcctttgtgtcacactgtgcaaccttcctccctttcttaaatgcttggggtgagagagaagagaggctagggtggggcatggaggacacagagagagagagtgctgtgtattccttccccgctactgtcctgtcctcagctaacttgctctgggacagcttccccagggctacagatactgcactcagctgactgtcctttcttctgggcccctggtcccagagcagagctgacaaaggagattcctgagagagcaccttcttatcacagaaagtg

SEQ ID NO: 11971 - DNA, 2300 bp, Homo sapien
ctgtttcttgatcccagccctgtccctccctgggctgaaccttctgcccagagacttcagcccttccttaatggaagccctggccacaggagtaaacaatttcttttttgtttcactttttttttttttttttaaagagactgtcttagccacagtggaatatagaaaaacaaacagagaactggggagggaggagctgagcttctagcttggagtgatggggaaatctagtcataccagagtgtatctgttttctgtttctgttgttaggggaggcagcacagactgattggagccaggaaggcaggacatggggtctctgggagagaaagtgtgttcttatagtagttccctgagcttggctgaggagccaagaccccgaattatgtactagttcctggagaaattgtgttttggtgttgtcattcgagggtgaggttagggtgaggggctccattggctgtcctgcccagcactgcatactggaggccctgctgccagtttctgaatcaaatttcttccacaagctgtaggatgagtgtgttgtcctgtaatcttcactgggtgttcagagatgaatgcatctcagacagggaaaggcaacaagggctgctgttatcttatggggtttctcatgtaaaacctggggtgggtcaggcacggtggctcacacctttaatcccagcactttgggaggctgaggtgggaggatcacgaggtcaggagttcgagaccagcctggacaacatggtgaaaccccatctctactaaaaatacaaaaattagctgggcgcggtggcgggcacctgtaatcccagctacttgggaggctgaggcaggagaacccgggaggcagaggttgcagtgagcagagattgtgccactgcactccagcctgggggacaaagcaaaactccatctcgggtaaaaaaaacccaaaaaccaaaaaaaaaaaaaaaccaaaaacctggggtagaagagcccctttgggagagcctaggggtgttgctggtcccaggctgcctgaatggtggggctgcctgaatggtggaagcattaccctaagacccagggtctcagggagaaatgtgagctgccaaagatggtgccttcttgtccagggtgctaggtagtggttgagaaaagagggggtcttcatgttctcaatgcatggcagcctcccttgcctagtgcgcacgggcagactgaagtaggttagagtccactagcacttcctggtgctaccactagggcgtgctgtttgctggagtgtgggttttacccccagcagatttctgtctcaaaattccacggataggacttcacttttcagatgctaccagtcaggaatgaaaccctgtacacttctctctccattccccctcacagttttcccttcctttgtccctccttccttcctttcttttacgtcatattaggacacatgcccaccccttggtgccagtgaatttggtcttaaaagggcaggcgtgatgatgtgtttgtgtttttttttttgtttgctttagaagtgggcaccctagcaatagcagcactgccaagaggacttgtaatcacctcttatccctgcaaagaatgagaaaggggaggggcagccaggaaggagattaacaaactttgttggagcctttcgtctaggctatagactgaaggatgacagaggctttctttctttttaatctagtctgcttacatcttcccccaggtaattcatgtagataattcctgtccaaaagcaaggtctaaggtggcatcggtggctcacgcctgtaatcccatcactttgggaggcagaagcaggtggatcagttgaggccaggagttcaagaccggcctggccaacatggcaaaacctcgtctctactagaaatacaaaaattaggctgggcacaatggctcatgcctgtaatcctagcactttgggaggccgaggtgggcggattgcctgagtttaggagtttaagaccatcctggtcaatgtggtgaaaccccgactctactaaaaacaaaaaagattagctgggcgtggtggtgtgcacctgtaatcccagctactcgggaggctgaggcaggagaattgcttgaacccagtaggtggaggttgcagtgagccgagattgcaccactgcactccagcctgggcgacagagtaagtgtctgtctcaaaataaataaaataaaataaaataaaataaaataaaaataccgaaataaaaacacaaaaattagccaggtgtaatcctagttactcaggaggctgatgcatgagaattgcttga

SEQ ID NO: 11972 - DNA, 2300 bp, Homo sapien
accggtcacctgagcttgggtgtgaggtagagcagacaagaatttcctggatccagggaaagagtgttagatgataggctttttgttttgctttgcttttcccattaatgaaacaaaagtccgtttcaaatcattctaggcctcccagtaaaactgtgaaagccatactttcttctttgcctttaacgcattactgtcaaaaagagtacctccgggtactccttgcttaggagccagagcggcagccaaacaggagggcctggagagcaaattcaaggacatgcgcaggagcctagccacctgggaaatcaaatagataacatagttcattcattcatttattaacccagcaaacatttattaactgtctatgtgagccctgcactgcggggatacagtagtgaacaaagctcttgtgacgcttacattctagtgggagtgctgacagcaaacaaatgacaccgggaatggacaatatcactgggaagcatgttccaggcagggagaacaggagttgcaaaagctgtgaggcgggagcatgcttgctgtgcggccaccgcagggaagccagtgaagctggagtggagtggggaagacagcagggaggcccatgcagacaaggacagcttctctctttctaggacctcccttacgacttggacccgactccagagtgcaattaaggggccggcaagttgggtagcaggctgagagtgtctaaaggacactaaaatatctttggaataattcaggtatttggtgccagtgtactatgatttctgtgtcttggtgaaatatgagttggctttcatccagtgacatagacttattgacaactccttacctggactgcttgtgtctggagtaattttccaacagacaggtgcaaattgcaggatgtagccctggggccagccagctgacagttgcttaaaggcgttagtcacagttgtaattccaaaaattcctgatgcattgtgaatgctgctccctgagggcaagagatttatactattatccacattttaagtggtttactatgcttaccaagaagttgtttgcttcagaagattgcatgtgatgaagatatgtaataatttttttcttttttttttttggactggagtgctcactgcaacctccgcctcccgggttcaagcgattctcctgcctcagcctcccaagtagctgggattacaggcgcccgccaccacgcctgctaatttttgtaaatttagtagagacggggtttcactatgttggccagactggtctcgaactcctgaccttgtgatctgcccgactcggcctcccaaagtgctgggattacaggcgtgagccaccgtgcccggctgatgtgtaataatttctaattttaaatataaagaggcttacacaatttgtattccaggaaaattgatatttcccccacctctgctaagtaaacgttcgacggatgtttaaataaaactggttcgaagggatgccaactcattagtctgcccagggtgccatggcccagttggctcttacctggcgacatatatcgatatcacctgaaccaattagagatctcagctgtgagtgagcttgcttggtgtttaaatgtgtgcttggctgtccccctataagtggtcttccttggcttgcattacctccccttggcttgctttaggggctgaaatggcactgacactcttgagatgggactgcagagtttccttcccctaaccatgggatcgtatcccctctgcagaactaaggatagtacatgagtgggagatgagtaggaaatgggatgagtggagttgcaagaggcatcagaggtcactgtcaatggaggggaaagcttaagtgctcagtaaatgtagggcaacaaggaaggggggggtgaggctgaggtagggaggagaaggagctgagactcaggtatttggtgccagtgtagtagagaaggtgcctggaggcgggcaggcactgaggtcctctgggtctgaccaggcagtcccagctccagcccgtcccctggcccctccccgctgccggccagagtcacacatgtgttttcctgttttccatttcagtccccgttaccctctgctttttctgctcctcagagtcaacagctgttgcagcatgagcgatacgcttggttctcctaactagcaccttcccctctcccctgactcagctggtagcccctcctccccgcacctgcccaaaggtcactggacaggtaagaggtgggagaggagggacaatgggcgagaggggaagtgcaggaggaggatggagtccta

SEQ ID NO: 11973 - DNA, 2300 bp, Homo sapien
tccagccacccgagtagttgggattacaagtgcatgccaccacgaccggctaattttgtatttttagtagagatggggtttcaccatgttggccaggctggtctcaaactcctgacctcaagtgatccacccgccttgtcctcccaaagtgctgtgattacaggcatgagccaccacgcccagccaataggagattttttttttaaggtcaagggcatctccactcagaattcctctgtgcttaccaaaatgtgaaaccccaaaatttgagacaggtctcagttaatttaaaaagtttattttgccaaggttggggatgtgcctgtgacacagtctcaggaagtcctgaagacatgtgcccaaggtggtccgggcgtagcttggttttatacattttagggagacatgaaaatgtaagaagtcacattagttctgtccagaaaggcagagacagctcaaagcaaggccccctcactgggggcccccaggtcacatgtaggtgagagacagatggttgcattattttgagtttctgacaagtctttccagaagaggtagtcagaatatgcatctgtctctgtgagtagacagatgactttggatagaattggaggcagatttgccctgagtggttcccaggttctcagcttgaagaggaccaagatattttcccttcacacctggcagacagttaatgggctcttttgtaggagtttcaggatttataaagcactttcactcacattatcacttttagatcgttttcacaaatgtaacatattaagcatttttaaaattaaaaaatgaaggataaatgacttctccaagacagtactgaatagcaagtgataaaaggaggggagtcgccaatcagggtttgccactttctagtacctacctcacagggttgttgcaaggataatattaagcaatgtgcggtggtagcacttataaaaatggaatgtcacatcttagctccaatacaatacccctttctcaggaaagtcatctttgatggtctactgtagatcaagttcacactataaactcacaaacaacatgtatttcctttcccagcactcaatgacaatattcatgtatgtcatcatttgattgtctgtttttttttttttagttggagtttcactcttcttgcccagactggagtacaatggcgcaatcttggatcaccacaacctctgcctcccgggttcaagcaattctcctgcctcagcctcccgagtagctgggattacaggcatgtgccaccatgcctggctaattttgtatttttagtagagacagggtttctccatgttggtcaggctggtctcgaactcccaacctcaggtgatccgccagcctcagcctcccaaagtgctgggattacaagtgtgagccactgcacctggcctgtcttgtttcttttataccgagagctctatcaggatattgatgtctggttttgttctccataaaatctacgcctaatacagcacttatcacacagaattttttttgagacaaggtctcgctctgttacccagactggagtgcagtggcatgatctctgcttactgcagccttcggcctcccaggctcaagccatcctcccacctcagcctcccaagtagctgggaccacaggcatgcgccaccacacccagctaatttttcatttttttgtagagagggagtttcgccatgttgcccaggctggcccaatttccgattaactctagatttgattacttttcttagtctaggaaaactgtgttacagtgatgcgaggatctgtagaatgacgtggatgttacccctgagatcaaagttactattaatatcaatttcaatgaactagagaccgctgtagggaggttgtgggaactgttcagaacggcttaatctgggaggacacgacttccactgagaatgcatgcgctgaacgacaattcgttttcacctcaaaaacctgtactgcagttttgtctctccttccgtacgatgacccaagatggcggagccgtgattgaaaacccagattcaagatggcgacttcctgcttccccgatagcgtcgcgcgtggccaccgaggccacgcctacttccggctaccccggctactcctgctcagcatggctgctttagggactgttctcttcagtgagtgggtatagatagggaccgtggactcgggggccctttggggacgggcacaggacccctgatccggctgcgcggcctctcccccaactctgctctgttctcccagcaggtgtccggaggctgcactgcagcgta

SEQ ID NO: 11974 - DNA, 2300 bp, Homo sapien
tggcttagtactctcatctctggttccattccagttcagctaagtcttgctttaaaatttttacctcctagctgggtgcggtggctcacgcctgtaatcccagcactttgggaggctgaggcgggcagatcacaagatcaggagttcgagaccagcctggccaacccagcctggtcaacatggtgaaaccctgtccctactaaagatacaaacaattagccgggcgtggtggggtgcgcttgtaatcccagctactcaggaggctgaggcaggagaatcgcttaaactcgggaggtagaggttgcagtgagccaaggtcacaccattgcactccaacctgggcgacagggcgagactccgtctcaaaaaaaaaaaaaaatttacctcctttgcaggccataggactagcccaactatgagaaatagctgttctgtgaacgtgaaaaggggacagcagttttcccagttttggccaggcagtcaagcctttaacagctcatgcacagtttaggccatgtacagctggcatctaataaatgttttcatgaaaaagattttctagccaaggtcccttttttggcaagcatctggtgtcagtcttcctaagattcagatatgtggtccaggaggttacccccactgggaaggctgatgtgggaagaatcatacctgggtgttgcgtgttctgccgagagtggggtcctgaggtctccatggttctgaatgcattccagagattggttgaagaggggcctgtacctcccaaccccagcttgtgtaggaaagccctacataagggctcagccctcagtcactgtggggtaggtagctgtttaataacacacaccatatacctcccacaaacctggaggctccacaggacctgaaaagcttttcattttattgatcatgaatctgagggcaaaagacctttgttttcattacaatactgagcactagacttctattcttctgccacagaagtgcatccctaggatttctggagcttcctacctgacctaatttctgtccaccctcctctattccttcctttgctttcttctcccttcctcctcgcactacctctgtcctctctcactggccaaatgcaattcttggatcttagatttcgctgatagtctagttttctgtctcccacacttttcctgcttctgttgtgcttcttttccagacctgtctagttcccaactcatctgtctccctttctcacggtcagctttatcctgccctctcccttccctacatacctccaccttttgttctgagtccagtaagtccctaaaggagattataactctttaagaattgcctcctttttcagtgtagaggtggaactaaaccccagagtcccaactcccaatcccttcttttacaataatttcacccaacttgatttgctttcccccagatcccacggccttgtacccttttcctcccagcgagttccaattaaaggtgcagccacattacaaatgacaataaaggaatcacctttgtctttctacaaaggttggagccacagatccggtatggttgtggggtttgttgttggtagttgggttatagtttggattttttagcagcagagggagggacatagacagttgtctacagggcccagaagataaccccctattagtaaactggccccttctccctctgcaggtctcatgggcatggaagaagaccccaccaccatcccacactctgagctcctcgttgcccctagccacatagcccccaataattcccaccctgaggtgagacaaatgctgaataccagaggaatcaagccactcagaatatgcttatagggacaaagtctcccacatcccgtcccctggatccccctacagccccctgctgtccatcgcggcctcaacccctgcagatggcagcctgcaccacaaaaaggcaacttagaggtgttttttttttttttccttccagttcttggttgtaattggattcaggctaaaacaaccacgtccccaaccaggaaaggagggcactggggcggggacggaggagaggctgtgggagaagggagggaccagaggagagagcgagagagggaaccagaccccagttcgccgactaagcagaagaaagatcaaaaaccggaaaagaggagaagagcaaacaggcactttgaggaacaatcccctttaactccaagccgacagcggtctaggaattcaagttcagtgcctaccgaagacaaaggcgccccgagggagtggcggtgcgaccccagggcgtgggcccggccgcggagc

SEQ ID NO: 11975 - DNA, 2300 bp, Homo sapien
actcgggaggctgaggcataagaatcgcttgaacctgggaggtgaaggttgcagtgagccgagattgcgtcactaaactccagcctgggcaacaaaagtgaaactctgtctcagaaaaaacaaaacaaaacaaaacaaaacaaaaaactattttatatcatttgtagaggggagaaagtggttaagatcagaatgtgcactctgtccagagccagattccctgggttcaaaccctagcttcatggccgggcgcagtggctcacacttgttaatcccagcactttgggaggccaaggcgggcggatcacctgaggtcaggagttcgtgaccagcctgaccaacatggtgaaacctggtctctactaaaaatacaaaaattagctaggcgttgcggcgcgcacctgtaatcccagctacttgggggggagggggcgggggagctgaggtgggagaatcgcttgaacccgggaggcagaagttgcagtgagccgagatcgcaccactgcactgcagcctgagcaagactctgtctcaaatatacatataggaatagtcaatatactttattgtttagggaataatgacagggaaataaattatgtacatattcaaaacagatgcggctgggcgtggtggctcacgcctgtaatcccagcactttggggggccgaggcgggtggatcacctgaggtcaggtgttcgagaccagcctggccaacatgatgaaacccgtctctactcaaaatacaaaaattagccgggcatggtggcagcgggcgcctgtaatcccagctactcgggtggctgaggcaggagaactgcttgaacccgggaggcgcgaggtggaggttgcagtgagagatcacgccactgcactccagcctaggcgacagagcaagactccgtctcaaaaaacaaacaaacaaacaaaaaaaaacagatgcaattccactcaattcccccaaccccacccctgataatattttccatctacgatcagttaaatctgcgaatgcagaacccaagatatggagggcccactgtactagatcttgggcaaaatacttaacttttctgtgcctgcatttctcggaataccttggaaattggaagtaataatagtatgtacctcacagggttgtttagaggattaaacccgcaaatgcttgtaaagtgttaatgtatttagtatatactaaaatagttcctaagtatttagtaaagtgcttacttagatctgtgcctgaaaagtggaaaaatctaaaattgtttgctatttgttgtgtttattttttcactgaaaattctgagcttcaatattgtttattaatgttatctatcagtgccacaggaaatcggtaacctccagctcacacaaattagaaacaccttctgtgactgataataatagttgctaccagatatggagcacttcctgtatgtcagggaacttgctctccttaaatgttagcaacaaccttaagaggaagttgcactatcataagcctcattttatacctgaggagaacagagaggttaagtaatttcctggaggtcacagccagcaaatggagaaggcgtacttattcatttatttaccatttattgagttcttcctgtgtctcagcaggagagaagccctgtaggtgcaaaggtaaacagtctaggccccagcctacgggaagtttcagtttgcagagaaggggcggggcgggggcgggaatgacgaataaatagttaccgtaccgtgtggtaatagctgtaataaagtctcactccgaaaagtgctgccggatctcagaccctgggacaagaaaagtactgagagcttagggcccaaaggaaagacatcacagttatggaataagcagacgtcctttgacaaacgtgtgacaaacatatgacaaacatgtcctgtaacgacaaacgtgttacaccccaaggattaaacaaagcagggttaaatgtggaagctgaagctgcaagtcaagggcccgtctgacaagtccggcagggccgggaaaggggttaaggcgagcaagtgggtgtggcccgtgcgttgattggcaggggtgggaccgggcttgtcacccgccccggctactccaacccctgggcgggcgggggtaccgcctgggcaagggccggggcgccgggccgagccacctcttcccctcccccgcttccctgtcgcgctccgctggctggacgcgctggaggagtggagcagcacccggccggccctgggggctgacagtcggcaaagtttggcccgaagaggaagtggtctcaaaccccgg

SEQ ID NO: 11976 - DNA, 2300 bp, Homo sapien
gcagtatttcctgctcctcctggttcagtggctggcacaaagcagacgtcagaattgttcgtgatattagtatttactggtgaagctatgaagaatgtggagagaaagagcgaagctagaaggctgtaactctaggctgtgtgtgggcaggggcagatactctgctcctccttgcagagcccagacttttggaaacctcaagcctccaagcggaaggggaagggtgggatgcaaaggggctgtctactacccgtgtcctaccttcctctctccagcttgtgaggaccccccagcagtgctcttagaagtgcagggcaccttacagaggcccctggtccgggacagccgcacctcccctgccaactgcacctggctcatcctgggcagcaaggaacagactgtcaccatcaggtgagaagcagaacaagagcaagaacccattcttctcccctgccccttcccctccattggaagtcttcagggatcacttctttttttttttttttgagacggagtttcactcttgtcacccgggctggagtgcaatggcgcgatctcagctcactgcaaccaccacctcccgggttcaagtgattctcctgtcttggcctcccgagtagctgggattgcaggtgcccgccaccatgcccagctaacttttttgtatttttagtagagacagggtttcaccacgttggccaggctggtcttgaactcctcacctcaagtgatccacccgcctgggcctcccaaagtgctgggattaaaggcatgagccactgggcctggcccattcagggatcacttctctatggaatttccatccttgtcaacaggtaaagagtagaatttgatttggcctagtgtgccctaaaagtctgactttttctgggtcagactcagtgaattgaggtggagctgggctggagtggacatctagcttgagtcctgcgcatctccaaaggacagaggcccctctgcaaacggtcctcagctcagatagaactgttctgaagagtccttccattcattgcatgtcctgcctgagattcagaactactccttaatcagcttagaacatccctcagcctctctggatcttttaaacattccaagtcaccccaggctcccctgaccttggtcattgtttggggatcatattaagtacctggctgtttgcctcacatagttcattttccatgaatttacccagaaaggggtaggcaaagagagagggcaatctgtggagaggctggtggggcaaagggatcagaatgccatggagaaccaatccaggtctcacatctggcacagtggggtgggataagatggtgagttctggttaattgaactgtatggtaatcaccagttactgctggtaccatacttgggtgacagtgctacaacaactggaatgcagtgcacctcttcttaactcagtcccagaacacaagtcaatttttccaaagggctctaggatatattttatggtctcatggcgataccatgaggtattcctaccatgttaggaagatccccattgactacattgacttaaaaataatttggctgccgggcatggtggctcacgccagtaatcccagcactttgggagaccaaggcgggtggatcacctgaggccaggagttcgagaccagcctgaccaacatggtgaaaccccatctctattaaaaatacaaaattagccaggtgtggtggcgggcacctgtaatcctagctacttgggaggctgaggcaggagactcacttgaacccaagaggtggaggttgcagtgatccaagatcacaccattgcactccagcctgggtgacaagagtgaaactctgtctctaaataaataaataaataggctaactgagttttcatttggccatttagatcatggataagcagatgtttatgcttcctgggacacaaggggcctggtggcaccaggggaggagaaagccagcagcagtcaagagtatctcatgtcctgctctcctctactcccataggttccagaagctacacctggcctgtggctcagagcgcttaaccctacgctcccctctccagccactgatctccctgtgtgaggcacctcccagccctctgcagctgcccgggggcaacgtcaccatcacttacagctatgctggggccagagcacccatgggccagggcttcctgctctcctacagccaaggtaggctggacagggatgtctgaggagcaggcagtgaaagccccaggcagaaggggaggatcctgagggttctggtgcttcacagcccct

SEQ ID NO: 11977 - DNA, 2300 bp, Homo sapien
ctggtcttgaactcctcacctcaagtgatccacccgcctgggcctcccaaagtgctgggattaaaggcatgagccactgggcctggcccattcagggatcacttctctatggaatttccatccttgtcaacaggtaaagagtagaatttgatttggcctagtgtgccctaaaagtctgactttttctgggtcagactcagtgaattgaggtggagctgggctggagtggacatctagcttgagtcctgcgcatctccaaaggacagaggcccctctgcaaacggtcctcagctcagatagaactgttctgaagagtccttccattcattgcatgtcctgcctgagattcagaactactccttaatcagcttagaacatccctcagcctctctggatcttttaaacattccaagtcaccccaggctcccctgaccttggtcattgtttggggatcatattaagtacctggctgtttgcctcacatagttcattttccatgaatttacccagaaaggggtaggcaaagagagagggcaatctgtggagaggctggtggggcaaagggatcagaatgccatggagaaccaatccaggtctcacatctggcacagtggggtgggataagatggtgagttctggttaattgaactgtatggtaatcaccagttactgctggtaccatacttgggtgacagtgctacaacaactggaatgcagtgcacctcttcttaactcagtcccagaacacaagtcaatttttccaaagggctctaggatatattttatggtctcatggcgataccatgaggtattcctaccatgttaggaagatccccattgactacattgacttaaaaataatttggctgccgggcatggtggctcacgccagtaatcccagcactttgggagaccaaggcgggtggatcacctgaggccaggagttcgagaccagcctgaccaacatggtgaaaccccatctctattaaaaatacaaaattagccaggtgtggtggcgggcacctgtaatcctagctacttgggaggctgaggcaggagactcacttgaacccaagaggtggaggttgcagtgatccaagatcacaccattgcactccagcctgggtgacaagagtgaaactctgtctctaaataaataaataaataggctaactgagttttcatttggccatttagatcatggataagcagatgtttatgcttcctgggacacaaggggcctggtggcaccaggggaggagaaagccagcagcagtcaagagtatctcatgtcctgctctcctctactcccataggttccagaagctacacctggcctgtggctcagagcgcttaaccctacgctcccctctccagccactgatctccctgtgtgaggcacctcccagccctctgcagctgcccgggggcaacgtcaccatcacttacagctatgctggggccagagcacccatgggccagggcttcctgctctcctacagccaaggtaggctggacagggatgtctgaggagcaggcagtgaaagccccaggcagaaggggaggatcctgagggttctggtgcttcacagcccctctccatggtgcctctgcagattggctgatgtgcctgcaggaagagtttcagtgcctgaaccaccgctgtgtatctgctgtccagcgctgtgatggggttgatgcctgtggcgatggctctgatgaagcaggttgcagctcagaccccttccctggcctgaccccaagacccgtcccctccctgccttgcaatgtcaccttggaggacttctatggggtcttctcctctcctggatatacacacctagcctcagtctcccacccccagtcctgccattggctgctggacccccatgatggccggcggctggccgtgcgcttcacagccctggacttgggctttggagatgcagtgcatgtgtatgacggccctgggccccctgagagctcccgactactgcgtagtctcacccacttcagcaatggcaaggctgtcactgtggagacactgtctggccaggctgttgtgtcctaccacacagttgcttggagcaatggtcgtggcttcaatgccacctaccatgtgcggggctattgcttgccttgggacagaccctgtggcttaggctctggcctgggagctggcgaaggcctaggtgagcgctgctacagtgaggcacagcgctgtgacggctcatgggactgtgctgacggcacagatgaggaggactgcccaggctgcccacctggacacttcccctgtg

SEQ ID NO: 11978 - DNA, 2300 bp, Homo sapien
ttagggaaatcagaagactggcccagtctctaccaagtggtggatttagagccggcatggcttcgttccaaatctcacccttgtcccaccattccatgggacctcccattcctgagggagcctggatacgggcaagtgcacaacccgggaggttgaggttacagtgagccatgatcgcaccactgcagtccagcccgagcaatagggtgagaccctccctctgaaaaaaataaaaatactcattttggaaggaagtcattctaaaatgttacacttgtcttcagcatatctgcaatataataattttctgcataactgaggatcattcacagaaaccaatggcttttctccagcagtgtcttctgaagttgtaacagtaggggcacggggagctatttgcttttatgctaaatgaccttagaccacttataaaatgcatatgagtgctttaaatgttattttgtgtgtgtgtggtgttgcctccctgactacaaggggtcacttgctactctaaatgtgtttctaatctactagtacaggaacacacatggacacgttaaaattgtgaataaaagtaagtaaaaagtaaaagtaagtaggccatgactgaggactggagaatctacccagtgagtaaagcacaggagtattttagcagctgaggggtcctttctgctccctcaaaccctgcactgttgccctatagctgacctccaaataagtgaagtgtcactgcacattgttcccaagattattctttgcctcttccattggaagagtccactgaggatagcaatatagactgttcccaataataggagacagttggaatatttaagagaaggaaagctgcacaatgtagaaatgaaaaatccttggcactggaaagatgtgggtgggattcctggtgttcccattttccagctgcaagattgctttagggacggggcacccacctaccactgtgggccttgggctcaagaagatgaaaggagataatgcaagaaagtacttagcacagcatctggcaaaaacggggcaaggaaaggaaatcggaacgtgtgtctgggagcttaagggtgtcaggaaggaggacaagaaggaaaggggcaggagaaggaacctgaagggaaagggaactgggcagaaaaagaacggtaaaagagatgtgctatctgggcttcctacaaacaggcagacatcacccattgcgtacctgccttgcatagcccagaaggcctggcagctgcaccaaaaaaacattaacagtgggtaggggagttggggggtagctggcactcccccttccccacccacttaagattgggaacctcgtgtttgagatagctagctttgtctcacccttttttcctgctctgattatcgttagcttggtgggcctggcagggagagaaggtggaagagtctccacagtggtttgcccctacctgaacttagtggcaaaatgaagctgcccaaatgaagcagctgaatttccttcctcagagcccgcatctgcctaggggctgggaaatgagtactttcgtggctcttagcccagaagaggcagggtggagaaggaaaaggtggcagggtggctgaccctcagtccccacacctcttttggcctgcatctctttgtctttcagaccagcttttaatctttctgcctcttgcccctgtgcagccactgagcacgctctctgggctagacactgggctaggggtctggaaatacaaagacaaatgatgcgtagtcctggctgctggagaaagaccttcacctccccaggtccctgccttctgtcaccctgagctcccttacccactgacaccccctgcaacccttgtctgttctgccccttgactgttctgtcataactcaaccaagctctgcagtgtgtgtgctcccagagagaagcgacacaaagaaaagggagggggggcagaaaggagggaatcccgctgacatcactgctcattagcatgtgtgacctcatcagggggtgggacaatttccccaggtgtctaggggggagggcatgtgtgtgtgtcgggggggggggtggtatttaaagggaaaagctgacagtgctgctgagtgagggagagggtgctgcgagctgctgggctgcacacgcacacgcacacgcacacgcacactgatgcacacggacctggacacagacatggacatggacacagaaaccacagcactctgcccctctggcagccgccgggcctcccctccagggacgcccacaccaggtgagggctaacctgggcaggttccggctgaa

SEQ ID NO: 11979 - DNA, 2300 bp, Homo sapien
ttacacttaagtttacaagcctctacaaataaacctctacgtaaaaagttttcactcagaaacaaatatatccgtttaagcaaagccatatacaacacaatattttgaaacttgcaatctcactgggtttagtgtctttctagatgtgctaaaagcaataaggtagcaaacactatgcattttcaggctggtagttttttcttttttcttcttttttgttttttttttgtatttttagtagagacggggtttcgccgtgttagccaggatggtcgcgatctcctgacctcgtgatccgcccgcctcggccacccaaagtgctgggattacaggcgtgagccactgcacccggcccaggttggtagttttcaaacgctctcttcatgtcccaacttatgggtcaaggtccactcaatctcatccacatagagtatgttttcttccatcctgctccaaaaacagtattagagacccacaatcacgtcagttcctagacctcgtcatagcacaagccaacagatagaccccactgctaaaggagcagagagaaccactgtcagaccaattcgggaagaattcacgaaaagctggagccccaggggtgatggtagcgccatccccagggtctgatcacttagctgggcacaaacacctacaaactgaaggcagcttaacaaaagaggaacaatgagaacgataaaagctacttgaaggaccaccctccccatgttgtgtagctttaaaaaatggtcctataggccgggcgcggtggctcacgcctgtaatcccagcactttgggaggccgaggcgggtggatcacctgaggtcaggagttcgaggtcagcctggctaacatggcaaaaccccatctctattaaaaatacaaaaattagccgggcgttgtggcaggcgcctgtaatcccagctactcgggaggctgaggcaggggaatcgctagaacccgggagacaggatgcagtgagccgagatcgcgccactccactccagcctgggtgacaaagcgacactccgccttaaaaaaataaaaaaaaagaggtcctataggcaaccaactggcacaatctctgcgggagccagtgtcccagggctcaatcttcatatgtggcatcataatacgcctactggaatgagtgcttgaaaaagttaaatgggaaaagcccataaaggtcaacatagtgaacatgaatcttcgacagactagagattgaggaagaaagctcaattcccttctctctctctgaatggtggtgcgagtggctgaaactgatgatgcgtgtcctctcaggccgcggagggtcgatgctccctctccagtgtgggcgaccctaagtgtcacggctgcagagacccggaaagaaaaatcacaggattctagaaaccgcatctttatcggtgcaagatacagccacgagggtgcccaactctaaaatcgtggcagtgggctacatttaagtagctaacacttccaggtcaaaacaaacaaaggtttttttaatgttaaaagttcgcctgaatctcttcgtgacgccattttctgcccgtgacgtcaggggggaggcgccgtgcagcaacgtcacgcattggtgacgtctggtggggaccgggttttggggtttctcaccagttccgggtccccgcaggggggtcccggttctctccgttcctttgagtatgttgtggggagtggagctcggatagttcctagagtctaggcaagaaaagcagcactgcaggtacagagcctcctcttcccgcaaaatggcggcagctctgccgtcttccagaaccttccccaatctgcgcatgcgccaagactccccggctttggaaataacctcactggtttcgcggcaaccgtccaaagtacaggttctcattggctaaagtcctaagtatgggtggagcaaactcaaatgcgtcttagcaaccaccgagttcccattgattggctaacctcagagactccagaaaatggaagcgtcctttggtagccgcccatcactctctcattggttaaatgacttgcggagggcggggaaaacgggactgaaaacgggagtgaagaagccaccaaccccactcctggtgctcgcgtagactagaccagtgcgatgggcggagccaacgaggaggcacaatttacatccttggccgtccctactcggatttgctgaaggagtcacgtcggtcgttaaggttaagctttgtagagaacagcggcgtttgtttaacgtccggggatgctgaactcgaaatccccgttctgagccggctacct

SEQ ID NO: 11980 - DNA, 2300 bp, Homo sapien
actaggttagtgttccctttcataggtgtttttctgactctgtacatgttcacagctctcaccacacctttgattatttgtgttctgataggcttcaaataactttcatgagggttgggacagtcttgtcatgtttatcattttatctccacacctaccttaatacattgccatgtataattcatagcttcaccctgaaccttcctgtctttcttcttacagcagcccataacggtacgtgaaggccaaaccatctgtgtgcgtttctggcgatgcagcaattccaagaaggtgtggtatgagtgggctgtgacagcaccagtctgttctgctattcataaccccacaggccgctcatataccattggcctctagccctgcgtgccaagtgtccagagccttggaagcagcttcaggttctgctcctgtagtacagaaggtgcagtacatctatgggctgtgattccccttgcccatcagagaggagcatttcaatctgctttcctgccttacatcaaggtgggcaagggattataattaattgcagggctcaagccaccaatctatgaagacctcaggccagggggtgaggaattagtgctggatttgaagctacgcactcagcctcaagaactccctggaatatccctgagaacatggggtttgaacggattttcagcctttttctgttcttgttttgatggttttgtgtaagaggaaatacaaataaagttatagccctttactgcacgaccatgctgccccctgccactattttcccacacctcacttagacccaggcatgttcagatctgtcctcttagcctatccaagacccaaaggggcctagttgtattccctacttaggaagctgagcaatgactattgtagtcctggatataggcctttctgaccagctacagtgagctcttgtccattagaacctacagttaggcttttctctggggaggaggcatagagtttgccaccttggaaaaagatggaatagtgagtgaagccagtttctcttctgtattcttgagctactgcacgggcaactggttacctctcctttgttacctcttgggaagactggaatccatccaggaatctccagcaagaagctacctgttttttttgaataaaaccacagggttacagtttgaagtcctaagagatcatctagtccaattttccattttacagagggggagtttgaaatgggtacaatgatgtgatattagtatccaagtcagaattggaagtcaggtcctccgactctggctctccccatgttataaccagctacatttttggtagctacagtagaccacagaagtgtctaggggctcctggaggcccctggaaagtgagggtggacatcagttccttctttccggttagaggactcagtactgctacatccaaggagtcacctgagaaactttcaaatttacccttgcagtgggaaatgtgggggtactgatttgaacggaagttatgacctgtgggagcaggccatgacgatagggcagagtgtgggccaagacaagtctgtggcaagatctgcttttccctggtcccaagcaccgaggtcaggagaggtggtcgggaaggttgtttaggtagccggctcagaacggggatttcgagttcagcatccccggacgttaaacaaacgccgctgttctctacaaagcttaaccttaacgaccgacgtgactccttcagcaaatccgagtagggacggccaaggatgtaaattgtgcctcctcgttggctccgcccatcgcactggtctagtctacgcgagcaccaggagtggggttggtggcttcttcactcccgttttcagtcccgttttccccgccctccgcaagtcatttaaccaatgagagagtgatgggcggctaccaaaggacgcttccattttctggagtctctgaggttagccaatcaatgggaactcggtggttgctaagacgcatttgagtttgctccacccatacttaggactttagccaatgagaacctgtactttggacggttgccgcgaaaccagtgaggttatttccaaagccggggagtcttggcgcatgcgcagattggggaaggttctggaagacggcagagctgccgccattttgcgggaagaggaggctctgtacctgcagtgctgcttttcttgcctagactctaggaactatccgagctccactccccacaacatactcaaaggaacggagagaaccgggacccccctgcggggacccggaactggtgagaaaccccaaaacccg

SEQ ID NO: 11981 - DNA, 2300 bp, Homo sapien
ttctcctgcctcagcctcctgagtagctgggactacaggcgcctgccaccacacccggctaattttttttgtattttttttagtagagacggggtttcactgtgttagccaagatggtcttgatcacctgacctcgtgatccgcctgcttcggcctcccaaagtgctggggtttttttttgtttttttttttgagacggagtcttgctgttgcccaggctggagtacaacggcatgatctaggctcactgcagcctccacctcccacctcctaggttcaagtgattctcctgcctcagcctcctgagtagctggtattacaggcgcacgccaccacgtctggctaaattttgtatttttagtagagatgggtttctccgtgttggtcagggtagtctcgaactcccgacctcaggtgatccgcccgcctcgccctcccaaagtgctgggattacgggcgtgagccactgtgcccagcctggccttcatggtgcattttttaaatgctttggtttttccgactttcctttcctcctccccctgccccgacattattttgctcttgttgcccaggctggagtgcagtggcgtgatcttggctcactgcaacctccgcctgccgggttcaagcagttctcctgcttcagcctcccgagtagctggccgagtagctgggattacaggcgcctgctaccacgtttaggagagacggggagttttcatgttggccaggctggtctcgaactcctgacctcaggagatccacccgcctccgctttccaaagtgctgggattacaggcgtgagccaccgcgcccggccggttttccggctttcattcttttggggcacttgcattgcacccagggttccccagaacttatcctaccccacacccttttcgtatttcctatggctctgtccccaacgagctatggtgatctcagtcgcatggcctcagttcttttcttctagcgacctccatccaactttctattacacagcgccccctagacgttcaattcagcatgaccaaacccaaaccctgatttcccaaaccctctttccgcatttcttgctcactgcatggacagaatcctaggcatcaccccctactttgctttctcaggactccttgccagtcggtccctaagttctgccagcggcgcctgcgtggggtctcttgtaccgtgttctcctctccatccttgctgccgagccctcaacaccagtgggccccctgccttctggagttcccatttacctccctatgtctttccttgcttccttcctttccatctctagcagctaatgacatgagaaaatgtagattctctctggcctccatgccagccaatttcatgactgctgcccactgtaattaatgaattccttttctctatcttgaggtgtgtgtgtgtgtttaggcgtttatttacaccttttgtgtttgaaacacaaaacactacttcctagaatcactaggaagtagtagctgagttagcagtttattttaatatgtaacatagtaaggtgacaaagctcattttaatagcaccagccattaacccagttttctcagtgttcatatggacgtaaataatgacacaagaaaaacacttttgagggtagttacgggaaaagctgacattacatggctgcataacccaaccgactcaggatctgataatgaaagcgtgaagataataaagaagcatcaagctgcgaaaggaaaggaaaattacaaaatgctcacgcagcgaagctgcgaggaaccccaccgagccagccaggagtcgaacctggaatcttctgatccgtagtcagacgcgttatccattgcgccactggccctgagatggcactgtttctctccgtgatggtacttcaaggttatactgcagggtttcatgggcggtgtagtctctcaacggcgttcttcagatagactaagcattctgggagattgaagttcgtcaggaaccagaccctgagattggtggatccatgccgtacgccactgtgcagcccgcggattggcaggaaaagccactccccatccctcctgttcgggagctgtggcagacgctctggttgttaaggcgactcgtcccgccttctggggcactagtttgactttgtgattggctactagtatcaaggaatcccggcgtggacagcgcgaggagaaagatggcggcgatggcggtcgggggtgctggtgggagccgcgtgtccagcgggagggacctgaattgcgtccccgaaatagctgacacactaggggctgtggccaagcagg

SEQ ID NO: 11982 - DNA, 2300 bp, Homo sapien
tctctcagcacacctaacggagattcctttcctatcactccaggctatcaccttatctaatgtaaaagatgtgatatacttggcacagtttacttagtattgcatattttctttttgtattttttttttgtagagatggggatcgtctcgccatgtggcccaggctggtctcgaactcctgggctcaagtgatcctcctgcctcggcctcccaaagtgctgggtcaggcatgagccactgcaccccgcctaaacattttctttatttttaatttttatttatttttaatttttttcgagaccgagtctcactctgttgcccaggctggagtgcagtggcacgatctcaggtcactgcaacctccgcctcctgggttcaagcgattctcctgcctcagcctctggagctaattttttgtatttttagtagagacgggggtctcaccaggttggccagcctggtctcaaactcctgacttcacgtgatccgcccgcctcagcctcccaaagtgctgggattacaggcgtgagccaccatgcccagctctttatttttttaaatttatatttttgaaataattcaccgaaggtgtgggtgggagtgagggttgggtttaaggttaagacaggtgggccgggcgcggtggctcatgcctgtaatcccagcactttgggaggccgaggcgggcggatcacgaggtcaggagactgagaccatcctggccaacgtggtgaaaccccgtctctactaaaaatacaaaaaaaattacctgggcgtggtggcgcccgcctgtagtcccagctactcaggaggctgaggcaggagaatcgcttgaacccgggaggtgaaggttgcagagatcgcgccactgcactccagcctggcaacagagcaagactccgtctggaaaaaaaaaaaaaaaaagattaagacaggtgaaagatatttggccgggcagattgcttgaggtcaggagtgcgagaccatcctggccaatattgtgaaactctgtctctactaaaaatataaaaattagccaggcgtggtggctcgtgcgggtaatcccagctactcaggaggctagggcaggagaatcgcttgaacctgggaggtggaggttgcggtgagccgagatcgtgccactgcgctccagcctgggcaacaagtgcgaaactccgtacccccaagaaaacaaacaaacaaacaaacaaaacaggcgaatgaggaatgcgcgctaatagggagtctgtggtgggaattcgagaggaaggtgaccctgaggaagcactgtatggtgcccggcatgggctgggctgggctgggctgggctgggcggcagcgcctcagagccaggccttagtgaggagactcgcaggacgcggcttgggtggcaggtctgggaaggttccttccgagagctattgggacaggtttagaccccccaaatggcgacctcgaacttaaccctttgtgcctcagttctccccctctgtaaaatgagtataatggtgactttctcacaggacgctttaagaactaaacgaggcctggccgagggcggtagctcacgcctgtaatcccagcactttgggaggccgaggcgggtggatcacgaggtcaggagatccagatcatcctggctaacacggtgaaaccccgtctctactaaaaatacaacaattagccgggcgtggtggcgggcacctgtaatcccagctactcgtgaggctgaggcagagaattgcttgaacccgggaggcggagcttgcagcgagccgatattgcgccactgcaccccagcctgggcgacagagcgagactccgtctcaaaaaaaaaacgaggcaaggcaagcaaaatgcttggcgtagtgcctgactcatcgtaggccctcaataaatgttagcaattaccaccattttctcagcatctgcccttcactggggaggcactaatgagaaggggcaaaaaagcctttccgagaccatcctgtttcccagtccgggttccaccacccgagcatgcgaacccagggcgttgggaacccagcgcgcacccgtcgaggggcggggcctgccgttcccgcctcgagtgtggccccgcctccacctccttcgtcgcggcctctagtgcactttcggctccttccccttcccgggcctttcagcttggtctttccgggcctcgcttcccccagcccctgcgcccggcccgaacgagaggttccggagccccggcgcgggcgggttctggggtgtagacgctgctggccagcccgccccagccgaggttctcggcaccg

SEQ ID NO: 11983 - DNA, 2300 bp, Homo sapien
gcctgtgtagtcttttctccccaacagaaactaagcatctgaatgccagggaccatatcttcgactttctccaggtttccttaggtagtggtgctgtgttaagcacaaaacagatgctcagaaaatatctgttgagtaattaaataaacaagaatggatctgctcagccaagatcttgctgcatctcattactcgttatcttctctactcagaagggagcccatcaaagggagactgtgacccctggcacatcaggaaagggcagtcaggaaagcttgggaatccctggttttgacctgggggagtagagtgtgacacttttctcttctcaggcacctgtatcaagtgcaacaaaggcatctatgggcagagcaatgcctgccaggccctggacagcctctaccacacccagtgctttgtttgctgctcttgtggtgagtgtagccccaatactcaagcactcccctcccctgcccacatacacacttacaagtgctatggggaacaggaggagagcttgtgcctcttcatttgctcacagagcagctgttggatccccaccaagtgtctggaggtccgcagctgctctgcctctcttgcttccctgtctgtcctctacttggctctccctccgcctggtgggtcccctttctggagtccctccttccttcctcacctctgtttctccctctcgtgcttccctgcttgcccatcctggacttgcctggccctccagcttcttggtggggcttggtcttgggcagccaagttgcctggggcgacagtgaaagactggaatgtggggagggtgggggcaggctgggggagtggggagctgtttggggcggagaggggggttttctcttggctggtcagagttcagccacctcactggagtgcaggccaccgggccatgccaagctgatgacatcacgctccaggaatgcctgccactgttagctcaggaggcccacttggaaaggggggatgctcccagcggccttaactgcccccctcccctccctcattaccccctccttactgcttacccattctgattcctttgctaaacctttaatctcctatctctgcctgtctgacttcagcactcagcttttctcactcccccagtttctgcctggttctctttaggctcatctgtctgtctatccttctgtttacagggcctcttctggctatatctctttccctatctttcctcccctgtgtctcatgagcttctaagtcagctttcctaacccactggacagagttggaagtagggattttgaggggaagaaggcaaaggtgggaaaattgctcatgctccacctgttctcactccttccctatccctgataatgtagacacctgggagcagttcctgggggttggtcacatggggaattgtcctgccttgtctgctggaagaagatcctgggttgtctcttaccccagtgactctgggtccctctaagcttagggaagcagccttatacaaacaggagaggggacctgctttgcttccaaacaaagcactttgtccttctgcagtaactccagtcctgacctccatggagtctgtccctggaaggagacaggcatttgagagcaggatagatatgctcaggcaaagaggcttctaggttgaagggtcccagagggaaaggcctgttaacaatgtggttctctctatgcaaatcatatagcaccttattaagagctcacgtattccagcacgtagttggctttactctcccaggtggcttcctatgcactggagaggaaggcagtttgtttaggggaggggccctagaaaactgttaaggaggcaggagctggaggagcagcaagcagaggagaggggaagttggctggaatgaagccaaagcaaattggaattgcatcagatggaatttttgtgcggggaaggacagacagcagttaggaggaaaagcacaaagtccaggtttaaatatattatgcagcagcggggagcagtgaccccagaagtcttgcacctgggctgtgggataggttccagccccttctctattgtttctagggcgaactttgcgttgcaaggctttctacagtgtcaatggctctgtgtactgtgaggaagattatctggtgagtaagggtcacctggacctggaattggtttccatactgacccccttcttggtggcccattggagtaccacccatcattctcagtttgataacagcctccgttcgtcttgtcttttactttagttttcagggtttcaggaggcagctgagaaatgctgtgtctg

SEQ ID NO: 11984 - DNA, 2300 bp, Homo sapien
aggcccgttgggatctgctccccaaagacaggccctagccctcactcatgggcctggaattggggagtggagggagggaagaacacacccaggaaaggcaagtcccagagccaggtgtatatatcttagtgggggattttggggaatagcaagcagttcagttctgtattcttcccatgatagaaggtgactaggaggcatcaggggctctgctactctccctgctttcctgttcaaccctggttcctggaacacaccctgcattctcagcagccacctccccacaggaatcatgctcacatggtcccctctgcacggagccctctgccaagccagatccttttctccatccttggaagtctgcagtggagagaaatcattctataactgaacagctcgtttgactgatgggaaactgaagtcccagagacgatttctgggcctagcctgctttctctagaaagtattttcaagtctgctgctgagcacctgtggactggcatctttgaccgttcatcctacacactgcaacagagatcataccttgcctgtgtagtcttttctccccaacagaaactaagcatctgaatgccagggaccatatcttcgactttctccaggtttccttaggtagtggtgctgtgttaagcacaaaacagatgctcagaaaatatctgttgagtaattaaataaacaagaatggatctgctcagccaagatcttgctgcatctcattactcgttatcttctctactcagaagggagcccatcaaagggagactgtgacccctggcacatcaggaaagggcagtcaggaaagcttgggaatccctggttttgacctgggggagtagagtgtgacacttttctcttctcaggcacctgtatcaagtgcaacaaaggcatctatgggcagagcaatgcctgccaggccctggacagcctctaccacacccagtgctttgtttgctgctcttgtggtgagtgtagccccaatactcaagcactcccctcccctgcccacatacacacttacaagtgctatggggaacaggaggagagcttgtgcctcttcatttgctcacagagcagctgttggatccccaccaagtgtctggaggtccgcagctgctctgcctctcttgcttccctgtctgtcctctacttggctctccctccgcctggtgggtcccctttctggagtccctccttccttcctcacctctgtttctccctctcgtgcttccctgcttgcccatcctggacttgcctggccctccagcttcttggtggggcttggtcttgggcagccaagttgcctggggcgacagtgaaagactggaatgtggggagggtgggggcaggctgggggagtggggagctgtttggggcggagaggggggttttctcttggctggtcagagttcagccacctcactggagtgcaggccaccgggccatgccaagctgatgacatcacgctccaggaatgcctgccactgttagctcaggaggcccacttggaaaggggggatgctcccagcggccttaactgcccccctcccctccctcattaccccctccttactgcttacccattctgattcctttgctaaacctttaatctcctatctctgcctgtctgacttcagcactcagcttttctcactcccccagtttctgcctggttctctttaggctcatctgtctgtctatccttctgtttacagggcctcttctggctatatctctttccctatctttcctcccctgtgtctcatgagcttctaagtcagctttcctaacccactggacagagttggaagtagggattttgaggggaagaaggcaaaggtgggaaaattgctcatgctccacctgttctcactccttccctatccctgataatgtagacacctgggagcagttcctgggggttggtcacatggggaattgtcctgccttgtctgctggaagaagatcctgggttgtctcttaccccagtgactctgggtccctctaagcttagggaagcagccttatacaaacaggagaggggacctgctttgcttccaaacaaagcactttgtccttctgcagtaactccagtcctgacctccatggagtctgtccctggaaggagacaggcatttgagagcaggatagatatgctcaggcaaagaggcttctaggttgaagggtcccagagggaaaggcctgttaacaatgtggttctctctatgcaaatcatatagcaccttattaagagctcacgtattccagcacgtagttggctttac

SEQ ID NO: 11985 - DNA, 2300 bp, Homo sapien
tctcctcaggatcagagaaaagccgtggccttgaccagggaaacagaggctgattctcaggggagatgaggtcagggagacaatgcaactaggacgaagaagccaaatagtttggcacaaattaatttcccaaaagatattaacctcgtttctttccacattccctaaggctacactaagattataaaaggtgttcaaaatgttgagatgaaaataatatgcatgacttgtttgcatataattttcatactcatttactatctaaatacaaaggagtcattttccttctccattctacttcctccaccccttgcccctgatgttttagtctgggcaaaagtagttggctggtttttaaaaaatttttttgagacggaatctccctctatcgcccaggcctgagtgcaatggcacaatctcggctctctgcaacctccgcctcctgggttcacgcgattcttctgcctcagcctcccaagtagctgggactacaggtgcacgccaccacaccggctaatttttgtattcttagtagagacggggtttcaccatactggccaggctggttgcaaactcctgacctcgtgatcccgccgcctctgccttccaaagtgctgggattacaggcgtgagccaccgctcccggccgttggctggtatttaattaggtatgtttagcttcatctagggtttctttaaaaaaaattattatttatttttgagaatttttttgagacggagtcttgctctgtcgcccaggctggagtgcagtggccgtgatattggctcactgcaacctctgtctcccgggttcaagcgattctcccgcctcagcctctcgagtggctgggactataggcgtgcgccaccacgcctggctaatttttgtatttttagtagagatagggcttcaccatgttggccaggctggtctgaactcttgacttcaagtgatccgcccgcctcagcctcccaaagtggtgggattacaggcgtgagccaccgcgcccggctgcttcagccagggtttcttttccttattcttgatccttttaaaatagtcaatatcagcctcttttccatcctgatcattttcatttgcaatttcctctacacggcatttcttttcttcctcttaatacttactctgtatcaccagtcttctgtggaccaaaaccaaagggagaaggtgttcgctagccctaaaaccaggccttcgatctccacagtcacctgaaatgagaaaaatctcatttcccaacaccagggggtgtctatccctctaactgtcctacccttaaggtagagattagtcccaaaccttttcctcactccttttcactgcttctacatacacactatatctctttccctccctctcaaagtagagattagtcccattttcctgactccttttcactgcttttacaaatcacaaaacttttgggtccagaaggtggtgcctttttattgcagtttatctgtttgtctctcattctctctggacaagcttgtcctttcctttgtctgcgcacccttcggtctctgcatcgtccacactcctctttgctcctcagctctccctttctttcgctacctcttccctcttccacctctctctgtgggcttcgtcgcctttcagggctatctttacgtacacgtctctgaacctctttatgcatttgtcttctttctctctgtcttcctctttatggctctctccttgtctcaccatttctgtaccagtctctctccatctctcccacagtccccacgctgggaacaaagtcacggtgctagcgcagaacatgcctcctgtcgtccggtcccgggacgcgacacattccaccatgcccctccgcgcattccaactgcagacaaagagtccccgtcccctacccccacactctttcctattccaattcttcagtgttgtaggggcagctgccccaactgcccctgcccgcctctcacgtccagtccgcgggtctccacatccagggcagttagcgccttccgctgcacgcacaccagctatccctgcgcggacacccccggcgctctcgcacacaccgcgctccgcccccctaggaaagtagatccggccaggcagacaaaagtttgggagagaagttcggtctgtggctagcgtgagagctaggggggcgggggccggggagagtggggcagtcgggcgagtcgacgcgtgaacagatagacctgcggactggacagccgcggccagagaccctgctagccccgctcagccccagatgcgcggggggacgcagcccctcccg

SEQ ID NO: 11986 - DNA, 2300 bp, Homo sapien
gccaaggtccaggcgaggttgggggtcgggggtccggcggccctcagggccccccccgcccccaactccggggttggcgcctcgggcgcggcgcgtgtgcttgcgggcggggcgccccgcggccgcggacggccaatccgggagggcgtccggggaggggcggggcttgccggctcgggctccgcgagtcctcctttttgcacacacacgaatacaaagagccatacgaccttcgggtatcctttttccattttttttcctccttaatcttgtgtgtgttttcaaattttttaaaaatagagatctgtagcagtgttggggtgaggaaactgttgctaaggggaatttgctctttcccccatttctttttctgtctctcttcctctttctttttcctggtcaaggttttaaatataccaagaagttgagaagcaggatggccgtgtacaaccgtttccggccaaatttatagtttttttttcttttttttaaatcacattttaagaactggtagatttttgtggttgagggactttaaaaatttagccgcttgggaagtacagaattttttaagcgggctgaagggataatgtaaatttctgccacaggcaacatcgaaggaagcagagagatttgaggctccctcataaagccgtttgcgtgctttttacacacccacccccccagaaccaaaaccaagtggctgggatgtggcacttgtccaaggccaataagttaatattgggatattataatggagacattcatttccctagggaagggggaaagaccttaattacagtgtgtctttcacacacattttcattagaacatttgtgtgtgtgtgtgtgtgtttcttgaaacaaatttgtaaagttataacttggggttatttgtgtatatgtacaatatgtgtgtatatgtgccatatcagattttattttcaaaagtgataaatatatctggttttatgtgtgcaaagtatcccctaggatgtgaatttttttccgttgtcttcccaaatgtgatcaaaatattttgtgtgcaaagcagagcttagaagaaatcctatgcttagcatacttaggcactttctatgtgcatttactatatttttctgctcctaaaggatcagaataatgaataattaaataattgccaaggagtatatagtccatgtggcaaatgagagtaggcaatttattgaatctgtggttcaaagccttcagtgactgttttgcctaagtggttttgctttttattgtctcacgttcttaagtgtacagctgtgtatattttggcctttatgtgtggtttggttggtgtgttcagaagggaagttctttcttggctttttgacaaaatggtcgtttattggttggaatattcgaaaagctccacagctggcaaagtatcaggaaaaaaatccagtcaagtgtaattctcaaaaactgttcatggtgatggtgatggggagccaagaggatgcaaaggcaaataatagaagggataagaaatgccttttggttatcatgttgcatttttagaatggaaagcttctcatttctaagagtcacagaaaaaagtatatgaattagagaaaaacaggctcgcagagcagaacctcctgttataggagccctattttcacttcattctgttacagaatcactatctcctcattagaagttgtatggaaaatatctgtatccaaatttgtattcgcagattggagtgaaagcataggaggtatatgaggtgctgagggagaaactggaatgtcacaaatgcagtgacaaccaggagacaaaaaaaaaaatctactgtagaatttaaatttcattacaacaaaacttctgtataataatgcatttctattacacagctagcatcctactctatttcaagcagtatttgactcctaaatactgactgcaataaagttacttgtacaaatttataacaaaagtggccctgtttgggctttctgggtttcttacttgtgctgagtgtatttttattctctaacaattcaagtcagaccagtgcttaataaatactggctcgactgtggattattccacaatttcagacctgcatttctttgaaatctagtcacattttagtgatctttgtgatcacaacagtgatgggagttttttttttttttttttttttttttgaaacggagtttcgctcttgttgcccaggctgcagtggcaatggtgcgatcttggctcactgcaaccttcgcctcctgggttcaagcgattctcctgtctcggcctcccgagtagctg

SEQ ID NO: 11987 - DNA, 2300 bp, Homo sapien
gatccgcctgcctggacgacagagaaagactctgtctcgaaaaataaaaaataaaaaaaaaaaataataataataatacctaaattgatgcacataaagtgttcagaacagttacttcctgcacaataagtgttcacaaattgctacttactatagaagggaaattcttgtgagatgtgagtttcagaatctgtgttttagctagaaaagaaattcacttatttgatcataaatgatttttggcccggcatggtggctcacgcctgtaatcccagcactttgggaggctgaggctggtggatcacgaggtcaagagatccagaccatcctgactaacacggtgaaaccccgtctctactaaaaatacaaaaaattagccagacttggtggcgggcgcctgtagtcccagctactcgggaggctggggcaggagaatggcgtgaacctgggaggtggagcttgcagtgagccgagatcgggccactgcactccagcctgggcgacagagcgagactccagctcaaaaataaatataaataaataaatgatttttttggtcagtgtttactaaatatctacaattatgccagctactgcagtaagaatcaaacagttcctggatggaaaaacaattttaagatatgatcactgacctcaaacagtttactggagtgaaattactaaaatatgtgaatcaaggtagagttacgtgccgctaactggagtacacatgaaattcatgttgatgggagcggagagaaggaagtaagcagtctgtgctgaaagagaatggataaaaattgaccagtcagggaaggggagacgcataattcaggccaaaaaaaaaaaaaaaagccacttgagtaaaggaataatacaagattgataagacgagcgtagagggaactaagaacaaatatgtgcccaggcgcggtggctcacgcctgtaatcccagcactttgggaggccaaggcgggaggataacttgaggtcaagagctcaaaaccagcctggccaacatggtgaaaccccgtcactacttaaaaaaaaaaaatagccgggcgtggtggcatatatccgtaatcccagctactcgggaggctgaggcaggagaatcgcttgagcctcggaggtgggggttgcagtgagccgagatcacatcactgaaaaaaaaaaaaaaaaggcagggtgggcacatcacctcaagtcaggagttcaggaccagcctggccaacatggcgaaaccctgtctctaccaaaaacaaaaaaaattagctgggtgcagtggcgcacgcctgtagtcccagcttcttgggaggctgaggcaggagaatcgcttgggcggggtgggggtgggggtgggggtgggggcggaggggcggagtttacagtgagcgaagatcataccactgcactccagcctgggtgacagagcgagactctgtctaaataaataaataaataacaaataggtgggtgggaccagattatgggtggcttaaaatccaggtataccagctgtcttcctggaaataaagaggagccactttagttttgagaatgtggtctgagccaggtagataaactgggagctcgggctgaagtgtaagacttcagaaagatgttccatacgtgaatgttcatttaaacgtgggggtgttaagcaacacacgtgacccagagacatttcacctggaaaccggagtagggcccacgcaccaagtccctgatgtttaattgcagtctagaatgttactgactagttcactcaatttaacaaagtgtccggaggtcgctcactggattgttatgctggtgactgggccttgtttcactgagaaaaaaagatgggaaagggtgacaggacggtgagaaagtgaaagggagagaggtgggaaaggggtctgccaaggtccaggcgaggttgggggtcgggggtccggcggccctcagggccccccccgcccccaactccggggttggcgcctcgggcgcggcgcgtgtgcttgcgggcggggcgccccgcggccgcggacggccaatccgggagggcgtccggggaggggcggggcttgccggctcgggctccgcgagtcctcctttttgcacacacacgaatacaaagagccatacgaccttcgggtatcctttttccattttttttcctccttaatcttgtgtgtgttttcaaattttttaaaaatagagatctgtagcagtgttggggtgaggaaactgttgctaaggggaatttgctctttcccccatttctttttctgtctctcttcctctttctttt

SEQ ID NO: 11988 - DNA, 2300 bp, Homo sapien
ccggtaggagataaatgtaatttctaaccaggtaaaatgtaaaagggccttaagagaggtacacatgctatcagtggcagagtgaaaaaccactggaaggaggcagaaagactagttgcactgcaggggtgactgcaaaataatatatgctcagtaaacagacgcactccgcattttccacatcatccaagtgtgaaacacaaagatctcctgtttaattctattctgatgattgggcttggaaagggttgccaatttcagcattaaaaatacagcataggccaggcgcagtggttcacacctgtaatcccagcactttgggaggccggggcaagcggatcacctgaggtcaagagtttgagaccagcgtggccaatatggtgaaaccccatctctactaaaaatacaaaaattagccaggcgtgaggccgggcacggtggctcatgcctgtaatcccagcactttgggaggccgaggtgggtggatcacgaggtcaggagatcaagaccatcctggctaacaagcggatcacctgaggtcaagagtttgagaccagcgtggccaatatggtgaaaccccatctctactaaaaatacaaaaattagccaggcgtgaggccgggcacggtggctcatgcctgtaatcccagcactttgggaggccgaggtgggtggatcacgaggtcaggagatcaagaccatcctggctaacacggtgaaaccccgtctctactaaacacacacacacacacacacacacacacacacacacacacacacacaaattagcctgttgtggaggcaggcgcctgtaatcccagctactcgggaggctgaggcaggagaatcgcttgaacctgggaagcagaggttgcagtgagcagagatcgtgccactgtgttccagcctgggggacacagcaagacttggtctcaaaaaacaaacaaacaaacaaacaaaaacaatacagcatatgcagagtctgctgggggaaagatggggccgaactgggcatcagaggaaagtggaatttcggtgttgatagatgttgctgctagaatccaacaaggaaggccagagactgacttcatagaaccataaagcaggaggcaacatttcatacatatgcacacttcccggtttgttatagttcccaaaagatttgaaaaatgaaggtgggtggagggaggaagaggcaatgaaatatagtatgttcctgaataaaaggcatcatcttagcaagttgaagttagagaatctcttggtacatatttatgcagtctcaaccgtcctcccgtctctgagatggtaaattactactgacacttattcaggtctgaactgagaatctagtttgtggattaactggaccctttgctttttcttcttccatctgccttttaggcaattcattacttattcgaatttccaccagaaggtaggagtcaagagaacgaatattggatattaataaccggttactgttaaagaagggttgctgtatggcgactgacaacaagaggtatagcacttttattttgttgcgttgttttaccactaattgctgtggtttaactaatatagggaaatggcctcagaatggatcattattttacccaattttagaaggtgcccttaaacaagatggcaacctcaggcgcgttaacaaggtgctgaagcagcagcgatgtaacctgttgcttggacaccaggctggagtgggaggactcaccgctaagggttcagaaccgattttcaaccagtcacgcccttctcaaagatggccgacctcacttcccttacgcaacatggacgttttcagtcacttcctgtgattttgaggttattctgatccaggactacttgcatgaccaaagccaagatggcaggtacgtccttttagaatttaaggttagtgaagccatctatttccccgacccccttcagtgaaaatggtctttcgcatctggcccttctttttggaggcgtgcttgccagcagtcaaaatggctccattccggaatagatttaataggaagtgaagctgtgacggcgaggcgttgcccggcctatctttgctaggcgttctcagaattagttctttctgcccacactagacatggcgcttgccagcgtgttggagagaccgctaccggtgaaccagcgcgggtttttcggacttgggggtcgtgcagatctgctggatctaggtccagggagtctcagtgatggtctgagcctggccgcgccaggctggggtgtcccagaagagccaggaatcgaaatgcttcatggaacaa

SEQ ID NO: 11989 - DNA, 2300 bp, Homo sapien
gtactacagcctcccagacctctgatgggatgtgtgtgtgtgtgtgtgtgtgtgtgtgtgtgtgtgtgtggtgtgtatatgtgtctgtccaccccactggtgctgtgcatggcctctatgcatgaaaatgcattctatgggcactgggtgttgtcgggggatgtggcaccacattcactatgcatatcaaacatttgcttcatgtacattgcatttgttttaaatgttgagtgtacattggatatatggtatgaatgtgttttgtatattcatggctgttgtctgcatgcaactcgtatgcaccttccctctgtctttcatttatgctgcatgtgccctgcatgtgggttattgtatatgtgtatcatgggtgcggcattcctgttgaatgtctattgtgtatcgcacatatcttgggtactacatgaatattgtatgcacttggtattgttccattcattctgcaacattgttttctacctgtacattacatgcatatttcatgtgtttcttgtgcatgctatatgcttcatgtggcatccatgcccatgcaccacatatgttacgtgtaaactgtgtggtgtgtgtgtggcgtgtatgttttggtgttctgccttcagacagttctgcacaggcctcgcgcgtgcaagtggccatccagaccctggatgagaatgacaatgctccccagctggctgagccctacgatacttttgtgtgtgactctgcagctcctggccaggtgagcaactgaggcagaggggttgggacgtccaggcctccagcagcccactccatacaaggcctctctcttcttcctcccagctgattcaggtcatccgggccctggacagagatgaagttggcaacagtagccatgtctcctttcaaggtcctctgggccctgatgccaactttactgtccaggacaaccgaggtaggtggcctcctacagccatgtccatacctgcctctgtccccttctcctcctcctccacccctagcccagcctgcctgacccctgccccacctgcctcggccttctacccaacagaagatgggtgtggacttgtactcattcgttggctctttgtaaaccttccccatgggaagctggctctatgggctggacctatgggctggctctatgggaagctggctctatgggctggacctatgggctggctctatggggggctggctctatgggaagctggctctatgggctggaccaaccctacctggaaggtgtcccagaagatacctcaacaccttccctctcccacagatggctccgccagcctgctgctgccctcccgccctgctccaccccgccatgccccctacttggttcccatagaactgtgggactgggggcagccggcgctgagcagcactgccacagtgactgttagtgtgtgccgctgccagcctgacggctctgtggcatcctgctggcctgaggctcacctctcagctgctgggctcagcaccggcgccctgcttgccatcatcacctgtgtgggtgccctgcttggtgagtcaggccacagtggtacatagctgtgcgatctgggcctgcaggggtgtggagaagaaccaggcctctggacacagggaaatccaccttagggcttgaacgaccctcatacctggattttcccaccacctgatgcatccaagagaaaagctctggcctctatccgtgacctgccaatccataatgacaatgacaagccataacaatggtttactgagcccctactctgtgccaagtatagtgctgggcacgtcacttgtgatatttcattttattatgtcaacaacccttagaagtaaatatattttccctattctccacataagtaatctaaggggcaaattgaggcttcagagaagtctagcaacttcccatggtcacatagcgagtaagggctgaagtcaggattcaatgcaaggtttgctagatgtcagcccctaagcacagggcttctgtcacctgatgggtcagcctttcacatggagacaggccgcccgctcccggccctgctggctcagggcctgtgtgcgcgcctctcgcgcagccctggtggtgctcttcgtggccctgcggcggcagaagcaagaagcactgatggtactggaggaggaggacgtccgagagaacatcatcacctacgacgacgagggcggcggcgaggaggacaccgaggccttcgacatcacggccttgcagaacccggacggggcggcccccccggcgcccggccctcccgcgcgccgagacgtgttgccccggg

SEQ ID NO: 11990 - DNA, 2300 bp, Homo sapien
atgtggatatctgaatgtgtcagtgaaggcctatatgaatgtgcacatgtgggtatgttctcagccatgtgtataattccaaatgtggggaaagtatgtagatatacacaaatatatatttgtgggtatatatctgtaatggatatatatgtgtttactgttgagtgtacagaattatatttatgttaattatgcatatgtgtgattgatatatacagtggtatgcacatgtagctgtttgtatgtgttttgtgtatgtgggtatttgtggacagataatttattacttattgtttatcaggcactattcatcttcaaaatggattcattcatttaatcatcaccacaactttatgagggaagtatgattatttcctcatttttaaacaataaactcaggcaaagagaagttaagtaacttcccaaggtcacatagagattaagtggtggagctgtgagatccagtcagtgtgcagagtctgagctgttatccccaccgtactgcctctcaaatgtgtttaatgctatgtgtctaggtttatgtttctatacatgcaactgtgtgcatagtagatatgcacagatactacctggcagtgcacgtgttatctgttagtgcatggatgtctgtgtggatggccgtgtgtgtccgtgtacacacagtatgtttttggctgcttatatatacatagctttgtgtgtgtgtgcgtttctagtcactgtcttctcattctcctgccaaatcctgctcctacccgcacccagacatcacctagcagtgctgggcccttaccgcagggaagaagtagacctcctccccatcctgtctctggggtatcccaatccttttagccaggcgatccactcagcctcccctgcccatgctgcatcctcagcccctttccccaaggctagtcagctatccctctgcctaggggaaagactaaaggaattgggagacctggcctaagagaggtgacagggagacacactttgcattctctcttggaaggcactggcagtgagaagcaaggtagggtagtggtagggagtcacctgatgaagggatgggtaaagatggggcctgtgtctggctgtggtacccaggctggcctgggctctgcaccctgtagatcatgcagcacctttctacccaagataagtgatgctcactgctgtactacagcctcccagacctctgatgggatgtgtgtgtgtgtgtgtgtgtgtgtgtgtgtgtgtgtgtggtgtgtatatgtgtctgtccaccccactggtgctgtgcatggcctctatgcatgaaaatgcattctatgggcactgggtgttgtcgggggatgtggcaccacattcactatgcatatcaaacatttgcttcatgtacattgcatttgttttaaatgttgagtgtacattggatatatggtatgaatgtgttttgtatattcatggctgttgtctgcatgcaactcgtatgcaccttccctctgtctttcatttatgctgcatgtgccctgcatgtgggttattgtatatgtgtatcatgggtgcggcattcctgttgaatgtctattgtgtatcgcacatatcttgggtactacatgaatattgtatgcacttggtattgttccattcattctgcaacattgttttctacctgtacattacatgcatatttcatgtgtttcttgtgcatgctatatgcttcatgtggcatccatgcccatgcaccacatatgttacgtgtaaactgtgtggtgtgtgtgtggcgtgtatgttttggtgttctgccttcagacagttctgcacaggcctcgcgcgtgcaagtggccatccagaccctggatgagaatgacaatgctccccagctggctgagccctacgatacttttgtgtgtgactctgcagctcctggccaggtgagcaactgaggcagaggggttgggacgtccaggcctccagcagcccactccatacaaggcctctctcttcttcctcccagctgattcaggtcatccgggccctggacagagatgaagttggcaacagtagccatgtctcctttcaaggtcctctgggccctgatgccaactttactgtccaggacaaccgaggtaggtggcctcctacagccatgtccatacctgcctctgtccccttctcctcctcctccacccctagcccagcctgcctgacccctgccccacctgcctcggccttctacccaacagaagatgggtgtggacttgtactcattcgttggctctttgtaaaccttccccatgggaagctggctctat

SEQ ID NO: 11991 - DNA, 2300 bp, Homo sapien
tgatccaggccaaggacatgggcggccacatgggggggctgtcaggcagcactacggtgactgtcacgctcagcgatgtcaacgacaacccccccaagttcccacagagtaaggggccattgctgccacctgagccatcctttgatcaccccacccctacagtgtctggagaaaccttccctcctcgcctcctccccagccagatcctgggagaataaagtgctgtggggagggaggagggctggggacctctctgagaaggtgtctcccctctgtcatcccaaggcctataccagttctccgtggtggagacagctggacctggcacactggtgggccggctccgggcccaggacccagacctgggggacaacgccctgatggcatacagcatcctggatggggaggggtctgaggccttcagcatcagcacagacttgcagggtcgagacgggctcctcactgtccgcaaggttagcctcctgcctgttaatgctttctcttagacctgcctcctgccgacccacagggcacatatttaactgttcttctagaacagactcaggatctctctgttggagcttagagatcatggtcacctcctcatccttcagatgaggccctggagcttagaaagaagaagtgatagcaagtctatgagggagctaggggcagacctagagttcctaagtaatctgctgtgcatcctgaccaccaaggccactgtccctccagtgccacctctcctcacatgaggactgagcactgcatgcatgtgaggaggggacttgtcaccttccaagagcctgggacctgccctggtttccacatgcctcactttttctccctctcccctcaccatagcccctagactttgagagccagcgctcctactccttccgtgtcgaggccaccaacacgctcattgacccagcctatctgcggcgagggcccttcaaggatgtggcctctgtgcgtgtggcagtgcaagatgccccagagccacctgccttcacccaggctgcctaccacctgacagtgcctgagaacaaggccccggggaccctggtaggccagatctccgcggctgacctggactcccctgccagcccaatcaggtaggtgagctgggatgtgggctggggagccagatggcaggctcttcccacccagagaatgagtaaatgtgccccctaccttatagcaaatcactcatatcccagcaaaagcctccctccctgcagctgggcttgctggtctgcaggcctgggtgccaggggagagccggagggcctggctgaccactcctcaaccgtctgtccacccctctgggtagatgatggtggcccctcccagtggcagtgcaagtggatatagtctcatttgataagtggatctctattgatcattcccaaagtgcttcacagtttacccccttgctgacactgaattctcacaacagccctatgaagtaggtgttctcatcaccacttgttttagaagccagccataagtggtcacacagttggtaagtggcagaacagccactctttccccctccccggccagcatccctgtcacagctctgtgagggaggtactggtgtcattcccacttttcagttgagtaaatagaggttaaacaatttgccctaagtcacatagccagcccaaggcagagcagggctgaaacacatgtccctgggttctcagaacagggcccagaagtctgagagtcaaggtctgtttatcccgcttctactccattctgtgtcttctccccctccccccgtgaaacccagtggccctgagtcttaacaggtgtttaatggtggtgatcccccagggatatatgccttttaaggggactccaacctgaattatggctctacccagaggagtcatgaggtctgacaaggtgaacagagggaagaaagaagagagggggtggaacaagctgtggtcccgccccagatcagccccagcatgtctctcccttccccagatactccatcctcccccactcagatccggagcgttgcttctctatccagcccgaggaaggcaccatccatacagcagcacccctggatcgcgaggctcgcgcctggcacaacctcactgtgctggctacagagctcggtgaggactccagggcccacaaggcggcagcagcctcctggccgaggagctgtccctgggtgtgggggtggagaagggtgctaactgccatcgcaccctcaccagcgtgcggccactgagtcctagcctggatctgagtcctagcctggatccaagtcc

SEQ ID NO: 11992 - DNA, 2300 bp, Homo sapien
taccaccagggggcggcagctcctcgctctgttggcccctgtaaccgagcttcccaagaagggttccactgcccgcctccgacctcccgccgatgtcgtgcctctgttcccgacccgctccctgggcccgggcctcggactctctggacccttctgccgtccttaagtgtcccccagctgacctgctaccgtgctttgcatgggctctcaaaacgccgccgccttgcagctgggattccatccacaccagtcccaaaagccagccgggaaccgggagcccggagccgggtctctccgcagtgggctccgaattccccacctcaccgcgcgctcgcccgttttccgctgcgggcggggactggcagcttcgcgctcccgggtgcacccgccccgccagctcttcggaaatggcctggcgccgtggcctggacgtcctcccgcccgagtgccctgccgggcgctgcgggcccggtccgggaggggcgccgcatctgtatgcgccccgcagcccaggagcgccgagggggcggacgcgcggcgccgcctccgcccccgcccccgccgcgcgggcccggctggccggggagggtcggaggctgggctctcctctcccgcgcggcgcggagccgcctcgctcctccgcaggcggagtcttcttcccccgccccctccgtctcgctcccttgttctcgccggggccgctcagacctgcagcggagccgcggcgcccgctccaatcggctcggggctgtgcccccgggacccggcgacgggggcgggcgggggcgcttcccgccggcctgggcccctcggcagtgccaggtaagggcgcctgccccggagcaggggtcgggaatccgcggaggggtaggagggggcccgcagcctgcgggggtcttcggaggggtgcgctccgtggctgggagcccgctgccggctcccttctcccgcgctctgcctctttcccttctcccctcgcacctctctccctctttcttctctcgatttctcttcacccttccttctctgcctgtttgccttccttatcccttccctctgtctccccaacccttccctctccctcttgtcctttttccatctcctctccctctttgcctttttctttctctacctttctcccctttcctgcctttctcttttctctttcttgctctcctttccctccctctcctctccccttcctgctatcctgtttcccactcctctatccccttccttctcgcctcctcatcccgccttctctctggtccccagccttcctccggtttcccccttccctcgggagcaaagggactgtcaggtgtgtgtctgctctgagggaggaggggcagaagccacagctacctgaggggtcctcccccccgcccctaggagaaaggagagcagtgggaagggtctcctctctagctcccttcccgtggcccctccctgcctccacccctcctgtctgctccttctcccagaattaagttcccgaggcctggcttgacacccccgaagctgaggtctgcccctgcctgcccggaactgcccccggtgacccgtttccaagcctggcccctaggactcctctctgccttcagacacccaggctgctgccctggtctctctcattctgtctcttgccactgttctgtttctgtctctcatccagtcatttctctgccggacagtccctgagtcagtctagccgtcagtcattatctgtctctagcctctgggtggacctctctccccggtcacctccccctgtcccccaccctgtatcctcttccttcagctctggctcccaactcctgtctcacgagcccagtcccccttcaaggactgcactggcagcgtgggctggagacagggcctggagagtggggctcccccttgtggggagggactttcacagactctcagccctgcctgaggctgcactccttgtcatctcatgctgaccctagacaccttaaggccacacctccatgaatcccaactccgtaattttaagccctttctctggtagccccgcctcctccaatacctggctacgtgcccaacctgggaggacagagaccagatttgggattccaagccctcccagcatcccctctcctgtgttcctccccagttctctactcagagttgactgaccagagatttatcagcttggagggctggaggtgaatacatgcagagcctgggtggaggaaggatcagcctctctgctctctgtcttagtctgagttctgggcagtggagtgtctggttccttggaggtctggtcttca

SEQ ID NO: 11993 - DNA, 2300 bp, Homo sapien
aaagacaggatgcagttgttgagcccccaaccccttcctgtttaactgaaaagctgaccctgagctaggaggcagggtccaggcacaaatggaggctgtgaccaggactgagctgcctattctctgcctttcctacctggctacagatcgttcagaaagaggcagagcgggccgaacgggccaaggagcgggagaagcggcgaaaggagcaagaagaagaagagcaaaaggagcgggagaaggaagccgagcgggaacggaaccgacagctggagcgagagaaacgtcgggagcacagtcgggagagggacagggagagagagagagaaagggagcgggacaggggggaccgagatcgggatagggaaagggaccgagaacgaggcagggaaagggatcgcagggacaccaagcgccacagcagaagccggagtcggagcacacctgtgcgggaccggggtgggcgccgctagctgggaaaacactagagctgcaggtaccagccactcggccccagggggttatggccacagagggataggcacagtctccaccaccctggagccaagggtctttcacatcacctatccctacatacataccaaatggaaaagtggccatccttttccccccaaacacacccccttaacctatctcttgggacttagcccgaccctccctctcatttcccattaagtctgagaggcaagagctaggttaggcaaggaggtggttggccagagatggggaacagccaggtgccccagtcctctgatttttcctccatcctgcttaccacctccctgggtacttacagccttctcttgggaacagccggggccaggactgggtcacctatgagctgaatcagcatctcctcctgagtcccagggcccctgcagttcccagtctcttctgtcctgcagcccttgcctctttcccacaggttccactttatatccaccttttccttttgttcaatttttatttttattttttttattattaaatgatgtggtctatggaaaaaaaaataaaaatctgacttagttttaaactgtgtgagtggctttctttgggcaggttaagaagccactgtggatatctgagcgtggacatctgaggatatctggagtaggagttgctctcattccatgtgttcctttaggctgactgcttcctgcttattgaacttcccacgtcttttatcccctgccttggccctgaccaacccaaagctgtggaccttcctcattcgggaaggcatggagcaacctgtgtccgtggcggcaccccagcagggctaggagggtgggtcctcttctggttcctggtcctgtgcacggttaaattaggggtttggtcacctgcctgccaccttggtgcctcccacaactaccaccagggggcggcagctcctcgctctgttggcccctgtaaccgagcttcccaagaagggttccactgcccgcctccgacctcccgccgatgtcgtgcctctgttcccgacccgctccctgggcccgggcctcggactctctggacccttctgccgtccttaagtgtcccccagctgacctgctaccgtgctttgcatgggctctcaaaacgccgccgccttgcagctgggattccatccacaccagtcccaaaagccagccgggaaccgggagcccggagccgggtctctccgcagtgggctccgaattccccacctcaccgcgcgctcgcccgttttccgctgcgggcggggactggcagcttcgcgctcccgggtgcacccgccccgccagctcttcggaaatggcctggcgccgtggcctggacgtcctcccgcccgagtgccctgccgggcgctgcgggcccggtccgggaggggcgccgcatctgtatgcgccccgcagcccaggagcgccgagggggcggacgcgcggcgccgcctccgcccccgcccccgccgcgcgggcccggctggccggggagggtcggaggctgggctctcctctcccgcgcggcgcggagccgcctcgctcctccgcaggcggagtcttcttcccccgccccctccgtctcgctcccttgttctcgccggggccgctcagacctgcagcggagccgcggcgcccgctccaatcggctcggggctgtgcccccgggacccggcgacgggggcgggcgggggcgcttcccgccggcctgggcccctcggcagtgccaggtaagggcgcctgccccggagcaggggtcgggaatccgcggaggggtaggagggggcccgcagcctgcgggggtcttcggag

SEQ ID NO: 11994 - DNA, 2300 bp, Homo sapien
tttgagatggagttttgctcttgttgcccaggctggagtgcaatggcacgatctcggctcaccacaacctctgcatcctgggttcaagtgattctcctgcctcagcctcccgagtagctgggattacaggcatgcaccaccacgcccagccaattttgtgtttttagtagagacagggtttctccatgttggtcaggctggtgatccgcccacctcagcctcccaaagtgctgggattacaggcgtgagccaccatgcccagccaaaaaatttttttttcaataagaaaacttttaggttagcaagcatttagtaagtgtccacttggtacccacaatgacaccctaattcagaaatagttagggaacattactttgtgttaggccctgggctaggggccaagagatgcaatccctacccttgaggaattatgcagggtagagatggggggcagataaagtagcagttattatacagagtgataagggcattgctgaaaacctgtcatgccaatcactgaatggctttgcctcagaaaacaagcagtctactcttttgaggaaactcagagccccagaggtggcatcagatgagataatggcctattaagtgtgcatgtattttacatgtatctgtaccttcacttggggtgtcctccaagccagactcttaagagctaacacttaactacactgttccatgaaataggtattgtcactatgcccactttgcagattacaagacagatatacagaaccaggaacttgcctactatcacacaacttttaacagagtggggctagccagtctgactccagagtcttcactcttaaccctgagcagacagggaccactatgtgaaaggaaacatttaaagtaatgtataaatatggccactttagcatgcagttggcattgtaagtgtaagattttaagcagcggggagaaaatttcattcctagcttaaaagctcaaatgttacacgagacactgagctttggttctcagaagtttatcttagtgtaaacttctactgccactaggacacaaaaggaacatctctgcagtcaacaaataagcattttgagtatctactgagcactttttgaactattagcatctgtttcccactttggtctagtgaagattcccatgattaatattttctgcttagttcccagtcgctttctgcccagctgatcttccccgccccatatagcagcactctcacttcactgtcttatctactttagagcctcaccttggagcccttgcttcaagaagtggccttcaagcttcagctacccaaggtccccttgccctgtttatcctttctttttctggcccgagtggaccctggggcagggtgaccttattaaagactctataaaacaaagttgtctgtcatctcttcagagacaccaaccctgccccccttctactggtatttgaaaaaagaactctccctgctatccacttccctccaccatccctgggaaaaggacatgttggagtagtaacacgtggtcattgccggggtgagcagccagttactgtagtgattggatagtgacaattcccatcccacctccctacctgcagcatctgactggttggtctggtttcagtgttccatgcctagattactggatagaggatggtaggcacataaaacattgctcatgccccaccctctatccagctttcattaccatccttctttaatcacttttcaactttggctttatcgttcttatttaatcctttttcactcccacctctactgtttgcctgccttctattctctctattttctagaatcttccaatcaagcagctgtaactttacatgtcctccacccagccccctcccctgccccctgggaagaccaggagggagcactccagccctggggggttaagcctctgtagctgctgtaacttgagaaaagaaggccaggcctctggagccagcagtcggctccctgtggcctgccaaaggataagaaccttgctcactcagctccctccctcttttctttcccctcccctgctgcagcaaggccctcccccatccgcacacacaggctgctgggtaagtggcaagatggctcccctgcatgtctccggctgatcgctgccgctccgccaatacaatagagccagccactaccagcagcctggccctcttcctccttctccagagagaccaatccagccgaactcggggtttgccgtgaggacttaacgcttatctcttaaaagccagatctgttttagcctccccgcaccaccaccacc

SEQ ID NO: 11995 - DNA, 2300 bp, Homo sapien
tgtagtcttttctttagtgtagaagtcaaagaaaccgatacagatatgtcttgataggctcatatgctataattggttggatattagaaagcctgatttttaaaaagccatgaatgagtcttcacttcatgaatctgacttgattctttttcattcaataggaaaaagctcctcaatttctgaagagaaaggtgactctgatgatgagaaaccaaggaaaggagaaagacgatcatctagggtcagacaggtaactcagatacctcctaaagcattacctcttcagtaatgctttggatatcttctcttcttcagacttgttttgagtttgtatgtctctacatttaggggttttgtttttcttttttgggacagagtctggctctgtcgcctaggctggagtgcagtggcacaatcacagcttactacagcctcgacctcctaggcttaagcagtccttccacctcagcctcccaaaggattgggattacaggcatgagccactgcctggcctctagatttctttgtggttatcttccttctcctctttgtcatctttttgttgttcgttttgtctttttatttagatctgctctgccttttagatttctaagtgaatattttttaaaagtttaaatttgaaaattagcaggctgctctgtattcttaaagcacattattagacaagatatgacataattaaccattcaatcaaagctttaaagttatataacactaagtgggcagaatacaaaaatgttatgtgtagtgtaattatgactgtacaaaggaaatgattagaggaaagaacaaaaagaaatataccaaaatgataaaaagataatcgtattaattgatagtaggttagttcctttcagccccctatccacccttttactttccagatgttctgctaatattttactgaaaaaaaaaaaaagggggtgcttgaagctaaaatttaaactacatacaagtagcttcattgtgatatttcttttggtcactttgttttgattcccctaagggctacgttagtcatgattgtctcctgtcactcctgtttctgttgctgaaagtatatatcattgaatttctccttcctaggggtgtcttcattagatactttctctcctctgttgactgtgagcaaatacatttggagccattgtgtatctgttctttcaggcaagagcagctaaactgtctgagggcagccaacctgctgaggaggaagaggatcaagaaacaccttccagaaacctaagggtcagagcagatcgaaatttgaaaacagaggaggaagaagaggaggaggaggaggaggaagaagatgatgaagaagaggaaggtgatgatgagggacaaaaatctagggaggcaccaatcctgaaagagtttaaggaagaaggggaagagatacctagagtaaaaccagaggagatgatggatgagagacccaaaacaagatcccaggaacaggaggtgttagagagaggagggagatttacaagatcccaggaagaggctagaaaaagtcatctggccagacagcagcaggagaaggaaatgaaaacaacatctccccttgaggaggaagaaagagaaataaaatcttcacaaggcttaaaggaaaaatcgaagtctccttcccctcctcgactgactgaagatcgaaagaaggcctcacttgtagcgctgccagagcaaactgccagcgaggaggagactcctccacctttactaacaaaggaagcatcttctccaccacctcatccacagctccatagcgaagaagaaatagagcccatggaaggcccagcccccgctgtcctcattcagttatctcctcctaatacagatgctgacaccagggagctattagtatctcagcatactgtccagttggtaggaggcctgtctcctttgtcaagtccttcagacaccaaagcagaatctccagcagagaaagtgccagaggagagtgtcctgcctctggttcagaaaagcacactggctgactactcagcccagaaggatcttgaacctgagtcagacagatctgctcagcccctccctctaaaaattgaggaattagcactggccaaaggaatcactgaagaatgtctgaaacagccatctttggaacagaaggaaggcagaagagcttctcatacccttctcccaagccacagattgaaacagtcagctgattcatcctctagccggtcctcctcatcttcctcctccagttctagatcaagatctcgctctcctgacagttcaggttctcggtctca

SEQ ID NO: 11996 - DNA, 2300 bp, Homo sapien
caaagacttggatttttcctttaagtatatgacacattataatgaggggatttttaaaagctgaaagaaactttaagagactgtgcagcctaataatttttggattttaactgtggaataatttaaaaattttatgcagaaactcaatagttaaaaagtagatctaatctagtttaagagaggagtatgagccttgcttacttgggaaaaaggtatttcccctaggaagctccccaaagcagctccacaaaaccctaagagaacagttataaacccatgggtttagtctgtttctcatattacagataaggaaatggagaagaccaaggcctccaaaggttgtttcttatcctaagtaaagaggtattagtaatgtttatgagtaagtgcactgagttagtagttaacactagtaatggtgggtgacttacacaggattgaacccttggaaaatctacatcaacaagagttcttaatcagcaactatttccctacactgccatattggtgatctacttcatatctatactcaaagacatcaactacctttcctaaattcatggcagataaatgacttcagatctctgtactacacgtaattaatggaagccacacctttctacacatgccatttcaattattataaactaacagtgcctctgattctgttctttactccaggcccttgtatacaactgggttgattagaattcaactgtcctggtttgagaacatttctgactaagagaacttaggaaaacagtcatgaggacttaagcatcaaatatacaacaccacgtccttccatgtgtctggatatccaaagggcccactccattgaatacaccttctttctcacctgggaatttggctggaatgcagcatggggtgttgagtgtttctgtaaattttctagcattagagcctggtatagagaagggtaaaagtcagaaatgatgaggaaaaaaaagaaaaacaaacccccacctctaccacaacctctaaattaaacgcaatgacttaaatacacacaattaaactgtattccttttccagggacctgaaaaccctttactaacactgttctcattcatcttcagaagacccataaaggtagccatggttactgttactaaatgtacagatataaaatgcaggcacacagaatcagtgacctggctatgtcataatatcagtaatagaaccagtactaaaatccctattatcttctgcactttcgccaagtgccccttctaaatctgatcatgcatgtaaaattacttaaaatactcaaaccagccatggggctcctggtttttgcctgacggaattacttggtcaaagggttacccagtaccagggtcaatttgtataatttccagtactgtggcacctagatttatcaaatttataaaattttcaaagaggaagctacagaagaaaatgaccacagaccctgtaaactgtggtctaacctagtctatccacacaaacacacacacacaaacacacacacacaaaactatcagcttctgtataagcaacggtctgccaactcaaccctggagccaacccagacctaatctgcactacctgccacgtatcctgttgaactctaattaaaaccaagacatcctcatcttcccttctttaaaccaaacctatacacttgaatcgagctacacctacctcatgacaatcccaccttaatctactcaaaccgattcaaaatccccaatatatatcaacctgcctcgcctctctcaccaatattcaccaaactcttaaccacccaaattgccactagatgccactaaattagagacctctctctcatcaagtcccttcaaataaaggtctctcttcatctcacctcctcatctaatcgagcagacattttaccctaccccagtcctattcgtgcagataccgataccaaccccatccaccccttcgcgcaactatacccctaactccgacccagcccaactcgcccccctcaggccagcaacgccgtaggttgtagtgggatttaactccttctgcagcgcatgcgccgaaaccacagatacaaacaaggagggggtgggggaaggaggaaggagcttaagacactcctggagagtagtgcacaccctcccatttgggctcgcgctgctgccgttaaggcgggaaccggcgcgatctccattccagcgcgaacctcatcaaccaccgtgcgcgcggatccagaggctcgcgctggcggcctgagcgagctcgcgccgagcccggatactgcgcctgcgccgcggcagagg

SEQ ID NO: 11997 - DNA, 2300 bp, Homo sapien
tacaacaccacgtccttccatgtgtctggatatccaaagggcccactccattgaatacaccttctttctcacctgggaatttggctggaatgcagcatggggtgttgagtgtttctgtaaattttctagcattagagcctggtatagagaagggtaaaagtcagaaatgatgaggaaaaaaaagaaaaacaaacccccacctctaccacaacctctaaattaaacgcaatgacttaaatacacacaattaaactgtattccttttccagggacctgaaaaccctttactaacactgttctcattcatcttcagaagacccataaaggtagccatggttactgttactaaatgtacagatataaaatgcaggcacacagaatcagtgacctggctatgtcataatatcagtaatagaaccagtactaaaatccctattatcttctgcactttcgccaagtgccccttctaaatctgatcatgcatgtaaaattacttaaaatactcaaaccagccatggggctcctggtttttgcctgacggaattacttggtcaaagggttacccagtaccagggtcaatttgtataatttccagtactgtggcacctagatttatcaaatttataaaattttcaaagaggaagctacagaagaaaatgaccacagaccctgtaaactgtggtctaacctagtctatccacacaaacacacacacacaaacacacacacacaaaactatcagcttctgtataagcaacggtctgccaactcaaccctggagccaacccagacctaatctgcactacctgccacgtatcctgttgaactctaattaaaaccaagacatcctcatcttcccttctttaaaccaaacctatacacttgaatcgagctacacctacctcatgacaatcccaccttaatctactcaaaccgattcaaaatccccaatatatatcaacctgcctcgcctctctcaccaatattcaccaaactcttaaccacccaaattgccactagatgccactaaattagagacctctctctcatcaagtcccttcaaataaaggtctctcttcatctcacctcctcatctaatcgagcagacattttaccctaccccagtcctattcgtgcagataccgataccaaccccatccaccccttcgcgcaactatacccctaactccgacccagcccaactcgcccccctcaggccagcaacgccgtaggttgtagtgggatttaactccttctgcagcgcatgcgccgaaaccacagatacaaacaaggagggggtgggggaaggaggaaggagcttaagacactcctggagagtagtgcacaccctcccatttgggctcgcgctgctgccgttaaggcgggaaccggcgcgatctccattccagcgcgaacctcatcaaccaccgtgcgcgcggatccagaggctcgcgctggcggcctgagcgagctcgcgccgagcccggatactgcgcctgcgccgcggcagaggctcgtctctaccgggtccgctctcctccgacaccccagcaacgccgactcctcacccctttgagccgcttgaccagggcactcttctgcccgctcttggctaggcctcgctgctccagtgcggccttcaggtcggtcacccgcagcgcctgaagaggcttcccgtccagagtcacctcctccagctccgccatcttgcgtgaggtactcgggtccgtcccgacggcttcgggcatcttcggtaatttccgccaacgcccttcgaacgtaccgagatgaccccgcccactgccatactctacccctcgattaccactcagaactccccgggttcctccggatgtcctcggatgtttccgtctccacatcgttaccaatcaattctttccatccgccctgcagcgccccttttctcgccctgctttcaggctcggttttcttcgtcttgccgaagctttgaatcgaatatattcggaaaccctcgaccctggtataaccataatcggagatgttcgtttatttccggacctagagatgaggcgctggggcgcttgggtgtttggggcgggtccgaggccggaagtgcgtgggctgccgggctggcccagcttagggttttcaggaaatttggaagctgccgcagtagttggagtctaaggactcgtgacaatcttcgggtgcccttcgagagaaaaggggaggtaagcggggtagaagtacctctatgggccgggtcagactcggtgtttgcggattaccttaatagggcaagccccccactccttaac

SEQ ID NO: 11998 - DNA, 2300 bp, Homo sapien
gagggtaagagagatgggaaggatagtggcattgaagaggatgactccagtggcatcctgaaacataaaagcactgttatatgctctccaggtagagcaacgaaaatacaactttcaagcaacaagacatcttaccacactcaattagcatctacagagaaaattactttttatgaattcaaagacccaaaataataagagtcctttatttagattattatccaactaccttagaaaaatcaccaaaaataacttcatttcctatttgcctgcctttttcaaacccattcttccccacccactgtcttcctccatctttcttataaagaacctaaaaataaccaatatatttcttgttcattctcttcctcttacttctatgtgccaggttgggtaaagaaaaaaacaatgattaatgttggtccattacatcttctccaaaatgaaaatgcacacattttaaaatctagtacgtgcagctggtcaaggctgatgctaattgttttgcagctatcaacagtgggggaagaaagaaaaaacattatttatgatgaaagagccttcaatgtgcatataagcctctgaaatatgccaacaactccataacatccgttacctccttacatttcctgtaaagcaccaggaaaagttaaaaagcagagtaaggaccttgctcaaaataaggtaacgcatgaaagaaccagaagcccgggtgtttgagacgttcttaaaaaagagtccagttggtttgttggcttagagatctaacaagtgttatactattttatgacaatccatgtctttaaacaattgtccttaatatttagtatgggccagacgcggtggttcttgcacttccaaagtaatctcagcactttgagaggccgaggcaagaggatcgcttgagcccaggtgttcgagaccagcctgggcaacatggcaaaacctcatccctacaaaaaataaaaaaattagttgagcgtagaggtgcctacctgtagtcctagctacgtaggagactgaggtaggagcatcacctgagcccgggaggttgaggctgcagtgagccctgatcgcgccactgcactccagcctgcgtcagagtggagggacccagagtggagtgacaaaaaaaaaatttttttttttttttagtatggtatctattggtgccttgcaattttttttttttttttttttttttttgagacggagtcttgctctgtcacccaggctgtagtgcaatggcgtgatctcaaccactgcttcctgggttcaagcgattctcctgcctcagcctcccgagtagctgggactataggcgtacgccaccacgcccggctaatttgtttgtatttttagtagagacggggtttcaccatattggccagactggtctccaactcctgacctcaagtgatccgcccgcctcggcctcccaaagtgctgggattataggcgtaagccaccgcgcccggcaccttgccactgattttgcatcatgaatgcaacggaaagatcagccaatttgactttaatagttttcagtctcttaaatctctaacgtatctcttaaatctctaaactatttgtctgtgacctattttactgtttgtgtttcttctgcatcaagttggaggattggtagtgacaaagaaagaagcccctaaacaattaatattagttcaagtaccaaaaaagttcagggcgcttgcattttccagttcttgccctacaggaagcagttcctccaagggaacttactctcttctgcggagcaaggaagaactttcccagaatcttgccacatggcttccaaggcaaactcaaactcaagttcagcgtcatagatcagttcatagtctgggtccgaagacacggcgatgcttcttgcgcacccccacggagcttgttattccgattccgcaccagccccccgcccctccccaaaaaaagcctaagatgggagtggctatgattcagaggacagagggcagaagctgtttgcgttaaggagtggggggcttgccctattaaggtaatccgcaaacaccgagtctgacccggcccatagaggtacttctaccccgcttacctccccttttctctcgaagggcacccgaagattgtcacgagtccttagactccaactactgcggcagcttccaaatttcctgaaaaccctaagctgggccagcccggcagcccacgcacttccggcctcggacccgccccaaacacccaagcgccccagcgcctcatctctaggtccggaaataaacgaacatctccgattatgg

SEQ ID NO: 11999 - DNA, 2300 bp, Homo sapien
agctccccctaccctaccctgacatccagagccctgcctgccccagccaaacccctgttactgggaaacactgaggtcagcatgccagcaacgtcagcactagccggggaggccagggcagagatttatctcaccatggctaaagctgctgactttctcatttcctgcggctctgtttgcatacctcccacatcctcctgtgcccagttcactgaagctactgatgcagacttccccctccccacggtggccaaatgagggccaggaaggttctccgagtcacatagcaaccccttcccatcctttcagccagagacgaaccaggcatcctccttggatgaccttgggtagctcagcctctcagccttgttttccctgtttataaagtaggaataaaaatactgtctgccttgcctaccttcccgcataacccacagggaaagagcatgaaaaagtgtaggtttcaaggattgaaaaagcattaatttatcagaaagcacaaggcctattcattatcattatttcaaagtaggggagggaacagaatttctcctcatggagacaaggccctggacccagtactggcaggctgctcattctccctggaactgcactgcaagaccccatcccagccaggtttcctcttcctccttccagatgccccgcaggagcctgccgagagccagcgctgtgagaggctgccctctgctgtccacctgagtccggaccacagcagccctccgagtccgaaatattggggccaatattgccacctggtggtcaacacaagcactgccaccaaactgagagctcagctttgaaatggagaaatctccctaattcctgacatctgtctctgggttacacgcagatctccccacaccaggtcactgtgctttcagataaagcatatctggccatgtctcaagtcatgcacagagagcatctggggtaggtgttggggtagggaggatgtaaggaatatgctaaccggaatatgctaatcagaatatgcatttttaaaattttaatgttcaatgcgacacacatcctctctgcacttgtcctactgtggcccactcacagtgaaccaccccttgtttggcccaacttacaaaaacttctggtccctctggggcacccatagcacttgctggtcataaaagagtcagtaacatttctatgtgtccttccccccccccccccaactggacctacaatcccttttggagatgaaattcaacaggtaaaagcagtaccagagcaggtgtctctgaaaggaggtagtggggagttcccaaaggaaagagaaaagggaagaggagagccagcacagaacaaagaattgcagagagggagccatgggcttctcctggagaccctaaaacagagccccaggaagaggtgatgacataagaggcttctcaaacctcacaagaggaagtagacccaagagacacgcattggagatcagagagcggccatgcaaaaggaaagacagcaaacgagctgcagcaagctcctaagccctgcagcccaggcacaggaaaccagaggcagagcctcaggcccagggtgaggggcgaagcaccagcctgagcctcttgcagcacagagcagctggaagagagaagtgctggagccaccggaggattatggctgtctactccgagggcagcaacctgcctaggcctgcggtgcaaggcccaagtcctgaccaggtgctttggccaagcccagggagttaggaagtgtaccaggctgctagaggtagctagggctggaaacgcactaacatgtgggctattgcacagctcctgtgcaaaaacctagcaaatgagcatgctctggagcaccacgcaggctcgcgtgtagagcttgttcctaggacctatcactactccctagacccctcaaaaaacaaaccctggcctacactcagagaatgctctgggaggtggggctacaaaagaaactttctcttgggggtaggtggagcccagcagcaggggagagccagaggaaggcgtgtcaagggaggaggtgagacccaactgagggtaggcactggaagagggctttctctcttcactctaacttggaacctcattctgcatagaactttttcaaagtcggagggaggaggttgctcagagtggggtgttgccctctgcgaggatttggagtcccctggcctcccagcagggagtggagaggcattcccagaagcatcagcttcgggcatctccagaaccctggcttggtccctgaccaaggagtgtccccaactgctgaatagg

SEQ ID NO: 12000 - DNA, 2300 bp, Homo sapien
gatcacgaggtcagcagttcaagaccagcctggccaagatggtgaaaccccgtctctactgaaaatacaaaaattagctgggcatggtggcacacacctgtaatcccaccttctcgggaggctgaggcagagaattgcttaaacctgggaggcggaggttgcagtgagccgagattgcagcactgcactccagcctgggcgacagagtcagactccatctcaaaaaaaaaaaaaaaaaaaaaaatagagtgtttttaaagctttccatatgcagttcagtcccagtgtattagggaatctgcatcctttgaggatgtgaggaatgcttttaaagagatgaagattttaggcaacagacagaggctgctcctgcagccttccaggcattgggaacaccccactgagtgacagtacaattatcagtaaccctgagccacccataccacattcagggtctaacatacccagggttcatccacttttccactggctgcctctggtttgcttgcacctgcatttgtgaacacaggttctgtgactggtggggtggaaagtatgcatgtgaaggcgggtgcctggttggagtggggatgcccctgtgtgggcagaaggtaggcaaggatgaaggagctggggcttggtggtccctgggttatcccaggctgacctgcttttctccctgacaggctgttcttcgctggagcccgagagggccaccttcccagtgtgttggccatgatccacgtgaagcgctgcaccccaatcccagccctgctcttcacagtaagggcccttcctgctgtaactctccacacacctccctctctttgtgcctagtctaagctgggagttcatgcttttcacacacacccctgttacccttgcagtctgctgctaggtctcactggatcttagaggatctggcaaatgatacccatcatctttgttaatatcaagagatatagcaaggaaagatcctgagtcttgaaatacctaaggctctcaggctgacttatttccgttctcccatccttttgggtcagactgaactgactgtctcaggattctacagcctcaaaaaaaatatatctcccttggctctcctcgcacctgttaccacagggttgcagcactggcctctgctcctggctggttggtccctgcaaacacccacttcccccatcaagcttcagggcagcctgccagtctcttgggaaacatcattgaaatgaagttagtgttaacagtacaccaaatacgaaaaataatagaggaagactgataaactggaaactgtgcaaaggaaacttgggacaggaaagagatgggagtaaaatatccccagagtagaatcattttgagagagctataggaaggaacaaagacttgtccccattgagtcttttgagttatttttattttccttctggatcctgaataaaacactaaaaatgactttggtccactggtgaagcagttagcaatcagaataacagagctcttgggagccaagagcattttacagcattgctgtacaatttcagaatgttcagatgcaggatgaaggtcaccttgactggttggttgtcgaaggtggctggagaagacagtactcccagtgggccacacacatttttttgttttgttttgttttgttttttccagttagagctattggtgcagtagtgtgactaaaaggcagatgtagcaagaaccattaaaatcttctcgattattttaaccatcggatctcacaagagaacagaaccttttgttgaccttcacaagttatcagaggggaggagcatggttccaagagagccacagagatgattttgaagttggaaagtagactctgtcaagaaaacctcatagggatgttatgagggttaagtgagttaatctttgtcaaatgctaaacatagagacctggcacacagtaagtgctatgtaaccagttttgaaattaataaagaaaaggaaggaagaaaaatagatgactcagccaggagaaaaggatgagggcaggaatacagccttaatctgttgttaacaatcttccctaagggattttaaaaaaatgaatttagcttgagctataaccaacagaggcatacaaatgagaccggggctgacacagagccaggtaataccagtgtggccagtctagctgcttatgtccagtatccattctaattggctagtgcccgtgccatacgagtggttaaatattttgatcatcacccctgtaataagaaaggatttcctagcaataaagatgttgtaacatattgggttac

SEQ ID NO: 12001 - DNA, 2300 bp, Homo sapien
gaaggcttatgggagtgaggcccagtggtacttggagctttgggggaaagaaaaaagggcatctctgttataagagttcagcaagttgtgctcactttagcggcacatatactaaaattggagcagtacagagaagattagcatggccccatgtacagatgacatgcaaattcacaaagtgttccttattaaaaagagaaaaatatccgggcgcagtggctcattcctgtaatcccagcactttgggaggccgaggagggcggatcacctgaggtcgggagttcaagaccagcctggccaatgtggagaaaccctgtctctactaaaaatacaaaattagccgggcgtggtgacatatgcctgtaatcccagctactcgggaggctgaggcaggagaatcgcttgaacccgggaggcagaggttgcggtgagccgagatcgtgccattgcactccagcctgggcaacaagagcgaaactccatctcaaaaaaaaaaaagaaaagaaaagaaaaaagagttcagcaagtttaagtacaagctacccttggaattgggttataactgaaccgttttgggggaattttgcagcctgggtccaggtttatagaatttagtgaacaccaacagagcctacaagccttctggtccaagaaccaactaaacctcacaggatccacaccctgtcttccaagactgaaatatgatggagggtcaggctagccctcctgggctcagtgcagactcaacagaacccattctcatccaccttgctccatgtctcgggggacatcagccctgagaattggtgtgtgagatagcaatttttcaggcccaggctgaaaaagtaatgagtaggattaaaatagggttccccagggtggcatggcaggccaccctggatttcttggtgtccagtttttcgcttctccccgatccaggccagctgaggagccatgtttagctcatgctgaagagagaactactcagctcttggaaaatgctgagctgggtattcctgcctcttggctgagctaaatactgggtggtgattcagcagaaaccccagctccagcagctggcgcaggagctaacaggataagaaggaaggggaagagagagccaggaagggaggaggggaggggatggggcagtatgggcaggagcttagctggaagtgtttggtaaaagctgtgtgcctccaggagcactcacagccctcacagcttctctgcaccctcctcctctgctggtgtgtccttggaagagagaggcccttccggaaggctcagagcacctcctctcctttggagggggttccgagatttctaaaacgttgtaagtgcttcgagatgaaaagggctggagaaggggaaatgttactatcgtgcgataggcaagatctgtttcaaaaccacactccccactgtgcactttatagaagctgggatcaaagcgcagtttatgaggaagggctgctttgatttttttttttttttttttttgtctgttgtgtggctttttgtgggttttttttttttaacgtttttctctttcaccagtcaagttatatgtataactttatcagacaagttatgttacatgtacaataatccaggtgcggaaggactttataatgtgggcccctcacccgctctaaaaaatgtcttgaggtgggggtgggcggggaatagagaaggattctaggagggttctgtgaagctggatccgtgtctgcccactcccccacacctccaggcctctctgggtctttgacgaggaaagactgttccgtgtggcctgcgtgggcagaactggaaccttatcagagccttgggttgtgtgcgttagaggtcaaacaggcctccgtgttttctttgcctatcagcgccttttggcagccggcactgcttacctcctagatctggaaacgcctgcggttggacaggccaagccgaagcggcttttccacaattagaaacacgtgctcagttccttccacaagcgggggaggcggccaaggaactcggtgcagccaatcacagagccgagcgtagccacacccacgcccccacaggcccggcttccctgcccagcggctccaacctccagcctgggcacccagacccagagggctgctgggagggacatgcctcaccccttttgctccagctggaggggagggagtctgtgggagctggccagagcgtggcagaaggcagagaagtgaacgccccagcaaaaggtgaggctgagaagccaacccttctggcaggccatgacccaggtgaaatttatggcg

SEQ ID NO: 12002 - DNA, 2300 bp, Homo sapien
aggatggattggtgaggggaataagatcagaggcaagaaaagatgattacaattcagttgtaaggattcagattgcagatgactatcatgtgcatcttggggcagtgggagtagagaaaagtagatgcatttggcatttaggaggtagaattggtaggccttggtgattaaggttgaaggagtcaaggactgcatggtcttgttggggatacaggtgaagtaaatcaaggacaacactgggtcgtattgtctgtacgtattgttgtatcatctgaattggtgtggttcagactggtcaagttgacccctctgtccttgtcaccctttctactcactcttcaacacttaagacttgctgggacttgagaaagcatcccctgtgcttttggactcttatgtctacaatggcagagtaagtaagttacctgagaagtcagccttcttcttcgtttcaatgtgcttcaactgctggcccagatcacctcctctttcctgattcccatagtgtctcttctgctcttcagcttctactctcagacagaagttctgctgttcagagagtgtgtgtgcccacaccctggaaatggaggaatgaggggcttgttctgggaatatgtctacttctgattggaagaacagtgaatgagattgaggtttcctgaaacaggaaactgttttggagttcagcttccaccaggtgtggtagagatttgcctactttcttgtaccagcctagaaacttaaattctctggccttttgttgctgactgtcaaggatcactttgtttttctcagaggagccagggcccatggtttaaataaagtcacccattaattgtgtctggtaaacttttaagggttaatgtgacacaccaaatttatatcacatacctaagaacataaaatcagaaggcttatgggagtgaggcccagtggtacttggagctttgggggaaagaaaaaagggcatctctgttataagagttcagcaagttgtgctcactttagcggcacatatactaaaattggagcagtacagagaagattagcatggccccatgtacagatgacatgcaaattcacaaagtgttccttattaaaaagagaaaaatatccgggcgcagtggctcattcctgtaatcccagcactttgggaggccgaggagggcggatcacctgaggtcgggagttcaagaccagcctggccaatgtggagaaaccctgtctctactaaaaatacaaaattagccgggcgtggtgacatatgcctgtaatcccagctactcgggaggctgaggcaggagaatcgcttgaacccgggaggcagaggttgcggtgagccgagatcgtgccattgcactccagcctgggcaacaagagcgaaactccatctcaaaaaaaaaaaagaaaagaaaagaaaaaagagttcagcaagtttaagtacaagctacccttggaattgggttataactgaaccgttttgggggaattttgcagcctgggtccaggtttatagaatttagtgaacaccaacagagcctacaagccttctggtccaagaaccaactaaacctcacaggatccacaccctgtcttccaagactgaaatatgatggagggtcaggctagccctcctgggctcagtgcagactcaacagaacccattctcatccaccttgctccatgtctcgggggacatcagccctgagaattggtgtgtgagatagcaatttttcaggcccaggctgaaaaagtaatgagtaggattaaaatagggttccccagggtggcatggcaggccaccctggatttcttggtgtccagtttttcgcttctccccgatccaggccagctgaggagccatgtttagctcatgctgaagagagaactactcagctcttggaaaatgctgagctgggtattcctgcctcttggctgagctaaatactgggtggtgattcagcagaaaccccagctccagcagctggcgcaggagctaacaggataagaaggaaggggaagagagagccaggaagggaggaggggaggggatggggcagtatgggcaggagcttagctggaagtgtttggtaaaagctgtgtgcctccaggagcactcacagccctcacagcttctctgcaccctcctcctctgctggtgtgtccttggaagagagaggcccttccggaaggctcagagcacctcctctcctttggagggggttccgagatttctaaaacgttgtaagtgcttcgagatgaaaagggctggagaaggggaaatgttactatcgtgcgat

SEQ ID NO: 12003 - DNA, 2300 bp, Homo sapien
taaaacccaaaatcttttggaacattttccagaaagtgaggccaaatttttgtagttaggggtcagtttgggggaacttaattttttaggcccactttaaaattaaataattttgcataatatatttaataaggctaaaaataactttattttagacttatagtgttgtccactatattgcttcatgctgttttttcgaaataatttacaattataaatagacattgttgctctcaccttaaggcagcagtttctgagtgaaattcttcaagaaagtggaggcatcatttcgatatggtaataagctagttattctaacatcaacaagtatgtttcatgatcagcgatatactgataattccccatgtgtgcttttcaaatagtttataaatgcaaaaatattagaagttgcaggatcagggtttgagtcattttttttcatgtttcagccagtcctaaataagagctgtgaacaacaaggctacctggtgattttgttttttatctttttgtatgtgcatgtggtttttctggctttttgttttgttttgtttttgagacagggtcttgctctacctcccaggctggagtgcagtggcgtcatcatagctcactgcagccttgacctcctgagctcaagcaatcctccagcctcagcctcctgagtagctaagactacaggcctgcaccactgcacccggctaattttaaaatttttagtagacggggtctcgctctgttgcacaggctggtctcagactcctgggctcacgtgatcctcccctgtcagcctcccaaagcgctgggattacaggcgtgagccaccgcgcctggcgattttgtttcctctgtactcttcgtagctcacaattacgctaaaagaacctttttcccattgttaattccttccatttccctcccccacccgtcgattccccctatttttaggaaactcgaagatgatgtcctttcaacgttctctcctgtattctcaaatacaggatccagtcctaaatattttttaatacattggctagtttatttctgatggcattaaaagtatcggcacaactgttccctgatttataaagctcacagatgctgtatgacctgtaacattatactagctaatgagctctcccggaacagttgacgtggaaggagtttacttccacttggttgcaaggagaaagatggagaaagcgagagacgattgcaaaaagaaataacttagtccattttctcagtgctgtttgggggctttgtgctaatacttaaattgcagaggagggaggagacgggactgaggatggaggggagcagaggaggcaggggcggagcctcggcgggcgaataaaacccctcgctaaagagaagcacgttagtgtgtggagaagccactctcccgaaaccagagggatggggccggctgtgcagtagaacggggatcgaaaagaggaaaacaagggcacgaagaccagcgagaaagaagaggacacctgggaaaggcggaagcagaagacggggaagggaaaagaaacccaaagcaggtggaaaccagatctagagcaacaccgtcaggttcacagtttgtttttctagaagagaagaaagtacctgaggattgctcttttttcctaccgttaatgaaaactacttttgtcttcatcataaaagaaaaaactaaggggaggtaaaggcagtctcctgttttattagggggagaggtgaagggaaatccaggctcactttctgaataagccactgcctggtgcacagagcagaaccatcctggtttctgaagacacatccctttcagcagaattccagccggagtcgctggcacagttctatttttatatttaaatgtatgtctcccctggcctttttttttttttttttttttagcaacacttttcttgtttgtaaacgcgagtgaccagaaagtgtgaatgcggagtaggaatatttttcgtgttctcttttatctgcttgccttttttagagagtagcagtggttcctatttcggaaaaggacgttctaattcaaagctctctcccaatatatttacacgaatacgcatttagaaagggaggcagcttttgaggttgcaatcctactgagaaggatggaagaaggagccaggcaccgaaacaacaccgaaaagaaacacccaggtgggggcgagtcggacgccagccccgaggctggttccggagggggcggagtagccctgaagaaagagatcggattggtcagtgcctgtggtatcatcgtaggtgagttccattccttcccg

SEQ ID NO: 12004 - DNA, 2300 bp, Homo sapien
ccaagtgctaaagaaatagaaatactaatcttcagcaactcttcctttccaacgtgtgcacctagtaccgctgtattccaagaacgtatttgatcccataacccccttagcttcttagttcataatttgagagggctaaagcttaccatatcgttatcagtttgcactggttttagcaagagacctcaaattcatcacattcatgttttatcccacattaagtctgcatcatataaattagaactaccaaatattactgaaagaactcacgtttaagaagcagaaacattatttgttttatatggtgatgttgaaatcggagcagaagtcttcaaatctgaatgtatacaaatgaatctatcaaatttttcctcagtgctttctaaggttgtcaggaaaggctagaggcaaattcgacattttttcatttcccatgactcattccctcccatggagtttcgtgctatatattccctgccttgtctggttttttttgttgttgtttgttgttttttttttgctgagtctttcaatttgctgtgtcttgaactagcaaaaggaggagaggaagttcctcccaacctttgaaacctcttaatacttgctgagtgatcaagggggcagatgactgctgattggactttaccccatttgaaaaagcttttgctatgatagctcaacaaacctcattttaaggaattaagtatttattttccttaaaacccaaaatcttttggaacattttccagaaagtgaggccaaatttttgtagttaggggtcagtttgggggaacttaattttttaggcccactttaaaattaaataattttgcataatatatttaataaggctaaaaataactttattttagacttatagtgttgtccactatattgcttcatgctgttttttcgaaataatttacaattataaatagacattgttgctctcaccttaaggcagcagtttctgagtgaaattcttcaagaaagtggaggcatcatttcgatatggtaataagctagttattctaacatcaacaagtatgtttcatgatcagcgatatactgataattccccatgtgtgcttttcaaatagtttataaatgcaaaaatattagaagttgcaggatcagggtttgagtcattttttttcatgtttcagccagtcctaaataagagctgtgaacaacaaggctacctggtgattttgttttttatctttttgtatgtgcatgtggtttttctggctttttgttttgttttgtttttgagacagggtcttgctctacctcccaggctggagtgcagtggcgtcatcatagctcactgcagccttgacctcctgagctcaagcaatcctccagcctcagcctcctgagtagctaagactacaggcctgcaccactgcacccggctaattttaaaatttttagtagacggggtctcgctctgttgcacaggctggtctcagactcctgggctcacgtgatcctcccctgtcagcctcccaaagcgctgggattacaggcgtgagccaccgcgcctggcgattttgtttcctctgtactcttcgtagctcacaattacgctaaaagaacctttttcccattgttaattccttccatttccctcccccacccgtcgattccccctatttttaggaaactcgaagatgatgtcctttcaacgttctctcctgtattctcaaatacaggatccagtcctaaatattttttaatacattggctagtttatttctgatggcattaaaagtatcggcacaactgttccctgatttataaagctcacagatgctgtatgacctgtaacattatactagctaatgagctctcccggaacagttgacgtggaaggagtttacttccacttggttgcaaggagaaagatggagaaagcgagagacgattgcaaaaagaaataacttagtccattttctcagtgctgtttgggggctttgtgctaatacttaaattgcagaggagggaggagacgggactgaggatggaggggagcagaggaggcaggggcggagcctcggcgggcgaataaaacccctcgctaaagagaagcacgttagtgtgtggagaagccactctcccgaaaccagagggatggggccggctgtgcagtagaacggggatcgaaaagaggaaaacaagggcacgaagaccagcgagaaagaagaggacacctgggaaaggcggaagcagaagacggggaagggaaaagaaacccaaagcaggtggaaaccagatctagagcaacaccgtcaggt

SEQ ID NO: 12005 - DNA, 2300 bp, Homo sapien
ccctttagaaaggttcagtcgggcgtggtggctcatgcctgtaatctcagcactttggaggcagaggtaggtggatagcttgagcccaggagtttgaggccagcctggccaagatggcaaaaacccatctctacaaaaaaatacaaaaattagtcatggcagcgcatgcctgtagtctcagctactcgggaggctgaggcaggaggattgcttcagcctgggaggtcaaggctgccatgagccaagatggcaccactacattccagcctggacaacagagtgagacccagtctcaaaaaataaaataaaaataaaaataaatttttttaaatagaaaggttcagactgctctgacggtattttaatttacagcttacatacaggtagtgggggttcagtatgtgctcagaagttacctcaaatttgctcataagttacattaaagcagaatcacataaaagtttgggtgtaagagaacatttggttatagattacagaggcaacatccctaaccccattagacatcatcttatgtgcaggaaaaggcaaggactagggtcatttatcttttattattattattattattattattattattattattaaatttttagaggcagggtgtcactctgttgcctaggctgcagtgcagtggtgcaatcatagctcactacagcctacaactcctgggctcaaatgatccccctgcctcagcctcctgagtagttacaagtgcatgccaccaagtccagctaatttttaaatttttctgtagagacagggactcgctatgttgcccttgctggtcttggatcctagcctcaagcagtcctccctctttggcctcccaaagcgttgggattaggtttatgagccactgcgcccagcccatttatcttttaaggaatatagcgactcaggcaagagacatagaggactgtgtgccctatcctgttttgtcttcaaaggatctttccagagacgtcagagtcagaggctttgtgaaattatgttgccaaacagaattgagcaagcctgtcttcttacatttgttactctgtctcacagaagatggggaatcctaaaatacaaattttggcccataacttcatactgtgtgggatactgctttgttgaagtccattttattggcatccctttctttttgtaagttaaaaaaaatttttttgagacaaggtctcgctatgttgcccagactggcctcgaactcttgaaatcaagtcattctcccacctcagtcttcatccctttctagctagcgaaaaacaaatactatggagagctccgcgtcctcttttctagggcagggaggggagcctgagggtctggtaggtcccaatgaggtgactgctccagcacttcgtctttgggaacatctgtctggtgccagtttgacccggggaacggcctaagtcgcccgcaggctcctaaggtcctcgtctttccgggtggcaagacatctgatccctctcgagaacaagttcccagttgctttaggcgctttgttacagctgacgctgctggtggcggttgggctctcggctgggaaaggcgcagctcgtttgtatggctccggagggggcactgaaaaggtcttcctggagggcttccttcagaaggaaacaaattgggagttgttggcggtccagacagttcagcaaagtgcagtatccctccttggggaatttcggaaggatcctggtccggtgtattccaaaggtccggcgccgataggtcgacggtagggggaggtaccatgcactgcagcttggccccaggggacatcttccctgccccacgcatccaatagatgaccccagctgaggcccacgcagccaatacctgacttcagccgagacccacgcagccaatggccagcccagtgcgcttcgcccgtgcccgcccgcctgcgcctaccaatcaggactcgggccaccttggcaccgcctctggacgcccaccccacccatccgccccgcctccaacttgctcgagcagggctgggtagaccggcgcgctcccggggacggtggggggggcagtcccggtttcggccatcgctggggtgggctcggagcggccgcaccgggcagcaaccccactcccactcggaggccccctgccctctcccccacttccccccggcccatggtgcgaggctgggagccgccgcccgggctggactgcggtgagtgatccccagccccttggacttcccctcccagctcgtgtacggtctcccacctctggagccccatccccgcgctggtgggggg

SEQ ID NO: 12006 - DNA, 2300 bp, Homo sapien
tgaaaactgacaacacctgacttctgtctcctatttttctgctcacaatcgtatacttaggtaccttttgaccccatggggaaaaaatatctaacattcagaactaccaatgacaggaagcagagactttttttttttaagaatgaagtttcccccatcataatggattcttaagcacattcttcacgcatgcggcgtgctagctggatgtcttttgacataggtgttacacgtttggcatggacagcacacaggttggtgtcttcaaaaagccaaccagataggctttgcttgcctcctgcaaagcaccactaagctgcactctgcaacggcagatctgttttaaagtcctgagcaatttctcacaccagatgctggaagggaagtttgcgaatcagttcagtagatgtctgataatggctaatttcacggagtgccacagtaccaggcctgtaatgacgaggtttcttcgccctccagtagagggcgcactcttgtgagcagttttttttttttttggtggggggaggggtgtgtgtgtgtagttttttgttttttgtttttcctgagagtcatgctgtcacccaggctggagtgcaatggcgagatctcgtctggctgcaacctctgcctcccgggttcaagtgattctcctgcctcagcctccggagtagctgggattacaggggcgtgccaccacgcccggctaatttttatatttttagtggagacagggtttcaccatgttggccaggctggtttcgaactcctgacctcagatgatccacccgcctcagcctcccaaagtgctgagattacaggcgtgagccatgcccctggcccccagtttttgtatttttttaatagtcgaggttttgccatgttgggcaggctggtgtcgaactccaggccccaagtgatccgcccgccttggcctcctgaagtgctggaattacacgcgtgagccacctcgcccagccggagcagcttttgtaggcagttgcttcctgggtgctttaccttcagtcaatttgtgagcaatctgctttgtgtgagactgtgagagagacctccttacttactccccttcttcggctagagctcagggagctagagatggtcctggttagagaactaccttatttcctaaaagtcctattctcattctgctggagtcccctctggctatgcaaatgctgaggggaaggagttttggaggacttaggcagtcctgatgtaagacactcccaacaggatcctatcatcattttgggtagtgggaaatttaccagggcccagctcttctctggaacccagcaccaactgctttaaccaacagttaaagggaagagcttgggaaaagccctgcgtttctccttgggtggggaaatccttccttaagaagaccatctgagttacattctgcttcttcttcttctttttttttttttgagacagagtctcactctgtcgctaggccagagtgcagtgacgcagtctcggctcactgcaacctctgtctcccagcttcaagcgattcccctgcctcagcctcccgagtagctgggactacaggcgtgcgccaccacgcccagctaatttttgtatttttagtagagacggggtttcaccatgttggccaggatggtctctatctcttgaccacgcgatccgcccacctcggcctcccaaagggttgggattacaggtgtgagccactgtgccggcctacattctgctccttaagtgctggatgaaagagcaaagcccttatcaaaggcaaccccctaaggcaacggaggagaaatatggaaaggaaaagcaaagacgtctgcctaattcagaatggagtgatacattataaaaggagggagtccttgaaaaagattaagttctaacaggattgacttctacatcacctgaataatgaaacaatccaattaccctcaaagtaattagaatgttcctaatagggaagccctaccctgagaataacagatgcctcctcattacatcataatggccaagttgtgatgtcggcacagagaatttactcttcactaagtgttgtaagtgaaacaagatatgctgaagagcagaatcagcatgaggagcagacaccccaggagaggtaagtgggttctctccatggcttattgtccagggtctctgtggccccaacctcactgcagatttctcacattttaacttgaggttaggtgtgtctaaactcttttctccactaaccttcagtgcagcttttgctatcccaagtctatccgaaatcctcaatcattgca

SEQ ID NO: 12007 - DNA, 2300 bp, Homo sapien
aggtcacgagttctgggacaacaacggcggccgtgactatgctctacgtgggcccgagcacccgggcagtggcggagctccggagccgcagggctggatccactttatctgagacgaggcgcctgcggccgacggcggaaaacaccaaaggcacccgggggcggggcgacccgatgtggcggggaggagtaggagagaccaggattggcgggagcggtccaagggagtcaagccggggagggcgaaaagggtggggaaatcaggggcgtgggggcgtgggggcgtgggggcggggggagtgagcggaaccaaagaagctccgggagatccgggtgttaaaagctggttggatgtgagtggaaggaactcagaatataggaggaaggagacccgaaacggcaccggagggattataaaaaaaggaaaagaatggggatgatggtggccttcccttcagtgagtgggctctgggagaaagggaggaggtccatcaggcctaggcggttgaagaaggttaagaaccttttggagatggaggaggtatgatgtgaagtagcccacccagtcgaaggcatttacattgctggcgcattccctcttcttaccggccttttccacctcagatccccctgtcctacccatcctagctttaactcagccataattgccttgcttaatcccaggaacctggccactgctccttggtccttggcattatgacgggattcccttgtcacctctgacagttcctggctgcggtgtccgcggactggctggggagtgatgacaggtagctatcagagctccagcctccaggcagctttagggattaaaacggaggccaaagcaactccagacctgtttttatagccaaatactgagcctcaggggttgtacactcaggggcttccaggaaaatgccagccttacttttctggggtgccttttaataacctccaagcactttgtggactgtttgtcgagggacggtgaatcagaagaatcactattctgatttcctttgtctccgaagaggaagtccctgactagctatataactttgggcgagttacctctcacttctttgtgccccagtgttctccttgggaaactggatttaggttagatgaccttttaaggctccttgtatgatattttgtgatctgtacatggcagagtatagattaggagccaaattttccaacctagtgctatggttcagaatacatagcaccccaagcgtctggctggagccgaggatgggtcctccagtttttggcacagatgttccggagcccaggaagcatcccataaccaaccttcagccccaccgccacccccagcgtattccagagccgcttccaaaccacagcctatcctctgctccatttcactcttgtcctcacagactttcagcctccatgctctgagacaactgtgggtaggtacatctctgttggtggaaatgatgcttaagaaccccaaagattaaaggaaacaatgttaagggcttttgtgaggataaaagataatgggtatatggaatagaaacatttcaaatgaagaatcaaagcatttcaatcaatccacttggttgtaaaaaaaaaaaaaaaaaaaaaacaaaaacaaaaaaacaccaaagcaacttgaatagtaaatggcaccagaagatggcagtctgctccataaccagagcaagtgcagtgggaaagctggactctcatacccactcacattcatgccttatataagcctctcctcctggttaaccttaacaggggagtgattcctctgctggttgctgtttttccttttctcttaccctattcctaacctctttgcttctctctttctttccttgtgtctcttccttctcttttcttttttcttttaacatatagggtatttttttcttttaacatatagggtatttaccttcattttgtttatttccatttgtttccttcttcattcatgttcatctctgctattccttctccctccagaagggatggaaaccctattttcttttctccaagaccatggttggtctgcttccctcactcgggctccttgacagtcttctagaagagagaaggaggaaaagaagcagttcctgatgttacaaatgaacaaggatctcccaggtaaccagctccccacacccatttctgttactaatttctcaaacagaaatttctggttccccttcttccttatcactgagtgaaaggggacaggcatgcacatgtgcccatacatgcattcagaatagagtgtgggggcaggggcggtagttc

SEQ ID NO: 12008 - DNA, 2300 bp, Homo sapien
tcccagctactcaggaggctgaggcaggaaaaccgcttgaaccggggaggcagaagttgcagtgagccgagatcacgccactgcactccagcctgggcgacagagcgagactccatctcacactcacacacacacacacacacacacacacacgagaacactgactccagagaagttatgccttgcttgctcaaggtcactagaagctaggtcttcctgcagttctcagttcgggtgccatattctcaccttctatttgaaagactctacctagctttcatgacctttccttctttgcacgcaccaccaccccctgcccaaaccaggagcctaggtttcagaaaagaaaacagtgaaccccaaagataaagtcacatgctgggcgttttgaaccttcccctgcaagaaaatgaaaggttattttttcttcccggcgttaacctttcctgtgctgtgccggaaaagttgaggactttttacattttattattattattattgtagagatcaggggtctcactatgacgcccaggctggtcttgaactccaggcttcaagcgatcctcccacctcggcctcccaaagtgctgggatttgaggcgtgagccatcgcgtcccgtccgtggatgttttttttaaaaggttgagtagcttcactcgggaccgcaaaggtggagtccccgccccctggtgcagcagcgaagacaagcggagccacctgtcagagggctgtgggcgggggcgcccgggccgtgagggccttggaaccggagggtgagtgcagttgagcgcacgctcagagcagaccgctagcaggaggcaggatgtgatagtctaagaccctggaagctgacggccagagggagggaagggtggtcacagaggagaggcaaagcaacgggaggtggaggatcctggaggtgtctgcaaggagaatacacagcagcgaggggctgcagaagcggacccagcgacttctgcgctgacgcggggcgggcgggagagaggaagagaggggagcgcggtggcgctgcgagctggccccgccggggaaggggctgccatgtcccgtgagcggcccccgggcaccgacattccccgcaacctgagcttcatcgccgcgctaacggagcgcgcctactaccgtagccagcggcccagcctcgaggaggagccggaggaggagccaggcgagggcgggacgcggttcggggcccgatcccgcgctcacgcaccgagtcggggccgccgggcccgatctgcaccagccggaggcggcggggcccgggcgccccgcagccgtagcccagacacccgcaagagagtgcgtttcgccgacgcactggggttggagctggctgtcgtgcgccgcttccgtcccggtgagctgccccgggtgccccgccacgtgcagatccaattgcagagggacgccctccgccacttcgcgccctgccagccccgcgcccgcggcctccaggtaggcggcgggggcacctcccctcctggggacctcctccagtcggccgcagcgggcttgtgggagtggatttgccaaagagcacccatctccatcccatccctgggcttgcgcctgcccatcccttttggggaccccatctgcgagtggctctaggccaccctggcagctgggccgcactctgccggcctggacgccggggtcggcctctgattggtccagtgccttgctctgacaccgccccctgtctctcccctctctccgccctgggctccctcctcccgcttcttctttcccccaggaggcgcgcgccgccctggagccggccagcgagcccggcttcgccgcccgcttgctgacgcagcgcatctgcctggaacgcgccgaggcgggcccgctgggcgtggccgggagcgcgcgcgtggtggacctggcctacgagaagcgcgtgagcgtgcgctggagcgccgacggctggcggagccaacgcgaggcgccagccgcctacgccggtccggccccgcccccgccgcgcgccgaccgcttcgccttccgcctgcccgcgccgccgattgggggcgccctgctcttcgccttgcgctaccgtgtgacaggtcacgagttctgggacaacaacggcggccgtgactatgctctacgtgggcccgagcacccgggcagtggcggagctccggagccgcagggctggatccactttatctgagacgaggcgcctgcggccgacggcggaaaacaccaaaggcacccgggggcggggcgacccgatgtggcggggaggagtaggagagaccaggattgg

SEQ ID NO: 12009 - DNA, 2300 bp, Homo sapien
aagcacagttcacttcagcttccaccgtctaggctcaagcaatcttcccacttcagcctccctggtagctgggactagaggtgtactgcaccatgcttggttaaattcattttttatagagatagggatctcattatgttgcccagactgatctcaaactcctgggccagcttgattgtaacataaattaatgtatgatttattagacattaatttatatgcattatatatattatattgtatatgcatatacaatatatacattgtatatattgtatcacatataatgatacgaagagaatacatccatgcattctatatacgtgtaaaatttaaaaagtcaatattgctttaaaaatgagtcctagctaactagtattgctacagtcaatactagtgcgaatgcatgtaaacaggaatgaattgtataataataagataacatgtgtctcatggtttattttcaacttagtcacttgtggttttacagttaaactatcctgctgctttaaatttagagacttcatttctactctaatattccctcttttaacactctgaggatgttaactattattgttaaatgttttaatcttatataaccaagcgggtaagagcgtggactctagagctaaactgtttaggtcctaatcccacctccccaattattaactatgtgaccctgggtaagagtcctctcccctctctccctcaattctctcatctttaaactagacataatagtctctattcctctgatggttgtattacatgggttagtatttgtaaaacccttacaacagtacctagcacattgtaagtgctatattagatcagtaggaaagttagaaaaaaactaaaaacaacttcacttttttttttcactaatgttaaaaaaaaaaaatgaaaggggaaaaagccagctctgcccttcttggaagctcccactggacctataattccacagtcccaactccaagagagttgttgggtgcttgttcattcaataatttgagtgcctaccatatactaaaactcaccatgaatcagacaaagcccctgccctcaaagggcttacacttggattagaaatcagaactccaccacttttttacagataagaacactgagttcagagtatggctctgagttcaggggtggctcacacctgtaatcccagcactttgggaggccgaggcgggcagatcacctgagatcaggagttcaagaccagcctggccaagatggtgaaaccccgtgtctactaaaaatacaaaaattagccgggcgtggtggtggacgcctgtaatcccagctactcaggaggctgaggcaggaaaaccgcttgaaccggggaggcagaagttgcagtgagccgagatcacgccactgcactccagcctgggcgacagagcgagactccatctcacactcacacacacacacacacacacacacacacgagaacactgactccagagaagttatgccttgcttgctcaaggtcactagaagctaggtcttcctgcagttctcagttcgggtgccatattctcaccttctatttgaaagactctacctagctttcatgacctttccttctttgcacgcaccaccaccccctgcccaaaccaggagcctaggtttcagaaaagaaaacagtgaaccccaaagataaagtcacatgctgggcgttttgaaccttcccctgcaagaaaatgaaaggttattttttcttcccggcgttaacctttcctgtgctgtgccggaaaagttgaggactttttacattttattattattattattgtagagatcaggggtctcactatgacgcccaggctggtcttgaactccaggcttcaagcgatcctcccacctcggcctcccaaagtgctgggatttgaggcgtgagccatcgcgtcccgtccgtggatgttttttttaaaaggttgagtagcttcactcgggaccgcaaaggtggagtccccgccccctggtgcagcagcgaagacaagcggagccacctgtcagagggctgtgggcgggggcgcccgggccgtgagggccttggaaccggagggtgagtgcagttgagcgcacgctcagagcagaccgctagcaggaggcaggatgtgatagtctaagaccctggaagctgacggccagagggagggaagggtggtcacagaggagaggcaaagcaacgggaggtggaggatcctggaggtgtctgcaaggagaatacacagcagcgaggggctgcagaagcggacccagcgacttctgcgctgacgcgg

SEQ ID NO: 12010 - DNA, 2300 bp, Homo sapien
gcatataaattaatgtctaataaatcatacattaatttatgttacaatcaagctggcccaggagtttgagatcagtctgggcaacataatgagatccctatctctataaaaaatgaatttaaccaagcatggtgcagtacacctctagtcccagctaccagggaggctgaagtgggaagattgcttgagcctagacggtggaagctgaagtgaactgtgcttgtaccactgcactccagtttaggccatggagtgagaaccttgtatcacaaacaaacaaataaaccaggagtgcaaatgaagacttggactaggttattctctaaagaagagggcaaccttgctggtggcagccagaatgatcaggctaagagcaaaaatgaaatgaggatggttgaaaggatacagccataaaggagtgtaataggctgtgtgtttagaatagaggagagaattgagtatggacttgtaaatggtgtggattcagactatgagaaccatattgactatgtgaaggcaagaggtgatcttgaagcgatagtgtcaaagttacagcatgagatggctgtgctagcttcttacatatcagcctatggctttgggaaaatcacttaacctctccaaacctcaatttcctcattcatagaatgaggataaaacagcataaggactggtgagaggaaaaaatacacatgtaaaaaaagcacagcatctaataactcctcaaaatatgttagtttttacctttttttttttttgagatagagtctcgttctatcacccagtctggagtgcagtggcatgatctcagcctcctgggttcaagtgattctcatgcctcagcctcctgagcagctgggattacaggctggctaatttttgtattttacgtctggctaatttttgtatttttagtagagatggggttttgccatgttggtcaggctggtctcgaactcctggcctcaagtgatccacccgccttggcctcccaaagtgttgggattacaggtatgagccaccgaacccagctagttgttactgttattgctgcagaaaagaccttgcttctccagtgaccataagggaagatggtaatacagaggcttggattggaggtagaagcaaagggagctagcagaataggagaattaggttgcctctttctggcctttggttggggcactctttaaaaaagtgccagatccaagagcccagggggctggctgtgagtgccctcatgtggatcagctatggtcagactgcttcacgcctgtgacctgccctgtataaatatactgccatgtataaataatggccccatatatatgtaatctggaaggataaacatcaagcttaacactggcaacctgcagggagggaagtggaattgggtgtgtatgtgtgtgtgtgtttgagaacctgtattttattactccgcacgtctttattgtttgatttttttcataatgagaatgagtttgtgtgttgggtaaaaaaaagaaaaagaaaaaaaccccactaaaatcaatctaattacaaaagaagatgaattaaagaaaagtaccgagagaaactgcttgtgatccaagtcctggctccctaatgcctggctgaagcccagcccacaaagagaacactgggttaaaggtcctggagaaaagatgggaaaggtttggtgtctatgtggtgtctgctagccccataagggtaaggcacctggtagacggttcccagcttaatgggaactgctcctgttttccaggcacacagttcagggctggaaaagttcaacaagtgcatggaacatcggaaacctcctgaaaatgctaaatttgccccgagatgtcccgaagtccggcatatttctctgggcagcctagaggctcaggagcccagcccagcccagcccaccgtgccctctcagccagcccttctttgccttcagcagccctccctcttcctgagtagtggccctttgcaggcctgcgtcccagccccgcccctctctctggacgcatctctgggccccatcatcacccggcgccgggccctccctctgcccccccctttctcctccctccttccttccctcccttcctccctctctccctccctcccagctcctgcaccaggaaacggcccggatcccggcagcggcctgacccgtgagatccctaacctggcaggcgggcggggttggagactggctgaggtgggggtaagggaggagctgggcctttgggctgcactagggggaaccgggaatagagatggtgtcggcaggaagcccttggcct

SEQ ID NO: 12011 - DNA, 2300 bp, Homo sapien
agggtagggtgaagagtgtgctccatacctggggaaggaagcacagactccaatttggagccgatggtctagtcagtggttttccaactttttttcagcagcaaaccccttaatgcaaataaaatcttaccctgaaccccaatatgtaagacagctacaaggggagctgttctgtttgagggcaaattgcccagcctgctcagctccccacccccttcatctccccaaggactcctgaggcaacccctaggaaacttcagggctctgccaagcagtttgaaaaccactggcctagtttgtcctgagcaagtcagagaccccccaccccaactgcttgccacaagctggctctgagtttctggtgtcagcatactcacaacaagaccaagtggcacatgcagcctaccacctcccctagaaataccatgaaaaagtgcagccctctctcaaaagcagaagtctggactcaacacctgaggccaatttggtcccacgttctggcgagcacaactacgttgccacattctaggaccaagtgaaaatctccaagaagagtcaaccatggtctagctaaggtgatcagtgctcaggaccacaggcagggttctagagcactgtgtcagaaagttagcattggagagcagcaatcttagcaccttggaaagtgcagcagtgaggtctggctcagggcatgcatctggagtgaataatttcttcctcaaaagaaaaagccataatctgaagctgttctagaggactgcgagttccaaagttaacatcctcagactctgaggtacagacaagtaacacccatgcaaacagtgtggcttcaaataaatcataaatgcttctaggtcatggtaggtactctagaacccatatgcctggcccctgataaagccgaaccaaagcccacaacacagcataggccagtcctggagtacccatcaccctcacacccatgggattcagatctgaaatggtcatctcaaggcatcaacagtctcactgagacacagtgtgggacccagactgtattctagatcagcacttatgcccacaacctcaaaaggaaaattagttagggccccaatttagagtttcagtttgggtacagaggtcccagagattggaaacactttaggcaccattgtgcctgagtgggagaggagggtggcaggcaggtccggctacctaagcctccacccatccaggctcaacagccctgcccttctatcagagcccaggaggcagcagcaagtgcataatgcacaaggaagggggatgatgaaggaacaaggccagctgcagaactgctcttctctccaaagccttgccaatcactttctggaaagaagcagcagagccctcggtctggatacaatgtttctctctaagccttgaggcatcaggacaagggcaggggaaaggaggggttgggaggagggacagagaactgcccctagttcttgccattgcaagagggaatgttttctccttgaggaatcccatcaccaccagatttgccaggcagcccagcatgcacaccagcatgcgtgcacatgcacacgcgtgtccaagcagcccactgttaacagccacctctccctatcacctgagaacccctaagcttccattccaaagggatgtgccttctgcgttccctaaatcccactcatctaatggaatacagctgcttatgtaagtccaccttcctcagggctgtgaagcaagttccaggtcgtttcatgtgcccacacctataggcgtgatccctcccacctcccccagccctggaacgactacatctcctgtgcccctaaacttgccaaaacattcccctcccctctgtgtcctgctcactcttccaatcgcctacctggcctactcagctccctcacacactaccctttctctgcccatcctgttccatgcccacccatccaccaactccacttcttccaagggcatttctctgttctgttcctgctctcctggcccccagccacacctagccccacctggccctggactttcacttgctagcaaaaaaggcccctacagttaccagggcccccagtgccacggcccccgtcagcactgtcctcactgatgcccagttcccctcccgcagacgccgcgcctcctccagggccccgtccccgtatagagctgtgaactccgcctgtgggagagaagggaagcaggagagaaagaaggagaaagggatatcaggagaggaaagagtggagagaagaggagaggaagagttccagttccatccactgcgagcactaccc

SEQ ID NO: 12012 - DNA, 2300 bp, Homo sapien
acaaacaaacaaaaaatatttattcacaaattggattacatttttagaagagataagaaataggattactgggttaagaatctcaactttttttttttttttttggagagagtctccctctgtcacccaggctggaatatagtgtcgcgatcttggctcactgcaacctccacctcccaggttcaagcctttctcctgcctcagcctcctgactagctgggattacaggcgcccaccaccacacccagttaatttttgtacttttagtagagacagggtttcaccattttggccaggctggtctcgaactcctgaccttaggtgatccacctgccttggcctcccaaagtgctgggattacaggccgtgagccacctcacctggctctttttttttttttttttttgagacagggtctcactctgttgccagtctgaagtgcacgtagcaccaattatggttcactgtagcctcagcctcccaagtagctgggcagggactacaggcacacgccactttgcccagctaatttttgtatttttagtggagaatgggttttgccatattgcccaggctggttttgaactcctggactcaagcaatctggctcccaaagtgttgtgagccactccgcctggccttaagaatctcaccattttaaaagcttttgatatatactgccaaagaatagaaagattgtactggttcttgctccttttttcctcccatgcctaagtttttaaaaaaaatcagatatagttgtaattatatattatgtacaattttacattcttctttggcttaacaaaattattttcgcatgtttgtcatactatgtaacccttttaagagatgcataataattttttttggatataattatagtttgcttaaacttttgtttattgttggaatttagtcttgccatttttcacacataatttttatgtattaaagcaggccttatagtagtagtgatctgagctttgaaagctggctttgaattccctgcacattattatatatattacataatatatattatgtataatatatatataatttttattttttcctttgagacagagtcttgctgttgcccaggcgattctcctgcctcagcctcccgagcagctgggtttacaggcatgtaccaccatgcccagctaatttttgtatttttagtagagatggggtttcgccatgttggccaggctggtctgaaactcctgggctcaggtgatcctcccgccacagcctcccaaagagctgggataacaggtgtgagccaccacgcccagccagccctgcacacttctaattagtccaatgacttaggcaagtttcttcatttcattaagcctttttctttttccctaaaaaaggttatggttttggaaatactttccccgtggggttgttgtgagagtccagtgaaataataaggagtggtgcttattacaaaatcaaacgctcaacaaaaataggattcaaagccatttttaaaaatcacatttccttttgttggcttgattaaattgggtaccaataagattaacaaatcttgattaggttaagattagtataaaagacctttcttccagggtattcaatcatttagagcttgtcttcggtgctcaactttagttatcccagatcactgaagctgagatggctgatgaagtaatttgcagtgaaattttaagcgactgtgactctgctgcaagttccccagatcttgaggtaaggaattgtgagaaaaagtgggggtgaggggaatagtggggtataatgagtcacttgattttttggtttgctaatgaggatcttctcttgtccaaatccctcggccaaccatgtttgtttaactttttggttgggctatatgtatctttcgaactgtaggttagtgtgcccacaaaaatttctcttgcaaacgtacactgccattcctttctttttaataaatgtgtaggactgctaccaaaatatggcagtcctgccttccagggctaggtctcattggtacttggggtgcaggggtgtagtgggaacctgccaggagaaattcctctgggatcttgggggcttgagggcttaaatgaagggtggcacccaaatccccaatcaatgcctgttcaatcaacaaacatctaacaggacattatgtggtaggcatattgccaggccgtggagatgcgaatataaataggaaccggcccctcatctgcaggcgctcacaacctagttaggaaacagtaaaacaattaagcgcgccgtggagataggcccacttgtcc

SEQ ID NO: 12013 - DNA, 2300 bp, Homo sapien
caggtgtgagccaccacgcccagccagccctgcacacttctaattagtccaatgacttaggcaagtttcttcatttcattaagcctttttctttttccctaaaaaaggttatggttttggaaatactttccccgtggggttgttgtgagagtccagtgaaataataaggagtggtgcttattacaaaatcaaacgctcaacaaaaataggattcaaagccatttttaaaaatcacatttccttttgttggcttgattaaattgggtaccaataagattaacaaatcttgattaggttaagattagtataaaagacctttcttccagggtattcaatcatttagagcttgtcttcggtgctcaactttagttatcccagatcactgaagctgagatggctgatgaagtaatttgcagtgaaattttaagcgactgtgactctgctgcaagttccccagatcttgaggtaaggaattgtgagaaaaagtgggggtgaggggaatagtggggtataatgagtcacttgattttttggtttgctaatgaggatcttctcttgtccaaatccctcggccaaccatgtttgtttaactttttggttgggctatatgtatctttcgaactgtaggttagtgtgcccacaaaaatttctcttgcaaacgtacactgccattcctttctttttaataaatgtgtaggactgctaccaaaatatggcagtcctgccttccagggctaggtctcattggtacttggggtgcaggggtgtagtgggaacctgccaggagaaattcctctgggatcttgggggcttgagggcttaaatgaagggtggcacccaaatccccaatcaatgcctgttcaatcaacaaacatctaacaggacattatgtggtaggcatattgccaggccgtggagatgcgaatataaataggaaccggcccctcatctgcaggcgctcacaacctagttaggaaacagtaaaacaattaagcgcgccgtggagataggcccacttgtcctgggaaatgaggggaagctggggtttgcagtggtttgattgaagggggactacatgttagaggcacagactgggtgcaggtacacccaaaggaacgagaagagtggaaggaaacaacatccacaaagtaaccacatgctggcgtatcgaaggccgtgatttacggttttgagactttacctcgccagcaaaggggggccagtctgttagcggtgcagattggaggggtgacattggaagctgtccaggaaaaagaaaatggaactggggagcagaaggcctacgcaagagggcgggacagacaggacttgtgactagtagctctggactgaggaatcctccctgctttctggtgcgggagagctagtggatgatggtgccaataacctggatggggaaagtaagctccctcctggaatgcttcattcacaacctccattttcagcaacatcccatctactggtgcttcctggtcgagatacaagtttcctgaaactgctgctctgttttgggcctcacccggccaacagctcactagctggcaagcagtagtatcaagatggcggccccctaggactggctagtcatgtgacctcgggtttcccaagtttgaagcccggcagtcctttcgggggcaaggttcacctgtcacgaaacgagtgtcaccccttcgactctcgcaagccaatcggcatctgagactgggccactgcggtgaggcgatcggaagattggtcctttccagtcgcctagctagggccaatcacggagcgtcccatacttcgcgggcccgcccgtaggccggggagaagcaggaatatcgtcacagcgtggcggtattattacctaaggactcgataggaggtgggacgcgtgttgattgacaggcagatttcccctaccgggatttgagaatttggcgcagtgccccgccttagaggtggggccttatttgattgccaagtaatattccccaatggagtactagctcatggtgacgggcaggcagcttgactaatgagtcctcggcgtggccggcgcagctctccaatcgccgggcggcgggccccagtctgagcggcgatggcggcggcggcggcggcggcagcagcagcgggggctgcgggcggtcggggctccgggccggggcggcggcgccatcttgtgcccggggccggtggggaggccggggagggggccccggggggcgcaggggactacgggaacggcctggagtctgaggaactggagcctgaggagctgctgctggagcccgagc

SEQ ID NO: 12014 - DNA, 2300 bp, Homo sapien
gtgatgtagtgttcaagttttaagaccaatctgacactggaataaaaaatggagaaattaggatgcccaagacaaaatttagatatgaaaacagtgaaagccagttgtgaagtcctaataaactaatcctggccaggagctgtggctcacgcctataggaaggccaagccaggaggactgcttgagctcaggagtttgggacagcctgggcaacacagcaaaactgtctctacaaaaaattagccaagtgtgaaggcaggcacctatagtcacagctatgtaggacactgaggtgggaggatcacttgagcccgggaggttgaggctgcagtgagccactgcactccagcctgggtgacaaagcaagaccatctcaaaaaaataaatgatccaattaatataagttagctggacacattaaatggttactgcatggttggaaaaacaagctttccgattgtctcttagctaagtgtattttgtcttctgcatttcttgggcccaccttgaggtagaaaaggtagctgggtgcagtggttcacacttgtaatcccaatactttgggaggctaagatgggaagattgcttggtcaacatagcgagaccccaaagacaaggttacccagaccccaatccaaagctctagggctgcaggcatggatagttcatttgcacgtaagctgtatcaggagcacacaaaagcgccattaggtcagtaattcggctattcctttttttattttgagacagtttcactctgtcacccaggctggagtgcagtggtgtgaacttggctcactgcaagctccacctcctgggttcacgccattctcctggctcagcctcccgagtagctgggaccacaggcacccgccacctcgtcaggctaattttctgtatttttagtagaggtggggtttcgccatgttagccaagatggtcttgatctcctgacctcgtgatctgcccacctcagcctcccaaagtcctgggattgtagcagtgagccaccatgcccggcccaattcagctattcttttactttcccaggcttatttctctctcaaatgccaatcagggttacatgttatccagaaaacctatcattctcaactaaacacataatgttcctgctagttgtaatgtaattcctactccttaattcacaagtggcaacctcccttccacaacaccagtacttctaccacaaggcagaattaatagccatctgcgatctaagagagaataggaagataaataatccttacacccaaaaggccaaacaatttttattttcaaaaacaactttattcatgacacatattaaaaaaaaattcccacccctggaaatgagctaaaaaaataaacaaaatccacctcccacctccctgttcccacttcctcccattccctccaaataaaagggaaaaaaggcaaaggaaaaaaaaaaaaaacaaaaaaacaaaacaactgaaaaacaaaaacacccctaaaccccccaaaacaaggtagtgcatttccccagggggaaggggaatttacactggagccgctgggagcggaacggagatcttccggctacagaaacctgcaaagaaagacactcaaaacagaaaaagaaacacaaaaggaaacaaaatagatcaccaggcaatctggaggggcagggagccggagaagaggggtggggtgggtggtagacctggctggacaggagcaggcaggaggggactgtgaaaggcgaggagaagacggagggaaggtaacaagcagaacagtttggtgtccttccagagccctgggtaaaaaaaaaaacctcctaccacccacgcccacctacccttgagcagcccccaagggggtgaagtggggcagggaaacatgggcagcagcttgcgcagttgagacgtgtccatggcgaatccccagagtgaataagcagccccctgccccactccctgggccttcccctactccccaaagcaggtccctcctcagcagttagttatgggattctccccccttccacagtatatcttttttttaaaaaatattttttttccatcaaggtcatcttctgtttttcttttttttttttttaattcttttttttttccttctttcctctttttttcctctctctcctcctaatacacactttttttagtaaggggaataccatgatgtcgctctagcccggcccctggaagaaagaaggagagttaggtgttaacgtgatcactagatagttcagtacaagcccctccccgtaggcccctgccccagttactgtgaaggga

SEQ ID NO: 12015 - DNA, 2300 bp, Homo sapien
tgaggtatctagatttttaatattcactttgacagtgaggagacaccactgaaggctggttagcaggaaagatacatgatcagatctgtattttgaaaagatcattctatctgactataaatgacatatgggtgataaggaggtataaacaaagcggacgctgaacaccagttaggaattagggagctaaagtggtctttgcaacaggtagcttgactaataatggtagagatggagagatgtgggatgtctgagaatatataggaagtaaaatgggcagaattttgtaaagaattcaacatggataaggaagagaaagctctaaaggctgttgcctgagcatttggccacaatgcgatgttgagggtgccattcgctgcagaaaaaagcagtggaagccaaccaagttatgggggaaaagcaaaaatttcgtcttgaacatattgagtttgaggtccctgtgagtcatccaaggtgaaggtcaaataagaggtggcttcataggtctggagctcagaacagaggtggaagctggagatgtcagtctgggcgtcaggtttgtattgtttgtatgggtggtgattgaagctgtgggcataggtaagatcccaaagtggagacagtgtgagatgagaggagggcctaggactaagtctgtgaggattccagacactgaaccatggtgtctaaatgatacagacgggaatggccctagaagccagcaccacagcctcatcactaccaatacagacccctcctgcagttgcgtcaccccgctggacttcaatcattgcctcaagaaccgggaggataatggcctgcccatgctcagcaccaatgccatgagctggaagacgatttctgcaatggagaaaaggggagcaagagagactcagcagcaaaggaagagagtgtttagaggaagaggggtcaacagtgccaaatgctgttgagaaatggagattcaaacaggatgggagtgatgaaacccaagaaagtggtctccttgtagaggactgaagctagggctgatacagggccaagacagtcttccatatgcataagttgtactgtaatagccagtttacatgtctgtctccctggagtaaaggtctccaaagtggaacttgtccaccctgttatccttaaagtctagtgcaagtcctggaacgtagtggacacttaaattttactgattagtgaatgggtgaatgaatgaatgaatgaatgatggcaaatgattggaagcagaggaagaatctctggcatctgcctggactagctactatccttcagctttttttcttttttaccgcaatggcccgcagacccaggaaagagacgacagagccccccttccctccctcccctgggccctggccccccttcctctctctgacgaagagtctggaccgaaggttctgctgacgtgggaaggggaggagagtctagaggaaggggaggggaaagcagcgcagagatcgcagagaccaaggaggcgcccgcggctgcagagctgcagagcgggatctcttcgagctgtctgtgtccgggcagccggcgcgcaactgagccagaggacagcgcatcctttcggcgcgggccggcagggcccctgcggtcggcaagctggctccccgggtggccaccgggacccccgagcccaatggcgggggcggcggcaaaatcgacaacactgtagagatcacccccacctccaacggagtaagtgcccgagccccaggtggcgacgccatcctctcccagcacccccgcccccgcggagcgtctggcattttcctcctgcgcatccctcgcccctgactgccttcctagccctccctcccacctgccccctgcccttgctctgcggtttcctccgcttcacccttctcctgccaccccctgccccccaacagcaggtcgggaccctcggagatgcggtgcccacggagcagctgcagggtgagcgggagcgcgagcgggagggggagggagacgcgggcggcgacggactgggcagcagcctgtcgctggccgtgcccccaggccccctcagctttgaggcgctgctcgcccaggtgggggcgctgggcggcggccagcagctgcagctcggcctctgctgcctgccggtgctcttcgtggctctgggcatggcctcggaccccatcttcacgctggcgcccccgctgcattgccactacggggccttcccccctaatgcctctggctgggagcagcctcccaatgccagcggcgtcagcgtcgccagcgctgccctagcagccagcgccgcc

SEQ ID NO: 12016 - DNA, 2300 bp, Homo sapien
cttgagctggggaggtggagactgcagtgagctgtgatcaagccactgcactccatcctgggtaagacagtgagaccctgtctgaagaaaagagtttcccatacgtggaaaatttctgaacagagacaagttaaaagtgtggttcagtggagagaagggggaaagatttcccggctgacaatgatagaacactgctttctagcccttacctaggattagagaataaagtacctatcaggtaacaaatctcttagagatgtgtgtctctacctttaatgtataatacctatgcctggagatctggataaaatacagattatgattcaagggtctgggtgaggcttggattctgcatttctaacaagctcccaggaatgctgctggtccatgaaccacactttgagtagcaattctagaggttagggaagactcctgtgtagcaaagatgtttaggctgagagctgaaggatgagaaaaatgtgactaagaagctttttaggtgcaggaaccagcttgttcaaaggcctcgtggcgctgggaaaactagaagaaggtctgtggctggagtgcagagagtttggggaaagaagtgagatggaactacagacagcatgtgaccaggcatgtagaaccatgtatgaggtatctagatttttaatattcactttgacagtgaggagacaccactgaaggctggttagcaggaaagatacatgatcagatctgtattttgaaaagatcattctatctgactataaatgacatatgggtgataaggaggtataaacaaagcggacgctgaacaccagttaggaattagggagctaaagtggtctttgcaacaggtagcttgactaataatggtagagatggagagatgtgggatgtctgagaatatataggaagtaaaatgggcagaattttgtaaagaattcaacatggataaggaagagaaagctctaaaggctgttgcctgagcatttggccacaatgcgatgttgagggtgccattcgctgcagaaaaaagcagtggaagccaaccaagttatgggggaaaagcaaaaatttcgtcttgaacatattgagtttgaggtccctgtgagtcatccaaggtgaaggtcaaataagaggtggcttcataggtctggagctcagaacagaggtggaagctggagatgtcagtctgggcgtcaggtttgtattgtttgtatgggtggtgattgaagctgtgggcataggtaagatcccaaagtggagacagtgtgagatgagaggagggcctaggactaagtctgtgaggattccagacactgaaccatggtgtctaaatgatacagacgggaatggccctagaagccagcaccacagcctcatcactaccaatacagacccctcctgcagttgcgtcaccccgctggacttcaatcattgcctcaagaaccgggaggataatggcctgcccatgctcagcaccaatgccatgagctggaagacgatttctgcaatggagaaaaggggagcaagagagactcagcagcaaaggaagagagtgtttagaggaagaggggtcaacagtgccaaatgctgttgagaaatggagattcaaacaggatgggagtgatgaaacccaagaaagtggtctccttgtagaggactgaagctagggctgatacagggccaagacagtcttccatatgcataagttgtactgtaatagccagtttacatgtctgtctccctggagtaaaggtctccaaagtggaacttgtccaccctgttatccttaaagtctagtgcaagtcctggaacgtagtggacacttaaattttactgattagtgaatgggtgaatgaatgaatgaatgaatgatggcaaatgattggaagcagaggaagaatctctggcatctgcctggactagctactatccttcagctttttttcttttttaccgcaatggcccgcagacccaggaaagagacgacagagccccccttccctccctcccctgggccctggccccccttcctctctctgacgaagagtctggaccgaaggttctgctgacgtgggaaggggaggagagtctagaggaaggggaggggaaagcagcgcagagatcgcagagaccaaggaggcgcccgcggctgcagagctgcagagcgggatctcttcgagctgtctgtgtccgggcagccggcgcgcaactgagccagaggacagcgcatcctttcggcgcgggccggcagggcccctgcggtcggcaagctggctccccgggtggccaccgggacccccgag

SEQ ID NO: 12017 - DNA, 2300 bp, Homo sapien
gatcttgtctccaaataaggttatgcacagagtcattctctattgtatgtgtttgaagcgttaatttgttcaatgtaaacatccaaaatataccacagctttcaatcctgtttgtcatcttgctttttaaataccaggaacctcaaaaatggaagaaggcaggcttcactcaagcctgagaggccctgatgtgtgtgtcccagagggaaggtccagggaagcagcacacactaaggagttatcccagggcagaggagctgtagggggctaggagcaccatcctttcagtggaaactcctggtggggctagatcccatctcctctggaagagttctagcaacttttgtgccagcggtcctgcccaatcctctcctcatagcagcaagagtgagccaggctgaggaggccgacaggcccagactggcagaggagtgtaagaggccgcacaacctgcccgcctgcagttctggggccagacgccctgcttcatgttgtcactagggccagaatccatgtccagcgccagactcccctcctgtgccccgcaagaacggcccagcgaaccctgtgtaggggaggcgccgaggattggagaggctctgctaagggccccgctgggcggaaggcgcgcgctccctcccatgggaaagacagatgtggggctaatgaaagggaggccgagaggcgcggggacggccggggagacgggggcgtggcggggagaggaaagctcccggagaaagccgatcggaccaccgcaagcgaggcatgcagcggagtccggaggaggaaggcgccggggactggggcagggccagggcgggacgggggtggggggtgtggggggtaccacaggcagttggacccgagggtcctgagctgaaactcaacacccgcctttggaaggatcgtccctctttctcctccgccccttcccttcccctcccctttcccctccctcctttctcttaatccccaggacggagccctgcgcgggagaggagagggcctgaggggaggagaaaggaacagcactgagaggggccaggagcccaggaaggggagggaagggcagccgcgggccaggggtgagcctgcgggccacgcgcgacccccggagccttcgcagccctctcagtgtccccactcccagcccaggcgagtccacaggacccgggcccctgctcctccctcgccttctctttgctccttcttttgctttgtggcctttctttcccttcccagagacacctgggagctgcccccaagctttggggcgccccgcggggccctgccaagggtgcgtgtgagagagggcggcggagccggcgccgggtgccaggggccgagggtgggagcgggagctcgtggccctgcgccctggagccgaggactggaagggggctgggcccctccgccgcctgggcgcaggccgcgcgtcgggaaggcagtcccgcctgttccaggggtgcctgcgtgctggttgctgctgcccggggcgaggcgccgtagcggcgacctcagacccccgggcgcgctgagtgagtgcgcgcgtgaaaaccgccgcaccgccgggggtgcgagtgtctgggccgaagcggccactccagcgacccagccccacggccacgctctcgggggcctttggctccaggcaacttggggcaagcgtctcagttctcgctctcccttcctcccagcggggtcgccgcagaccccagccctgggagcaccgctctgcagcgcggccggcgggtggagacggttggcccctaaactcgctcgtccagcccaaccgccccggcggcttctcccagccctcgaggctctcctgagcggcctggagaggcgtcgagcgcagcccagcgcccgcctgctcacccgccccggcccgggaagggaattttcggatcctgcgagcccggggcgcccccgcggcctagggcgggcagctcccggggcctggccgagccggtggcgcccgggaggccgcggggacagcacgcagcgcgcgcccttggatgccgtcccgcagcgacgccccggcccgccccgctcctcctcctgcctggctagcctgcctctcatttgggaagttttgtgggttttctttctcctcctccaaccttggcggaggccacgactcaggcgccacagctgggggctagaggccgcggaccatggtgcggggcagccaccgctgaagtcagcaaaaccgagcctggcctgaggcaggctgcgcgggaggccaaagccatggccattgccacgtcggtgagtccaccagggagtggaggctg

SEQ ID NO: 12018 - DNA, 2300 bp, Homo sapien
ccctcgtgccagtcaaagcattcatctttgaagacagggtttcctgcccacctccaccttggaccccaatttgccttggcagtctcctgggcagagatcacaccaagtcactcgccagcagctggatatccgtgtgcctggcagccaggtcccccagggctggggtctggaagaggttggaaaatcttccctagtggccacctctaacctaactggagctgggaagcaggagctctccctggaaatttaaaagttcctctaccatcccagtggagttggaatctattcaggagtcttccatcatggagagccagcctagagccaacacagtttatccccatccccatgtttatcccagaatctctccctattccaccccataggctccaccacacccttccagcagaggtttcttcacaggtgcccaggtaatacagtggggaaggagctggggcaggtgtcctgaccacactctcctaggaaatgcctagatgtgtgggcctgtggaatattgaggcaaggttatctgtccagggcctcaagttcaccaagggccttatattacatttctgatcttgtctccaaataaggttatgcacagagtcattctctattgtatgtgtttgaagcgttaatttgttcaatgtaaacatccaaaatataccacagctttcaatcctgtttgtcatcttgctttttaaataccaggaacctcaaaaatggaagaaggcaggcttcactcaagcctgagaggccctgatgtgtgtgtcccagagggaaggtccagggaagcagcacacactaaggagttatcccagggcagaggagctgtagggggctaggagcaccatcctttcagtggaaactcctggtggggctagatcccatctcctctggaagagttctagcaacttttgtgccagcggtcctgcccaatcctctcctcatagcagcaagagtgagccaggctgaggaggccgacaggcccagactggcagaggagtgtaagaggccgcacaacctgcccgcctgcagttctggggccagacgccctgcttcatgttgtcactagggccagaatccatgtccagcgccagactcccctcctgtgccccgcaagaacggcccagcgaaccctgtgtaggggaggcgccgaggattggagaggctctgctaagggccccgctgggcggaaggcgcgcgctccctcccatgggaaagacagatgtggggctaatgaaagggaggccgagaggcgcggggacggccggggagacgggggcgtggcggggagaggaaagctcccggagaaagccgatcggaccaccgcaagcgaggcatgcagcggagtccggaggaggaaggcgccggggactggggcagggccagggcgggacgggggtggggggtgtggggggtaccacaggcagttggacccgagggtcctgagctgaaactcaacacccgcctttggaaggatcgtccctctttctcctccgccccttcccttcccctcccctttcccctccctcctttctcttaatccccaggacggagccctgcgcgggagaggagagggcctgaggggaggagaaaggaacagcactgagaggggccaggagcccaggaaggggagggaagggcagccgcgggccaggggtgagcctgcgggccacgcgcgacccccggagccttcgcagccctctcagtgtccccactcccagcccaggcgagtccacaggacccgggcccctgctcctccctcgccttctctttgctccttcttttgctttgtggcctttctttcccttcccagagacacctgggagctgcccccaagctttggggcgccccgcggggccctgccaagggtgcgtgtgagagagggcggcggagccggcgccgggtgccaggggccgagggtgggagcgggagctcgtggccctgcgccctggagccgaggactggaagggggctgggcccctccgccgcctgggcgcaggccgcgcgtcgggaaggcagtcccgcctgttccaggggtgcctgcgtgctggttgctgctgcccggggcgaggcgccgtagcggcgacctcagacccccgggcgcgctgagtgagtgcgcgcgtgaaaaccgccgcaccgccgggggtgcgagtgtctgggccgaagcggccactccagcgacccagccccacggccacgctctcgggggcctttggctccaggcaacttggggcaagcgtctcagttctcgctctcccttcctcccagcggggtcgccgcagaccccagccctggga

SEQ ID NO: 12019 - DNA, 2300 bp, Homo sapien
tgggatcacttctggctcctttgaacaccccctcctgggcaagggtcaagataggagatctgagccaactccatttctactaccttcttagccctgaggttctgattggtgagagcgagacccataggtatccagctcttctgaaacggcactgcctcctaagatcctgttctgggattgaggttttcccaggagcacgggaagccaccttgaggccatgtctgccagacaaaaggctaggaaagggagctagtgcagtgaatccgaacagcagggctggatacctaagtgggcagacacaccctgtggccctcagcaggtgcagttgaaacttgtcccaacccaagcccaggtgagcaggaaagcattcactgtggggctccccttccattcacagccaactaggggtaggcacggtgtggcacttccatgccaggaggttacatgtggaattggtcagagctggaatgggaaaccagctcagcctctttctttgtgatcttgggtaagttactaaatttccttgggcctcagtttcctcatctgtaacatggggataatagtttccatgtcatggtttcattgtcgggataaaatgagatgatgcatgcccagggcttagcaccatgcctggcacatgtaagtgcacaggagctgaggccagcaggatatggaagggagaggacgtctgcgagtactgggggcagagggtgaggcagtgagagtggggccatgatactggcctcatcactgttcctgagtgcccctgctttcccagccaccacctgcttcttctaagtgccctccatcccacagttccaggtgccccaagactcatcagagcagagcagtttctcccaattttccagattgccctttgacttcatcacttctctcttttggggctgctttgccctaacgcattggaaagattcctctcactgcagtttaagttattcctggttccctttgttgatttcctagtccttggttactagaggagtattttctaagggaaagcacatgcaaatcaagccacatcattctaggggcaatgtctgtgtatgggtatgttgggtgcgtatgggggatgaggcaggccaataggcaagcatgaagagaaggacctggggggaaggacacactggcccactctcagcacagtgtctcccaagcaggctggacccggctgacctgtgtctttggggtcaagcccaactgtaagcctttctggggcacacatacaccctcctggctaacagtggcccatgtttctggacctgctgaggctgagtgggctcacttcatggcctgaaagcagtagctgaccctgtcatgggcttggtccccaaggctctgtgaatgagagcaggttggttcctggaactgagacctccttcctgttgggtcttaggtgaggctgtttcagtttccctcctcttccttgcttcaccttctcatttgtgcaatggggacactcacccacagcttcttccatcagaccttgcccatccagccaacaaacttaggaagtcagggtcttccagcagccctgtgagggtaggcttgtatccccggtggggggcagtgactggcgagggcaagggggagttagggagtgggtcatggacaatgggggagaagtcatagctgatgggggtcatagaattttggggtcattgaaaatgtggaagaggtcagagaacaaaggggatgggagtcaaaggatgtctaagggaaaggaaataatcacgaaggtggatgatcagagggacacctgggaagaggggaatggtgaaaccagaccctggatggggggagcagggatcatggaaacgaggcctcttgaagggaggccacaagacatttcctaattttggctaccaaaccaaccagggaaatcccgctaatgccagttcacaagaatgcagaacagcagactgttattgctttgaccccatggccagaaaaattcaaagagcaaagtttacccaatcagctaccaggcatataatgatggtcatcacaacttccatgagtattgcattttaagcagcctttggaaatactttcagagtttttttggttttgttttttaacctcaagtcactccctaaaaagacagtggaaataaatttgaataaacaaaacaggcttgctgaaaataaaatcaggactcctaacctgctccagtcagcctgcttccacgaggcctgtcagtcagtgccccacttgtgactgagtgtgcagtgcccagcatgtaccaggtcagtgcagagggctgcctgagggctgtgctg

SEQ ID NO: 12020 - DNA, 2300 bp, Homo sapien
tttcatctttctttctttctttctttttttttttttgccatgaaatcctttcagaataagtaaataagtcttcccatgcactctcaagtatgcttataatataagcttgcacagcgtctggaagaatgtgcaggaaatagttgaggatagcttcttctggggagtggggctggtagggagagactattaactttcactctttatactctttaatacttggatgtcagagtggtttttacttttgcaataatgctataataataatagaaacaccacctaaagtccggcccggtggctcatgcctgtaatcccagcactttgggaggtcgaggtgggtggattacctaaggtcaggagttcaagaccagcctggccaaccatggccaacatcatgaaaccccatctctactaaaaatatgaaaattagctgggtatggtggcgggcatcaggagaatcgctcgaacccaggaggtagaggttgcagttgagccaagatcgtgccactgcactccagcttgggtactccgtctcaaaaaaacaaaaacaaaaaatcaaaaaacaaacaaaaacacctaaagtgtaatcattacaataagaaacctcatgctgagtcagatagaagcagtgctggtcaatggaggctaaggcaggagcctgctcaccctcccctgcctccctcacggtcccaggaccagttggaaagcactctgtcacctgctaccctcatttacagtggggaaaatttaataaaggagggaggtgacttgttcaaagttacacagcaagtgggttcagaactgagacaagaggccaaggccccagacggaccatttccttcttctggcactcccatgccaccccaccctctctgtttccggcccatctttccaaggcctgacaagtgccgcccccacaggttggacagagacttgaaccggctcccccaggacctgtaccacgcccgttgcctgtgcccgcactgcgtcagcctacagacaggctcccacatggacccccggggcaactcggagctgctctaccacaaccagactgtcttctaccggcggccatgccatggcgagaagggcacccacaagggctactgcctggagcgcaggctgtaccgtgtttccttagcttgtgtgtgtgtgcggccccgtgtgatgggctagccggacctgctggaggctggtccctttttgggaaacctggagccaggtgtacaaccacttgccatgaagggccaggatgcccagatgcttggcccctgtgaagtgctgtctggagcagcaggatcccgggacaggatggggggctttggggaaagcctgcacttctgcacattttgaaaagagcagctgctgcttagggccgccggaagctggtgtcctgtcattttctctcaggaaaggttttcaaagttctgcccatttctggaggccaccactcctgtctcttcctcttttcccatcccctgctaccctggcccagcacaggcactttctagatatttcccccttgctggagaagaaagagcccctggttttatttgtttgtttactcatcactcagtgagcatctactttgggtgcattctagtgtagttactagtcttttgacatggatgattctgaggaggaagctgttattgaatgtatagagatttatccaaataaatatctttatttaaaaatggcctaatctgtatttggcatccgtggtgcctgaacatctcgcggtctcccagcctgtcccttctcctttccaccattggccctcacctctgtccaccctgccagctctctccgccctccagagtttccgctgcaccctcccgtcctctcccatctctgtctccctggcccatcccaaacaccagggtgggggctaggccgcgctcccggcatgctggagagacagaggcccattgaggcattgcagcaggcacagagcgcccccttgtcccccaacaatccgcctttgtcctccagtcctggctgctgcagcttggtcctgggggtgctgcctgggctgggctccagctcacaccctccctaaaaggaaatgggagaaaggaccggccaaacaagagggttaaggttagagaagggggacacaaatgtcttcaggcttaggtccctgggggctcccagtcctgcccctgttcctctactcacatcccagctcctcccagtttcttttcggacctcctcctctccccttccttctctattccaggctgggttgggctctaagcaaggggagggattagagcctccttcctctctgcccctcccca

SEQ ID NO: 12021 - DNA, 2300 bp, Homo sapien
agcgcaggctgtaccgtgtttccttagcttgtgtgtgtgtgcggccccgtgtgatgggctagccggacctgctggaggctggtccctttttgggaaacctggagccaggtgtacaaccacttgccatgaagggccaggatgcccagatgcttggcccctgtgaagtgctgtctggagcagcaggatcccgggacaggatggggggctttggggaaagcctgcacttctgcacattttgaaaagagcagctgctgcttagggccgccggaagctggtgtcctgtcattttctctcaggaaaggttttcaaagttctgcccatttctggaggccaccactcctgtctcttcctcttttcccatcccctgctaccctggcccagcacaggcactttctagatatttcccccttgctggagaagaaagagcccctggttttatttgtttgtttactcatcactcagtgagcatctactttgggtgcattctagtgtagttactagtcttttgacatggatgattctgaggaggaagctgttattgaatgtatagagatttatccaaataaatatctttatttaaaaatggcctaatctgtatttggcatccgtggtgcctgaacatctcgcggtctcccagcctgtcccttctcctttccaccattggccctcacctctgtccaccctgccagctctctccgccctccagagtttccgctgcaccctcccgtcctctcccatctctgtctccctggcccatcccaaacaccagggtgggggctaggccgcgctcccggcatgctggagagacagaggcccattgaggcattgcagcaggcacagagcgcccccttgtcccccaacaatccgcctttgtcctccagtcctggctgctgcagcttggtcctgggggtgctgcctgggctgggctccagctcacaccctccctaaaaggaaatgggagaaaggaccggccaaacaagagggttaaggttagagaagggggacacaaatgtcttcaggcttaggtccctgggggctcccagtcctgcccctgttcctctactcacatcccagctcctcccagtttcttttcggacctcctcctctccccttccttctctattccaggctgggttgggctctaagcaaggggagggattagagcctccttcctctctgcccctccccatgggtctctagggggctggtgcaggcagcagcagaggcactctgggcagctgggtgagggcccatctgggcaaggcccccagcgcctgccttctctcccggggccctgtgggcaagcctcctgcttcactttcaggtttctcgaagtgccttcttgctcctgtctgtttccccatcctgccagatttctgtttctcttgctgggcttttggcagtagggggctgtgttggtgggccctacgaagatgctcagtgctcgagatcgccgggaccggcaccctgaggagggggtagttgcagagctccagggcttcgcggtggacaaggccttcctcacctcccacaagggcatcctgctggaaaccgagctggtaacagctgcctcccaacctggtgcctccatctccctgacccccggctcctggccagccttatgccagcccccagctcacccttcagtagcctccttccccaagccctctggacacctctcctgcccgcagctgccccttcttcgtctcctactctgccttcttgctgcctctccacccggagacatttacagcaggtttcagttgcagcaggaaggactgcagttagacagggtgactttttgggacattgaggaagcttgagacatagggatgggacaggggcaatgacagcctctaacatggccacttctcagcacgtccaagaagtctaactatcaaaaagggcagacttcctgcaactgcactttatctgtggtctgctgcccagaaacatctcttctcaggaaaggatcttcccctggttacttagcaagaccacagtgtagagttaaggcctctgcacgtatgccaccctaggtcatcagagctaaaggggctcccagaaaccactgggcagcatctgccttctctcttggcatggaatcaaaggctctggtccttgtcagggggctttcaggcatctgggggtggggaaagcattatgaggcagggggctcctcttggtccctgtggagtcgggtctctgtgggcacaactccaggggctggcattcacactgtacctatgaattactgtgggatagtgctcctgggagccatatggcttggccagactgct

SEQ ID NO: 12022 - DNA, 2300 bp, Homo sapien
gaagggagaggacggtacagcggagcagacgggcagggcctggggctgagtgaacaccttccttcctcctccttccacaggagcgggggactaccccccaccacctccactccccgctgccctgccaccaccacctataccaagtgaggcctgctcagagcacagggttccctgaggacaaagcctggtctttgtcacctgaccccgacccagactgacctggcgttctcagctccttatcatgtccccagagctatgggaaccaagcagtgacgcactggccatgggctaaccccccggctcgaattctggggcctcgagtaacctagagctggggacaggtggcctgcatcccctgggggtaatgatttggcataagcacctgcagaagatggggatgtggggtcaactaaggtccctccaaggacattgagaaaaggtccaaatgctctggaaagagaggtgtgttcctgagcccaggaatggggtggcagcgtcctagggagctaggggagaggccacatcttaatggaaagtgctcctacccagagaagctgacccctgtcgtcctacccacctccacaccctggagctatattgagaggtgacagtaaactggtgggaggggggctgggagggtgttcctgggtgtgagggtggggggaaggccagagcaggggagtctggctttgtttcctgaacacaatgtccacttagtcataacaggaacagcctgctgaagacctgacacctacagcctctgagagatggcagcattggaggatggggagcggggccttgagggcctagggtgcttgaggacacccacaaagaagggaatgtgagtataagccctggagggcttggaaaggggcaacaaaattctgcctggggagggggcaggtggcagagccccaccccgatggaatgcagtgcctggggaccagatggtgtaaatccccaggcctgccaggcacctgcaccctctggcagcccggtgaggcagaaggggacagcccctcacccacccccctcctctctcaggccctaggattagcaccatcttcttctgcccaccccaccccaggagcagagggtagcaggggagggcaaaagcctatgtgtgcaaatgcggatgtgcaaatgtgtgcatccatgtacacaaaagaaagtagaaaagaaatctgcaagcttgagtgggtaagtgtgaaaaatctgcatgtgtggctgaagatgggcacagacacggtcaagtctgtatgtgagagtgctgaactggggttctgtgtgaaaatctgcctgaggcggcagggagaatcactgccattgcgtgagcaggttggatgttggccactctatcaggagcattagggaaggggtggggactccagacgtgtccccaaaccagggtggcctcaagaccttgggagaacacttgtctgaagacttggggaacagaaggagaccaggcatggcacttatgcagactgaggccaggacagaatttcctgacaaaagaaaactgagccatggagatggacaacagatcccttccctgggcaccatactgcagcttttagtccctagcactgggggctccagtactaacagcaggaagatgctcccagcctgggactgtgtgagggaggtcagaatgggaaggagaggctggggaacaggggaggaaagcccatggttgggaggcggaggacaggcatttggcctgcaggagaaggtgaccctcacccatgttttcagttcacccttcgggttaaaaataactgaggtaagggccatggcagggtgggagaggcggtgtgagaaggtcctgtcttcccactatctgctcatcagccctttgaaggggaggaatgtgcccaaggactaaaaaaaggccgtggagccagagaggctggggcagcagacctttcttgggcaaatcagggggccctgctgtcctcctgtcacctccagagccaaaggatcaaaggaggaggagccaggaggggagagaggtgggagggagggtccctccggaaggactccaaatttagacagagggtgggggaaacgggatataaaggaactggagctttgaggacagatagagagactcctgcggcccaggtaagaggaggtttggggtgggatgccctgcagcccgtccacagagcccccaccgtgagggacctccttcaccaggagtggggtgcaggtcagttggaggcctaagggctctattaaaactgcctatctccaggcccagggaagttccccctgacacaaggaggttccacagg

SEQ ID NO: 12023 - DNA, 2300 bp, Homo sapien
tcccaaacccgaaaggagagaaacaaagtgtgattgatttcccaaatgcagaaaagactacccaagtccccagccaaggaaggacgctggcctgtggtgaagacactggctttgaaatggctcaactacgtcccaagcaccctttgtgcatcttaattgccctgggaaatcagggaggggtggcagtttggagcttggaaagctggaaggtggggacgaaaggagtttttgcccctcatcgccaatccttgaggttcctacagggaacctcagacaacagctgtcttaggggtttccttccagctccaagcagctgtattatctatagctttgagagggtctgtctctgtcaatggggctgattcctcagcacctggcagggcctgggggggactgccagagtctgttctgccgggcatgttagtagcacagactactgggataacctcagcaactgtataccttagcactgcagagctgcggtgttgtcagacacagcccttgcagttcgtggtctacccccacttgcctgcaccccccttatagctgctcaatgtcctcagactgtaccttagtgccttggttaccaagcaacccccacagaggcctcctcctggattttcccttccctgctatgcccaccccaccttcaaaatgtacctgctgcacccatcccccaggcctgcctcactccttccaagctgacagctaatcagatggactaatccgcatgcgcggaagagctgtgcttgggaagaagggggagatttcacaccaaatcgtgcagtggttgcctagacacggagccagtcaagcttgcatgccccgttgctagaagagcatggcatcggttgtgttctgtgctcgtaggctgggccccagctccctttcctcccctcctttgtggctgttcctcaggcctgcagaggggaagatttttcctgtcctgttactctgcctcacttgccagaacactagtcgcctccagctctggataaagctgaggctgggtgggccagacaacagctgtcttaggggtctccttccagctccaagtagttgtattatctatagctctgagagggtctgtctctgggctcaggcctttagtacctgtggggcagagccaggaacgtgagtcaggcaaaccgctccaaactaggaccaatgcagctgggtcctgctctctgcgcatagggggtccccacatctttggaatcccagcccacctttccaggctaccctccacaggccgggctccactcccatctgctgaggtttcccaccttgaatcctgctgccccgattagctgtataaccttaaagaatgcactgtccctctccattaaatgaagtgcttggatggattgctaaaggcctgtctggctcggaggcttggtgacctcaacacattgcctgctggtccaaggaaatcagtgcctgagccagagtccccatctctaagctccatggttattgttcttgccacctggctaggaaatgtccttccagctgccccagtctagctgcctcaccctggggccatgcccccaactctgtcctacccttctctgctgctgacactcagccccttcccagcttccagttggatacaggacctgggccaggagagcagggaggacactgtggaaatgcggccaggccatcaggggcctcgcagcaggggactggagggggagcagtgtccagggccagaagtgccctgcgggagagccaggacattggctgcctgtggtcttggtggtcgtggtcagttccctctcctgccagctgtggaatgtgaggcctggcctgggagatatttttgctgcactttgagccaccccgccccctggaactcagaccctgcacagtccatgccataacaatgacgaccacttccaattgtttcctagctggagaggcggggaggggagcactgtttgggaagggggggagcctgggggaaatgcttctagtgacaacagccctttctaaatccggctagggactgggtgccgttgggggtgggggtgccctgctgccccatatatacagcccctgagaccaggtctggctccacagctctgtcctgctctgtgtctttccctgctgctctcaggtaggagcgggagctggaggctttactctgggataagggggctccaggcttaggaagggattcctcttggaatagcaagcttcatgcaggacttcatgcagagtaccaggtccagtcactgggcacacatgtgcaggtctaaacatgggcgtatgtgccacaggagttcctaggggaa

SEQ ID NO: 12024 - DNA, 2300 bp, Homo sapien
gtagctgggactacaggttcaagtcaccgttcctggtggacaattattttaataatcaaggccgggagcagtggctcatgcctgtaatcccagcactttgggaggccgaggcaggtggatagtgaggtcaggagtttgagaccagcctggccaaccatggtttagtagaaaccccgtctctactaaaaatacaaaaaatgagctggatatggtggcgggtgcctgtaatcccagctactcaggaggctgaggcaggagaatcgcttgaacagggaggcagaggttgcagtgagccaagatcgcggcactgcactccagcttgggcaacagtatgagactccgctcaaaaaaaaaaaaaaaaaaaaaggccgggcgcggtggcttacgcctgtaatcccagcactttgggaggctgaggcgggtggatcatgaggtcaggagatcgagaccatcctagctaacatggtgaaaccctgtctctactaaaaaaaaaaaaaaaaaaaaaaaaatcagccgggcgtggtggcaagtgcctgtagtcccagctactcgggagggcgagacaggagaatcgcttgaacccgggaggcggaggttgcagtgagccgagatcgcgccactgcactccagcttgggcaacagagcgagactcggtctcaaaaaaacccaaaatatggcagtgcaatttgttttctcattgctatcataaagcatatgaacaaactaaatttcaaattccccgaaaaggaaaagtttattgctgatctaattagacaggtccgaaaatttatgtagaaatagaaacttttcataatacaaatcttgataaaacattacaaaagctactggataattgactaagtatgctgcaacagcatcctgagcttccacagtgggcctgaagcagcaaattaaatgttagaggagtggggactgaacaccctcctgccttcttgaatccagcaagatctagataccaggatttccttacctcacctgcccagatacaggtgttattcttaattccaaaagacagcttcaagtcggtaagatctgatttctagacccagctctgttggacgagttgtgaacaaaaaattatacactatcattcaccctttcggtgctttatttcctaaggcatgggatgggaacaatgagtatccgtccaacctacttcaccagcttgtgaaaaaccagagtgagagaacacatctgaaagcactgggtaatgatgaggcaggttatactgaaacatgcactgccagagtttgaaccaagttctgctgaagacctgtgtgaccgcggtaagtcatgtaaatatgaaccgttccccaatttgtaaaacgtattcttttcatgtccccaaactggtaggagcgaagagtgtcggggcgttattggagccgtttctcagcgctccacagtgcacaccaagagggcaggtgtcctcgcactcggtttctaaactctggctctgggcttctctagcctcgctctcttatttacagatgaagaaggctcagagaccgagtgacttgtccacggtcacacaaggagtagtgttacagaatcgattccagggccaccgggtctgtaaggcatttggcgcggtggccgttggatgagcagccagcaatggcggctctgcaatgtcgacaccgcaaagccaagccaaggcccatcacctagcggccggttcacgcactacaagaaaagtgccgtgaaaaaagactctgggtgctgcggcagacgggagccaatacgcgctaagttcgctctgctaattccttttttctattggtccttccaactgtcaatcaattatttgactgtctcttattggcttgccgtcaatcattttactcagtctaccaatcacacgctctttgccaagtgctttttttcgtcctgacgactctttctgagtctgacgaatttagccagttcctttattccattggccagatcagactcctcctctcgtttatcctgttgggggcggaagtgagaaagcccttattcgtattggcttagatttgcaagcggcagttgtctatcaaatctatcaagtcgcccttagcgctcaggaagtacgacaccggaaggggtgggctttgcgaagatggcggcgctggtgagtttggtgtggtttcttcctcgcgtagctattgtggagttgtcctttgccttcagcggctggaggcaaactgttggtaccagggaagggtggtgatgaaagttgcttcagggaggcggcctccctagagttaccgttcctgtccggtaacccaaggggc

SEQ ID NO: 12025 - DNA, 2300 bp, Homo sapien
cctcactgctgtccctttgttcatggactgttaggatgctgctgacctgggtggggacggcttatccatctgccagcttccaggtcagaaccagccctagttacttgatagggctttccacaaagcagaatactgcttctgtgggaataaaatttaaaatttaaaattgaaaattgaaagttagctgggcctggtggtacataactgtagtctcagctacttggagggctgaggtgggcagattgcttgagcccaagagttggaggctgcagtgagctgtgatcatgccactgcactccagcctgagtgacagagcaagagcctacctcaaaataaataaataaataaataaataaataaaaataaaacttaaaaagtaaggcctctatggccaaataagtttgagaattagtgggttaaacatgatcaaccatttgggttttttaaccagctcctcagagcctttaacataccagcatacattgtgaatctcttaaaagagggaatatgcagtatttctcaaactaatttgattggggggtcctttttttcttgaggagcatttcatcagattaatgtttcacagagcacacccaggaagaagtttcactatactggcatctctctcctttttaaaaaaataacaactcaaagttagatagcccttactgacttattcctaaattcctgacttttgaggtaggtaagagtacacacttttcctactctggaactgcaaaggcaggcagtgttatgttgtggtcttcctaaggcagtcttacaggcactgtcagcgattctctgctattaataattcccattgatttgataccctcacatttccctatattgatctcccatgtctccctgcagcagatgttcctagaatgctccttccccttgacagagaggtagacaagggcaagtcaacagggacccctctgagcccagagtgttctcttggtgacctggtctgagggtcagtgtggctgaattgacaaatagtagctgttgactccctggtttggggttggttttctataggagaagcaactgttggagtcagctgcctgaggaatatacttctctaggctggggtggggaaatgagcttgaagacaaggaactggctgagtcttaatttgggtaagaaggctcggtggcgctcacttggactgcagttttataccccattttccatgtctattctcctccttcccccgccccaacctgtccatcaccactcagctctcttcctccttcatccttcttttgggttctctttccctccccgctgttcttctaagaagactggctctccttcctcctcccccatcccaatctctacttctcttcacatcccctctgcacccccagcctggcagcctgccctgtaggaatgttaattagcatccacgatttaattaattcagtagctaattaatgattggggactgggggctggggagctggggtgcagggggttgggggctggaggtgacagggagaaatagcagaggttgcagaaggcatcgcagatggctgtgcggtggctggcacagtgcccaccgccatggatgcaaacacacttgcgcgcacgcacacgtatacacacacacacaaaaaggaaagggtgatcgaggaatcaaaagcaggcagggaagggcacaggggccctgggaactggggctgtgcggctgggggtggggaaggctctagatctatttgaatctgctccggaagtagaagaggagaaaaaaaagaaacaaccacaggcgcagagagaagcgagctctcccgataccccacctcaccccacccccaccccaccccagccacccctcctccctggcatgggattcatgggcaccagctgagaacggggtcccctccctctgcctgccataaatattggtactgaggacccagactcagaaggataggatattcccaaagaaaagagtttttcttttaagttgctttaaaaaatatatatgtgtgtgtgtgtgtgtgtatatatatatgcatatatatgtatatatgcatatatatatatatattttaaattgcacccgttctggtgtgagggcgaaggcgagtgaaagaaggtgactgagccaggaggagagcacagatggcttggtggtggtatggtgtggtgagttgtggggaggaaaagaggggggtctggcagaggttgggggtgggtggaatgaggaccctgttttcctcttttcgtattgctgtggatgaaggagagagagagaaaaagagagaaagtgggtggggagagaagcgaga

SEQ ID NO: 12026 - DNA, 2300 bp, Homo sapien
attggggggtcctttttttcttgaggagcatttcatcagattaatgtttcacagagcacacccaggaagaagtttcactatactggcatctctctcctttttaaaaaaataacaactcaaagttagatagcccttactgacttattcctaaattcctgacttttgaggtaggtaagagtacacacttttcctactctggaactgcaaaggcaggcagtgttatgttgtggtcttcctaaggcagtcttacaggcactgtcagcgattctctgctattaataattcccattgatttgataccctcacatttccctatattgatctcccatgtctccctgcagcagatgttcctagaatgctccttccccttgacagagaggtagacaagggcaagtcaacagggacccctctgagcccagagtgttctcttggtgacctggtctgagggtcagtgtggctgaattgacaaatagtagctgttgactccctggtttggggttggttttctataggagaagcaactgttggagtcagctgcctgaggaatatacttctctaggctggggtggggaaatgagcttgaagacaaggaactggctgagtcttaatttgggtaagaaggctcggtggcgctcacttggactgcagttttataccccattttccatgtctattctcctccttcccccgccccaacctgtccatcaccactcagctctcttcctccttcatccttcttttgggttctctttccctccccgctgttcttctaagaagactggctctccttcctcctcccccatcccaatctctacttctcttcacatcccctctgcacccccagcctggcagcctgccctgtaggaatgttaattagcatccacgatttaattaattcagtagctaattaatgattggggactgggggctggggagctggggtgcagggggttgggggctggaggtgacagggagaaatagcagaggttgcagaaggcatcgcagatggctgtgcggtggctggcacagtgcccaccgccatggatgcaaacacacttgcgcgcacgcacacgtatacacacacacacaaaaaggaaagggtgatcgaggaatcaaaagcaggcagggaagggcacaggggccctgggaactggggctgtgcggctgggggtggggaaggctctagatctatttgaatctgctccggaagtagaagaggagaaaaaaaagaaacaaccacaggcgcagagagaagcgagctctcccgataccccacctcaccccacccccaccccaccccagccacccctcctccctggcatgggattcatgggcaccagctgagaacggggtcccctccctctgcctgccataaatattggtactgaggacccagactcagaaggataggatattcccaaagaaaagagtttttcttttaagttgctttaaaaaatatatatgtgtgtgtgtgtgtgtgtatatatatatgcatatatatgtatatatgcatatatatatatatattttaaattgcacccgttctggtgtgagggcgaaggcgagtgaaagaaggtgactgagccaggaggagagcacagatggcttggtggtggtatggtgtggtgagttgtggggaggaaaagaggggggtctggcagaggttgggggtgggtggaatgaggaccctgttttcctcttttcgtattgctgtggatgaaggagagagagagaaaaagagagaaagtgggtggggagagaagcgagacagatggcagagtggagaggcagcagccagtgccggcactgcccagcctgggcggacccagctccctccgcctgccagctctccaaatgccacccttcccccatcctcccctctccccatccccccagcttggcactgatctcggggagagagagggagggaggctgggcaaagagcatctgttccctccattctcccagctccatcggctgccaacctagggccatcgtctgcctccatcacccctccgcccgcccgcctacccacccaatcccaaacgggtgctggatcaggtgctgaatccggctgcctcctcgggtaccagtcactgtgcattgctgtgtgtctgccaccgctgcctggcactcatggggccgtgtgtgtgtgtatgtgtgtgtgcgcgcatgtacatgtacgcataagcgtgtgctgtatgtgagcctcctgggcatgggtgggggttggcattgcggttgccaatctagtgtacaaccagaaggacagagggatggagtggaagaaggaggggaga

SEQ ID NO: 12027 - DNA, 2300 bp, Homo sapien
acaggcctgtgccactggtgccagcctggatgcaggctgggtaggtctggcagtcaggtgatggtggggcctctggcagcctcacccctctggaagtgtggctgagaatgtgctgagagggctgggccagaattttcctgggccactgggggagctgtggtgtttattcacattaggaaaaagaagaaggaaaaagaaagatggaaaataaggtgggagctgctgagcctgagggaggatgagctggcttctgagcagacaggtagggcccctttccaggtgatggttcacagaggcagagtgggcagggacaagggagcctctgggtccagaaaatgcccagaggaaatggaaccatttcacagagaagacacgacaggataggataggtaagagaagaaaactaaatccaaggtgggggcagtaggtacagagccatctgttagctggagagttgaggcaggcagcaaagactgggaaagacacaccaagaaaaggcagagaggccaggatggtggaagagggccagacaaagaaggagtgcaaggtagcggcctaagctaggcctttgtcccaatccaagggaaagtggggaggagccagctctcaggactgtggctggaggctgggtctgctataatgccttcctatctggctagttcctcttcaattaggagtgagaggccaagcgtggtggctcacgcctgtaatcccagcactttgggaagccaagatgagtagatcacctggcatcaggagttcaagaccaacctggccaatgtggcaaaaccctgtctccactaaaaaatacaaaaattagctgggcgtggttgcacacgcctgtaatcccagctgcttgggaggctgagggcaggagaattgcttgaacctggaaggcggaggttgcagtgagccgagatcacgtcactgcactccggcctgggtgacagagccagactccatctaaaaaaaaaaaaaaaaaaaaaaaaggagtgggggcgggccagtgctgcatccaaaggactatgtgatggtgggtcccatccttccctgacacttcgtccactgcccatatgttccctccaggtatactgctgtccatactgcagcttcctgagcccagagtccagccaggtgagggctcatacactctcccagcatgcagtgcagcccaagtacagatgcccactgtgccaggaacagctggtgggccggcctgccctgcacttccaccttagccaccttcacaacgtggtgcccgagtgcgttgagaagctgctgcttgtagtgagtacaggctgggtgaggacggtacaacaagaccttattagggctgtgcaggaggggaggaagaggcaggggtattcaggcaggtgcatgtgttgggggcagggggcattcaggcaagtgcgtgtgttggctgggtgaggacggtccgacaaggccttgttagggccatccaggaggggaggaagaggcaggagtattcaggcaagtgcatgtgttggcaacaaaagcagcatttcatggatttgaagttggattttagagagggagactcagaactgagcttgtctagctgcctctacttaagagatgaggcagaggcttctgtttcacctccactaagtcctgagaagagttgttgaacagcaggtaccagcctgccagaccaggtagcctcaaagaatgatgacttctggtttggggaaagaggaagccagataggagaggtagcagcccaggctctctcatctgtagcaaaagcagcaattaggtgggaggtttgttcagacaggaggctggatctgtggcaagggatctcggcacaagtacaggtgtagggcagatgggtcaggagtggcataggggcagtggggggtggtggtgaagccactaggctttttctcattgcaggctacaactgtagaaatgacatttacaaccaaagtgctgtctgcacccacattaagccctctggacaatggccaagaaccccccactcatgggccagagcctacaccgagcagagaccaggcagcaggtaaggaatggaacagcaaacctcccaaggtaccaggaaaggggactccatgggccaacaaggtctgaagatgactgaggccaaggtcaactgccttggtattgagtgggtggggtctggcttaaacgaagttccctcctcattgtactttcttctctctcccctagaaggccctaacctgaccccagaagccagtccagatcctcttcctgagcctcccctggcctcagttgaggtcccagacaaaccctcagga

SEQ ID NO: 12028 - DNA, 2300 bp, Homo sapien
gctaattttttgtaattttagtagagatggggttttaccctgttagtcaggatggtctcgatctcctgatcttgtgatccacccgcctccacctcccaaagtgctgggattacaggtgtgagccaccacgcccggcctgtttttggttttgagacggagtttcactcttgttgcccaggctggagtgcaatggtgtgatcttggctcaccgcaacctctgccccccgggttcaagcgattcttctgcctcagcctcccgagtagctgggattacaggtgcccaccaccacgcccagctaattttgtatttttagtagagacagggtttcaccatgttggtcaggctggtctcgaactcctgacctcaggtgatctacccacctcagcctcccaaagtgctgggattacaggagtgagccaccatgcccggccagcctctgctttttcattgagaaaatgtggcctgcctcacagttacctgtgaggattcagtcataaactgtcacatagtataaactcaaaatgttcatttatctctcctttttgtcatgtgaacttcagggttttgttgtgttgtttaagagaagtaggctatagcagttagtatgggccctggagccagaccatggaggtttttgagtcctggcactgtcacttacttattggccattggaccttgggcctgttaattcacttgtttgtgccttagtttcctcaataaatgagactataatagcatctacctcatgcttgaggtattgagaggagtaaacaatgtatgtaaaagtgcttggaactgtccctgtgcattcaagaaatcttaaaaattattattagaatacaggagcggccgggtgaggtggatcacccctataatcccaggactttgggaggctgaggccggtggatcacctgaggtcaggagttcgagaccagcctggctaagatggtgaaacccccgtctctactaaaaatacaaaattagcagggcatggtggtgggcacctacaatcccagctacttgggaggctgaggcaggagaatcacttgaacctgggaggtgaaggttgcagtgagccgggatcatgccactgcactgcagcctgggcgacagagtgactctgtctcaagaaaaaaacaaacaaacaaaaaaacgggctgggcgcggtggtggttcacacctgtaatcccagcactttgggaggccgaggcaggcggatcacaaggtcaggagttcgagaccagcttgaccaacgtggtgaaaccccgtctctactaaaaatacaaaaattagctgggtgtgttgatgcatgcctgtaatcccagctacttaggaggctgaggtaggagaatcgcttgaacccggtggtggaggttgcagtgagccgagatcgcaccactgcactccaacctgggcgactgagtgagactccgtctccagaaaaaaaaaaaaaaaaaaaattcaggagcacttaataagcgataaactgaagatgaggaggagcccgaacctcccccaacccagctcaggggactatgtaaccgtgtggaggaggcagaagctctcagagactaaagagtaattgctgcggtagagaaggttctagtacccaatttcgcggggggagatgggggaggcggaataataaggcaggaagaagagaatgaaaaaaggaggccttgggcggctcagggcttgttctgaagctgatttaaaacaaaacaacaaaacacatgtatggtttctgcaggccacaggatgaagaggagaggagacggaaaagagtttaaaggggcctgccctctttgcaggcaccggcttgaacctggaggcgacctggtgggctggccggcctgcccccggccctgggtcccgcgaggcaggcgggcgggcgcgaacagactacaactcccggcatgcgccgcggcgggcgggtcgctgcacctgctcagtggggcagccccgggcgcctgggtattgattattccattgtgtgggacgcctagactccagccagtgaatgaggcggaggagtgagggcgaggaggaggaggaggaggagggcgaggaggagaaggaggaggaggaggaggaggcagggagcgagcgagtgcccagggtgaatcaatggaaaccccctcacgaagccggggaaacacttcagccgcagccaaatagcattgattattttccttcacttccctcaccgccgtgaatttatttatttatttttttccgtctccgtccctgacgccccggagcgagcgctggagggagggaggaggaggggaaaaaagag

SEQ ID NO: 12029 - DNA, 2300 bp, Homo sapien
ggtggggtggcacgtgcctgtagtcccaactactcaggaggctgaggcgggagaatcatttgaacccaggaggcagaggttgcagtgagctgagacgccagagtgagactctgtctcaaaaaaaaaaaaaaaaaaaaaaaaaaagcagatgcttaggaaagtggagtagcttgcggaaggccaaacatctagaaagtgaagctgggagtcgacctcaggtctggctccggaaactggtctttctgttcaaataagctgctgcttttgccccactggattggatcttataacataaggaaaaattaggtcttcatcccaggttaacaaaaccggaaagcaaaagatggatgaaaagcaggctttaggagctggggtttcttctctccctaaccaacagtgcttaacatggagtggggacagaggttgacccaagctactccaagttcaagatgccatttgtttatttatttatgcacagggtcttgctctgttgccgaggctggagtgcaggcagtagcaggatcgtagctcactgcccttgacctcctgggctcaagctatcccgctgcctcaacctcctgagcagctgggaccacaggcatgcactaccacacccggctaattaaaatttttttttttttttttttgtagaaacagggtcttcctatgttgcccaggctggtctcaaactcctggcctcaaatgatcctcctgcctcgacctcccaaagtgctaggattacaagtgtgagtcaacacacctggccaaaatgccatgtctttaaaccagtgtccttctccctataatacctctcactggtcatgtatttccagaaacatactggtgagagggcaggtgttgagaacatggcacttctcacccatcataggaaggagtccaggagttaagagccacggttcctcagggagcttcctcacatggaaggtcagacatatagttagagtctccagataaccatagtcctcagagggagtaagaaggaatcatctctattaatattttgtctcccaaagcattcaaagggccaacccccatgttttcctgaattttatttttttggggacagatggagtctcgttctgtcgcccaggctggagtgcagtggcgccatctcagctcactgcaacctctgcctcccaggttcaagcaattctcatgcctcagcctctggagtagctgggaacacaagcacgcgccaccatgcccggctcatttttgcatttttagtagagacggcgggccgggggggtttctccatgttggccaggctggtctcgaactcctgacctcaggtgattcacctgcctcggcttcccaaagtgctgggattgcaggtgtgagcaaccgcaccggcctttctgtattctaaatgaacataagtagttctacacctgacaaaaactgcttagggaccgctggaaactctgacaaactcctcagtctagcactcaaggcttttccctcaactgcatttctagcctcgtcttctccttacgtaccacccaggtgctctccagtttctgggcctttgcttaggctattcctgtctccatctaggtctccaactgttgaaataccatcatatctttagttcctggccaaaataccactttattctctgacagaaagtttctcacccactcttaccctcaacgttcatgccaggaggtattagatcccctctaaaactccagagtagctaaactggactttattacgcgctgcccccgcccccttccctccccccaccccaacccccctcgccaccattgccactggcctgcgcttagctggctgctatagcagatatctgttggacggtgtgaatggcttgtattccaggcccatctgcctgcgttgggggtgcggcggggggtgttggagacgggactggggcttgagctccttgcacccgactctccccgccgccttgtagccccagttcagctttaggtagagtaccgcaggcaccaagtgcagctttcctgtcgccatagcgacgggcggggcgagatggcaaagtctccctttggaactacatctcccatcatgcatccgcgcctcggggtgcctggctcagcctcaggcatgagacctgtaccagcccccgggagccgtgcggggccaacaatgaggagcagaatgcaaggggcggcctcgctcccctggccaccgcgggggtcgcggcctcccattacatagcgcgtgtctcgagccctggcctgctctcggcaccgccacaacgggcgtaatatggccgctggtgccgggacctgccg

SEQ ID NO: 12030 - DNA, 2300 bp, Homo sapien
gccctccctggctgcttcctctcgctcatccgtcagatgcaatctgtgggccgcccctctcccctggccgctaagcagcctccattgatttccgctcgtgtttataggatttccacttagccgtgatcagtagttaagcacaggaaaatcccttgccaccccccctcccttggtcgatgccattgattctgccagcggctcctaaaccgccttacagctgagttagaagatgaggagaggcagcagggatttccctgccttgggatgtgggaaacagaagaaaagttgaggaaatggttgggaatcgctgttagaactctagaaattctaatctgactttgccactgtgcccagctctggcccagagggtagagtgcctcctgtggaagtttaggggcaaatttgttccctgacctggagagggttagaaagaaccaacagctgccccctccccgcccccgtgttgagacaggttctcaaggctcaggggaagatgcatacctcctatgtaagaatgctcttcccttgctgttattcatacacactttccacttcaaatatacccaaatatggctttcctcacttctcaggctttattgggctttatttgtgggagaagggggctggtccccagtttttgcagtgcaaagccagagcgccacctgctggtagccctcaggtgtaggttcgaagctgctggggccccctggggtttgggacacaggagaatttcaggctgtgagtggagacagttactgccacgattccacaggcaagttgttcacctcaaagatctcctgcaccgactggtgaaagtggtcgtaggtgaggcgcagctttagccgcaggggggcctaggaataggagagcagggaccagggttagcacccacggcttcttctatccctgggtcttgtcttgggggaactcctgaagctcaccttgttaggattgaggattctgaagagctgggtgataggaaggccaccccgagctggaactgtgttcccactgggggcctgcagctgcagctggagactctgaacacaggagtttaacagagcacagtatggcagtaggtagggctcaggcagcccctctatactcagtggctccacacccttttcctgtaactccccaagtgctgatctccagatgactcaatcccatctcacactgtctcccacccacctcctccacttagtggccttttctcctggagtccccaggccacctctgaactctgatctttacaaaccttgggcacagcagcctggcagatgaaatgggtgacatcaccctctgagaagttggtggcagtgatggtgattaacagcaaagcagggttttcagggggtcgaatgaaagacagattcagctgtactccctcacgctcaaacactttgagatctgggatgggagctggagtagggagacagaagcagctcagtgtgcaggtttgagagaacatgtttgttcattcattcaacaaaaattgagtaaacacctactggccctgcactactcgaaaggctagtaacaaagtagacatgtagatgaggatggagcttactgtctaatgggggagagaaacaataaaaaaaggccgggcgtgagccagtaatcccagcactttgggaggctgaggtgggtggatcacctgaggcccggacttgggaggctgagacacaagaacagcttgaacccgggaggcagaggttgcagtgagccgagatcacgccactgcactccagcctgggtgacagagcaagacgctgtctcaaaaaaaaaaaaaaaaaaaaaaaaaaaaaggcaagataattacagaccataatagatgctatgaaggaagtaagtcatgccagaataactggggagaactgacttaaataggagtggtaggggaaggcatctgacattttagctgaagcctgaagagtgagaatgagctggtcatttgatgtgctggggaaagaacattccatgtaaaaaagaacatgaaatgccaagggtgggagggtgtgaggagctgagaagggggcagtgagtgggtagtgggaaagtggtataagaagggttggggaggaagcagggccctgtaggccagggaaagaagtctggaacaaagggaagacagatgaccatgattgacttcattcttttacctcctgagatggcgatgggatgggggacacacaggaagaagcagggtccatgagcctcagcccttggcttaggaggaggagcagtacatttccacctaccttctctaagacatcttccctttgcttaggcttacc

SEQ ID NO: 12031 - DNA, 2300 bp, Homo sapien
ccccccatcctttgcttcaggtctatggacagaagaattgaaaatcggatgggaaccccagctcacaggagaagggtagtgcacacacacaggcacacacgcaatagactctcttgcccctggcccccaccattcacttccccgacgctgaccccaggcatcctgctgggcaccatcacgctgatcacggagctctgcgaacgaagccctgcagccctcaggcacttccgaaaggtgggctggtgaaggggcaggccctgggcctggaagacagggtcagtggggaaggaatggggctttagctggagaggattagaacgaatgcccaaagttgtgccctccctccaggtggtaccccagctggtacacatcctccggactctggtgacaatgggatactccacagaacacagcatatctggagtcagcgaccccttcctgcaggtggggtgacctttcactgctgtatccctggatcagagagggcatagcagtaagaccatgaccagtggtttcctcccagagaacactggttctctcagtgtcctgggcagcagagtagcaggcacaggattgctcgggtcatcccaggacctgtgaggggagagggaatgcctaaaagtcaggaaaatacagtttgttaacaattttttttttaagcctgtcctaaactcccctggcctcacacacctctgttcccctcctaggaccaagggacctgtggaggtgaggaggtgggggaaggctctagggagcgagccagaccctcacatgttggagttttctcctcagccccacgactccttatcctatgaacccctccaactttccattttcaacccaacctcaggtccagatacttcgtctgcttcggatcctgggccggaaccacgaggagagcagtgagaccatgaatgacttgctggcccaggtggggcctgggagggcactggttagctgtgttgcttggagaccccatcagccctgggtgcccctcacatgactcgtcactgtgcagtggccgtgtaattgcctctccatctcctctagacagtgaactccatgaagaagggacacagtctgtcttagtgctattgccccagtgcccaggctggccctggcacatagtagagcctcagggaactttgttggatggttgaaggatggacagataacatgttggagtccttcaagaatcctgaggattacctgggcttgttggcatgtgcctgtagtcccagccactcaggaggctgaggcaggaggatcatcagagcctgggaggtcaaggctgcagtgagctttgggcgacagagtgagaccctgtatcaaaaaaaggagacctgaggagggccttgagcagatacatctcctctctcatccactcaggtggccactaacacggacaccagccgaaatgccggaaatgcggtcctgtttgagacagtactcaccatcatggatatccgctctgcagctggcctacgggtatcaccccttatgcctctcccactacggccccgcccaccacctcacccacacaggtcctgcttgctggtttctccctcctagccccatcatcttgcgccaatgtgttcccagtcctcaatggctgagcaggttgctcctttccgactgaccccaacttctgcctctcataggttctagctgtcaacattcttggtcgcttcctactcaacagtgacaggaacattaggtaatagtcccaactgtctacctaggctgtgccactgatcccctggccctctgccctccttcctccagagcctcctgatccatttctctcttatcttatccctatacccaggacaggacggggagtgggggctgatggccatggtatgatagaacctcccccatcctgaccaggtatgtagccctgacatcactgcttcgactggtgcagtctgatcacagtgctgtgcagcggcatcggcccactgtggtggaatgtctacgggaaactgatgcctccctcagccggtgagcagtgatagaggggacaggagggcagggcagaggttcccagtgccctgtggccaagactcgagccagtttagagcagctggagtaaggggactaagggggacaggtccctggggaagcagagggcctgaggcatggaccaggatgacctgggctacctgcatggaaacctctttctcctgccaggagagccctggaactaagcctggctctggtaaatagctccaatgtgcgagccatgatgcaagagctgcaggcctttctggagtcctgccctcctgacctacgggctg

SEQ ID NO: 12032 - DNA, 2300 bp, Homo sapien
tatggtttcacccctgcctcttcctggtctgcccccttcactatagatggagtgcctgaaactgatcgcctcctccagattcacagacaagagggtgggctacctgggggccatgcttctattggatgagaggcacgatgcccacctgctcattaccaacagcatcaagaagtgagagggttctggcaatcacttggaatcagggagatgggagagtagggaccttggaaatcccaggggactgcctgttgtgggtattgaaaaggactgattttctcagaggtttgactgaccgtcctcccaaaccctgcagtgacctgagccaggggattcagccagtacaaggcctggccttgtgcactttgagcaccatgggctctgctgagatgtgccgagacctggccccagaggtggagaaactgctcctgcagcccagtccctacgtgcgcaagaaggtgagatggcgggactcctggcacgtgctcctgcacactgcctgctgcgtgctatatagtagtagatgcaggggtccatctcctctgacccctgtctgaggcccctgacctctgcaggctattctgactgcagtgcacatgatccggaaggtccctgaactctccagtgtcttcctcccaccctgtgcccaactgcttcatgagcgtcaccatggtaaggctgtggggccccccatcctttgcttcaggtctatggacagaagaattgaaaatcggatgggaaccccagctcacaggagaagggtagtgcacacacacaggcacacacgcaatagactctcttgcccctggcccccaccattcacttccccgacgctgaccccaggcatcctgctgggcaccatcacgctgatcacggagctctgcgaacgaagccctgcagccctcaggcacttccgaaaggtgggctggtgaaggggcaggccctgggcctggaagacagggtcagtggggaaggaatggggctttagctggagaggattagaacgaatgcccaaagttgtgccctccctccaggtggtaccccagctggtacacatcctccggactctggtgacaatgggatactccacagaacacagcatatctggagtcagcgaccccttcctgcaggtggggtgacctttcactgctgtatccctggatcagagagggcatagcagtaagaccatgaccagtggtttcctcccagagaacactggttctctcagtgtcctgggcagcagagtagcaggcacaggattgctcgggtcatcccaggacctgtgaggggagagggaatgcctaaaagtcaggaaaatacagtttgttaacaattttttttttaagcctgtcctaaactcccctggcctcacacacctctgttcccctcctaggaccaagggacctgtggaggtgaggaggtgggggaaggctctagggagcgagccagaccctcacatgttggagttttctcctcagccccacgactccttatcctatgaacccctccaactttccattttcaacccaacctcaggtccagatacttcgtctgcttcggatcctgggccggaaccacgaggagagcagtgagaccatgaatgacttgctggcccaggtggggcctgggagggcactggttagctgtgttgcttggagaccccatcagccctgggtgcccctcacatgactcgtcactgtgcagtggccgtgtaattgcctctccatctcctctagacagtgaactccatgaagaagggacacagtctgtcttagtgctattgccccagtgcccaggctggccctggcacatagtagagcctcagggaactttgttggatggttgaaggatggacagataacatgttggagtccttcaagaatcctgaggattacctgggcttgttggcatgtgcctgtagtcccagccactcaggaggctgaggcaggaggatcatcagagcctgggaggtcaaggctgcagtgagctttgggcgacagagtgagaccctgtatcaaaaaaaggagacctgaggagggccttgagcagatacatctcctctctcatccactcaggtggccactaacacggacaccagccgaaatgccggaaatgcggtcctgtttgagacagtactcaccatcatggatatccgctctgcagctggcctacgggtatcaccccttatgcctctcccactacggccccgcccaccacctcacccacacaggtcctgcttgctggtttctccctcctagccccatcatcttgcgccaatgtgttcccagtcctcaatggctgag

SEQ ID NO: 12033 - DNA, 2300 bp, Homo sapien
cttctcctcttcctggctgtgttttctcctatctttctttctcttcttcctttcttttctgtgctcctttgtttttttctctcgctttttctttccctgtcttctttcagattatctcatttcttctggatctgtctctgtattcctcactcccttccccatcccaaccccttctttctctagattgtttacatatgaagggcttttctctctcagagttgctgtcttctctgagacacacaaatctaagtcagaccattgctccacgccctcccaccttttctttagacctcaacttcgctgcgggtgggggtttggtgtcctaaggagactcctggaagctgaatggagaggaggaagaaaatgaagaaggagtgattgaatgtcgggcaaggcactggctgagctgctgtggctccctagcctaaggggcctgctgtccctctgaggcctagtgaaaaagctgcaggaggtgcatcctccacctctaatcttggaggctattatcttacctccaagcactgagctgggttactgcccaattccatccttccctgaaggagagaagggaagtgaaaagtagagtaactccccagcatttccctctttttctcctcatcggccagcccctcctccagccccctctggtggcatgccatgccaagagcaacgtgtaaaggaacagagaatatccaatgcagtcaagtccaccctgcccagactttgccactgacttctcccacccttctgtctcccccataatagtttatttggttggtctggactcacttgtggcctttgattaaattcctaaggggcctgaagaagacatttctactgcagagggttagaggcacttgagcaaggcccccacatcccaactctgggagttgtggtgggaggaggcacttctgggggataggaccagacaagataacaggagctcacatggaagcagaagctgtgacaagtttagtagtcccaaaatgggttatatcccttccccctttacatcagaatcttgtgaaatgggaaaacaacagaaggaggggatcaaagatagctgatctcacatgcttcccaggcagggcagaggtgggagtcaaacccgggtgacaggtgggtggagagccctgtttgaggttgtggctgatccctctctggtattagtttttcccctgggagcaggaagccctaggaagaggggactgcagggtccccaggggatctttcctccctcccctgcatgaggcagaggcaagctgcctgccaaccccctccctcaaggaatggccttgcccaggaatgcccaccacacataccctcttctttttttctagtcaaactcttgtttattccttggcttgcctccctccttcctcccctctcaacctttacttctgatttctatttcatggaatttgggattgaagttaaactacaacagtgccgccaacaccaagtcttgcaggaaaaaaatacaaagaaatttaacaaaaaaaatatattaataaaaaagttcaaaaaaggggggggattgtcatctcctttggggtgcgatggcttcaaatccaaactgaggctctccgggtggtaaggatgtgcgaggaggcctcttgaagaactccaggcctatcatgctgtctctccgctaaagcctgaggcccgaggtcagaggattcaggaaggctctgcagtcggcccaggagggcggggtcccgtggtggaggcggggagagggaaggaccgcacggagcaccaacccctgctcggccccgtaccaggaagcgctggggggcagaggagcggagttgaggcagaagccaggtgaggctggagtcctggggtaggcaggctgtcgctgccgctgccgctgcctgagatggaaatcgggggaggaagctcgcggaagaaacagcggagggtcgtggaaaaaaaagcaatggctgagctagggatggggtaccaggtagggggaggaaacggtagagagaaataggtggggctcccgcgcatgctcaataggaaggggcgccggtggggtgcggacgcatgcgtagtgggcttctcgggcggtggggtgggcgcggaatttggagacccacttcgggaaaggtaaaatgcgggcgcaattttagggtacctgtgggacccgggctcttagggtcttgacacaggacgggcctgggccgaaagcccaggcacgcccgaccagagagtgtttctccactcccggactctgccagtcaggatggtggtgccttcgctgaagcttcaggacctcatcgaagagattcgcg

SEQ ID NO: 12034 - DNA, 2300 bp, Homo sapien
cgggaagaagttgaaatagagaagaaggcagaaaaccgggagaggcggagtttgcccagaaccctctactctgattgggctctaggccttctgtttcctagcaaccacatcctcaccccttcatccctctgccttactgcagtactggctgctgctgccaatgtctgctactaaggccaggcacctcctgcctgggacacatgatatgctgatgggaggggactagagggaggaggtggaagggctgtccctgcattgaaggtgtcagaggaaaggtggggccctgcctgggagaagagggggttttgcaatccaaaacaaatgttggcgatccccctgctccaggctgtgcagggaggtgcctgagacccttcagctctgccacctcagtcagggcaggaaggtgggccctgtcctcggggactgagtctgcttccccctctgtctctctagggagctgccaaccccctggtggtgggagccgtggccctcctggacctcagcctggcattcctgttctcccagctcctcacctgaggctacttcctggcctggttctggctttggttgcgtgcctcttcacccctttgacctgccttttttctcttctcctcttcctggctgtgttttctcctatctttctttctcttcttcctttcttttctgtgctcctttgtttttttctctcgctttttctttccctgtcttctttcagattatctcatttcttctggatctgtctctgtattcctcactcccttccccatcccaaccccttctttctctagattgtttacatatgaagggcttttctctctcagagttgctgtcttctctgagacacacaaatctaagtcagaccattgctccacgccctcccaccttttctttagacctcaacttcgctgcgggtgggggtttggtgtcctaaggagactcctggaagctgaatggagaggaggaagaaaatgaagaaggagtgattgaatgtcgggcaaggcactggctgagctgctgtggctccctagcctaaggggcctgctgtccctctgaggcctagtgaaaaagctgcaggaggtgcatcctccacctctaatcttggaggctattatcttacctccaagcactgagctgggttactgcccaattccatccttccctgaaggagagaagggaagtgaaaagtagagtaactccccagcatttccctctttttctcctcatcggccagcccctcctccagccccctctggtggcatgccatgccaagagcaacgtgtaaaggaacagagaatatccaatgcagtcaagtccaccctgcccagactttgccactgacttctcccacccttctgtctcccccataatagtttatttggttggtctggactcacttgtggcctttgattaaattcctaaggggcctgaagaagacatttctactgcagagggttagaggcacttgagcaaggcccccacatcccaactctgggagttgtggtgggaggaggcacttctgggggataggaccagacaagataacaggagctcacatggaagcagaagctgtgacaagtttagtagtcccaaaatgggttatatcccttccccctttacatcagaatcttgtgaaatgggaaaacaacagaaggaggggatcaaagatagctgatctcacatgcttcccaggcagggcagaggtgggagtcaaacccgggtgacaggtgggtggagagccctgtttgaggttgtggctgatccctctctggtattagtttttcccctgggagcaggaagccctaggaagaggggactgcagggtccccaggggatctttcctccctcccctgcatgaggcagaggcaagctgcctgccaaccccctccctcaaggaatggccttgcccaggaatgcccaccacacataccctcttctttttttctagtcaaactcttgtttattccttggcttgcctccctccttcctcccctctcaacctttacttctgatttctatttcatggaatttgggattgaagttaaactacaacagtgccgccaacaccaagtcttgcaggaaaaaaatacaaagaaatttaacaaaaaaaatatattaataaaaaagttcaaaaaaggggggggattgtcatctcctttggggtgcgatggcttcaaatccaaactgaggctctccgggtggtaaggatgtgcgaggaggcctcttgaagaactccaggcctatcatgctgtctctccgctaaagcctgaggcccgaggtcagaggattcaggaaggctctgc

SEQ ID NO: 12035 - DNA, 2300 bp, Homo sapien
gtgacacagtgagagtgcgtgtgtgtgtgtgtgtgtgtgtgtgtgtgtgttacagagagagagaaagaatataaacatgccaaatgcagagtagacgtttgagtcagagaatgtgcatctatagatgtgtctgggagtctggatgttagagcccagggacttaagccagggaagggggaaggcagagcaccagggaacattttaggctagatagggtggagacatgtgcaggaaaaactgatctcagtaactagaggatcaggcagtgggaggaggttggttggtctccccagcaacaggcctggcaatcccgactggctgccagctgccatggaaacagcagagcctcagcagcaggtgcctctgccaggtagcctgagcctggcctgagtctgatgcctgagcacagactaagtctactgtgtgggacttgatcatccatactcttcatacacaaaaacaggcctcatcagtgcaccagtttcaggccaccaaaataactcaatacaacccaagaccatgatcctcacgctcacggctcaacaggtgcccttgacagccctgtccaccttctccttgactttgccccactgaagggccagaggcaggagactgcacatgtgcccgctgtgcaccctgagtccagctcagtttcaggacagggctagttatatacaatctgagagtcctaagacagaagagccacgttatctgagatccctccaaataggctctaaagatctttgacccaccaggtttgaggagaaggggctaatcacggctcccaaagaacataaagaagaggctatggactaagaatatgcacagtagatatcaccatcctcttccccacccccataccagactgccttcctgagccagagagaacaggcctgtggccagaggaagtcatggggtgtgatcaattcaagcccatggcagctcgtcggcctgccttttcctcagctcttttgtgccccaccctcagaattacagaactcatttaaggatgacaaggcatctacgattaacagcagagggtgaaagggaagagaaaactgaggaagcatctgacatcacagggagaactgagaagcaacagtggggaaggactgatcagactcccaggctgcctgcacctaaggagcagggaaggtggtagggggttgtggaagggagactaagggtttagccagaagtgtagttgcaatggtgagaaagcatattgcatgttagtagggagaggggatgggatcattaccgaaaggggagacccactctcattccagttccagagctcaggaaagcatgacggggggcagtggggtggtagcagtgacaagaggaagaacagtgtcataacagaagaggctgaaggaacgcaagataggaagttctcatgccaggaaatctgtacgggtagaggtaggattaatagtaaggagaagtgacagtagaaagagaaagggaggcagagactgttaacataagggagacggtggctctgaacgagggggcggggcaggggcgaagctgcttggaggggaggatcaaggtacaggaccctgtgctagaccccacagagaggcctgtgactccaggggggtgagaggggttagtaacaacaggaggtgctaactgcaaagaaggtggtagtatagctcataagcaccaagcaggactgcaggggatgtgctaaaagagtgaggtctcgactgtcactgggaagggggcaggataggaatggaattacacagttccaggagggcctggcccttgcaactggaagaagtgttactacaggacgtagcagtagaagggtgtgagaggagcaggagggtgtgatggtggcaaacacagcccaggtcagggggaggaaaccaaacgggagctgccctggcctgccaggaagggaagcagctggcagagtgtggcgaagggtgacgactccagaggagaggaggatgtgatgtagaggggacaggggctagggggctggagcatctgagcagggactaacttgaagtgggggaagttctgctaaatccctgtctctggacccgacagggcagcagacgccctcctaaaggcagtggcagccagcagtgtcgctgagaaggccgtggaggcagctcgaatggccaaactgatagcccaggacctgcagcccatgctagaggccccaggtgaggcatggacagctggggggagggcagtgaggcccctagggagctagagaggctcaggtgtggggaaacagatgagaagccctgcaagggaagtggggatgggaaaaaaca

SEQ ID NO: 12036 - DNA, 2300 bp, Homo sapien
tgagggggggtggggtggtgtgaggggggctcaggcatggccggctgcaggtcccgagccctgccctgcagggacgcagctaaggcccgacgagaaatccagcacagcgccagtaagccgaaactgttgggggaccaggcgcaccctctgcagctgctggcctgagtgctaagcccctcactgcccagcgccggcggggccagctggccgctctgagtgcagggccgccaagcccacactcacccagttcccgcccgtgcctctccctccacacgtcccggcaagctgagggagccggctccaacctcagccatcccaggaaggggctcccacagtgcagctgcgggctgaagggctcctcaagcctggccagagtgggcgccaaggttgaggaggtgccaagagcaagcgagggctgcgagggctgcgagggctgccagcactctgtcacctctcaacagtagtaaactccatgagggcaggcctcacagtgttcaccactgtgtctctagcacctggctatgtgggtggtacacagtaaactatgtagatacttgatgaatagagaaatgagtgaatgaataaatgaataaactctccatcaacagtcatgccccaagtggacccacagctgacctgttctatgctaagcacttagaagatgtggtccctttcctggaggcttaaattttacatttctccaacctcatgtaaattgtgggaagacacgatgcaagagaaatccctatttattccaaacctcatgctctttattttaccagagtactcaaaatggaggccctgagcctaagggagggtccccaagttcatggaatcctggcaggaattacagggctcaaatggtctgaagtctagtgttctactgctagctctgccagttctgttgtcattcacctctggtgaatgacttcccctctgggccttagttctcttctctgtaaaatgggaatgcagtgggggaggagtggtggaccaagctgtgtatgaaaataggggcaatttagtgcatttgactatgtactctgttgtgtgtaattggacacagtgtcctccttcctaaaaaggcttagaggcagggatagaactagatgcagagtctaagtaaactaaggggagagggaagacagtgtgtgcctacttctgtctgtaaacagcaaggtcaggatgtgctggccctctggtgagaggacagacaggacagaggggtggtgggctagagggggccttgccataataagggccctctcaaacatgtctatatgtctttgcctctagatttgcaaaagaaaagattctaaagccctgggatcttcatgccatcaccaagcatgatgccctcctccccattcagaagcaatacacccccttctccttcagagggacaacccagagagaaatgggtggtggggatggaggatggggaggcctggagaagcattgatggggccagggttcctagcagggtcccatttcaggcatcttcagaaagtgcaagagcgtgagcctcctggtccccctccagtgctttcttccggaggatagtggactcagtggacacccgcatccatgccccaaagctttttggcttcagtccaagcagctgacaggttcatccttctccctagggccccacaaacaccacttccggccctcctgcctctatctgggctcttcctgcctggatctctatacccacgcctgcccttccctctgcagagctttctccctcccttcaggagccttatttcgctctctcagtctccatatctatttctttcccccttcttccctcctcccctgcttttctcctccttgccatccctcccgagccccagtatgggtctcccctccttcccctctctcaggctgcatctcccccctccttagtgctcacccctgcacctctttctttgtattcttctcaccctctcccagcctcgccagcatctctcctcccccgcccggcttcggcctccccctgcctccccatcttcagctcagtctcctccccctcgctcctcttccctcccctccgcctcgccccactcccagcccgcatgccaggatttctctcctccctgggggtctcagtgcatctccttctcctctctgcctgcctcctccctcaccgaagggttagcggacacccatccttttctgcttggggaccccaccaccacccgcaacactgccgctgtctcttcttcaccgtatccttctctacccaccctcttctctcttctcttctccctgcccctttaaatctgcctggcccagcc

SEQ ID NO: 12037 - DNA, 2300 bp, Homo sapien
tttttgtatttttagtagagatgaggtttcaccatgttggctaggctggtctccatctcctgacctcaagtgatccccctgccttggcctccaaagtgctgggattacaggcatgagccaccgtgcctagcctgtttgcaccttcttaatcataactgcctccccacagctctactgcggaaatacccactctcctcacttttgtggtgatcactgccctgcatttctctgtatttttgtcacctgtttgccttcttaagcaatatagaattgttttacctgttgttgaaacttgtggactcaaataatatgtattcttttgtgtctgacttcttttactcaacagtatattttttaagattcctttatgttgttcagtgtggcttcagctcattcattttcattattgtatagtattccattatagaaatgcaacacagtttgtttatccattccaccgttaataggcatatagactttgatatggtttaggtctgtgtccctgcccaaatctcatgtcgaattgtaatccccaatgttggaggagggggcctagtggaaggtgattggatcatgggggcagatttcccccttgctgctcttgtgatagtgagtgagttctcatgagatctggttgtttggaagtgtgtagcacctccccctttgctctcacttcctcctgctccagctgtgtaagttctgcctgcttcatttcaccttctgccttaattgtaagtttcctgaggccttcccagccatgcttcctgtacagcctgtggaattgtgagtcaattaaacctcttttctttataaattacccagtctcaggtagttctttttttttttgagacagggtcttgctctctctcccaggctggagtacggtggtgcaatctcagcctaccacagccttgacctcctgggctcaagcaatcgtcccatcttagtctcccgagtagctgtgactacaggcatgcaccaccacacccagctaatttttatagagacatggtttcaccttgttgcccaggctggtctcaaactcctgagctcaagggatctgcccaccttggccttccaaagtactgggattacaggtgtgagctaccgtgcctggcctcagttagttctttatagcagtgtgaaaacaaactaatacagacttgtttccagtttggaacattctaagcaggcttctctgaacctgtgtgtacagtctcttggtgcacacatgacctcctgtctgcaggatgcaagttccctctacagagtcagagatctttattttcaacttctccgtataatgccaaatcatttcccaaagtgattgtacttaccctctacccagcagtgaatgagagtttctgttgattttgctttttcaactagaagtgagaggtgacaatatgctagcagcccttgctcactcttggtgcctcctcgtcctccacatccactctggctgcacttgaggagcccttcagcccaccactgcactgtgggggcccctctctggggctggccaaggccgaagccagctccctctgctcgccaggaggtgtggagggagaggcgccggcaggagcccacactgtacagggcactcaccggccagcaggggctccgtgggccggccggtgccagctgggcctgactgggggatgagctccctctgggctgctggagtgcctgggctaggtgccgcaaagtcctgcagtgtgtgccattgagaggtgaagccggctgggcttctgggtccggtggggacctggagaacttttctgtctagctaaaggtttgtaaatgcacccatcagcactctgtgtctagctaaaggtttgtaaatgcaccaatcagcaatctgtgtctagccaatctggtggggacttggagaacttttgtgtctagctaaaggattgtaaatgcaccaatcagcactctgtgtctagctaaaggtttgtaaatgcaccaatcagcactctgtcaaaacggaccaatcagctctctgtaaaacagaccaatcagctctctgtaaaatggaccaatcagctctccataaaatggaccaatcagcaggatgtgggtgtggccagttaagggaataaaagcaggctgcctgagccggcagcagcaacctgctctggttcccttccacgctgtggaagctttgttcttttggtcttcatgataaatcttgctgctgctcactcgttgggtccgtgccacctttaagagctgtaacactcaccgcgaaggtctgcaacttcactcctggggccagcaagaccacgaatgcaccg

SEQ ID NO: 12038 - DNA, 2300 bp, Homo sapien
tttcatttgctattctgtcctatttttccttagaattcggtggctaaattctgggcacctgtcggccagttaaaagtgactagcgcagccgctggactaaaaacgtgggtgtcaggctttctgggaaagggatctctaacaacccctggctctgtggagttgggaatgttgttttgcctggaaccagcttccgcttttcctgtacttctgggctgagctgagggtcaacagagaggaaagccattcagctccggagtccccacaacaagttggttgaccctgcggccatgagcggaactctcaaaggcatgttgcccaagtgagactcacctatctatcctatctatcctgacccttgctcgctgggtcctaatgcctgccagacaaactttctctctcctctcttctcctaggctagtcccacttctaaaaaaccactccctgtctctggtgcttttctaatttctcttataagaatgatttctagtaaaaatttcaggactctgttaccttctttaggcacctgggctcaccaatcagaaagacataatttttgcccaaagcccagttgtagggggaactatctggaattttagaatccctcctcagataagcaggtctaacaaaagctattcctgaagctaggatagggggagcctcagaaattgtatccttcctattcatataagtgaggacaaaaggtgtcacttttccaaccctggagaccccttccctccctcaggttactcttcttcatttttggggcataacatctttataggacacgggtaagttcccaatactaacaggagaatgcttaggactctaacaggttttcgagaatgcgtcggtaagggccactaaatccgatttttctcggtcctcctcatggtctaggaggacaagcaagggtgcagcactctatgtctagctaatcaggtggggacttggagaacttttgtgtctagcgaaaggattgtaaatgcaccaatcagcactctgtgtctagctaaaggtttgtaaacacagcaatcagcactctgtcaaaatggaccaatcagctctctataaaacagaccaatcagctctctgtaaaatggaccaatcagcaggatgtggacagggccagataagggaataaaagcaggccacccgagccagcagcagcaacctgcttgagtccccttccacactgtggaagttttgttctttcgctctttgcaataaatcttgattcactgctgctcactctttgggtccgcgctgcctttaagagctgtaacactcaccacgaaggtctgcaacttcactcctgaggccagtgagaccacaaaccctccagaaggaatgaacaactccagacgcactgcctttaagagctgtaacactcactgcgaaggtctgcagcttcactcctgaagccagcaagaccactaacccaccaggaggaatgaacaactccggacgggaggaatgaacaactccggatgggaggaatgaacaactccggacacaccatctttaagaactgtaacactcattgcgagggtccgtggcttcattcttgaagtcagcgagaccaagaacccaccaattccagacacagaagcagttaattaataactggtataattatttgttggtgcctggcatctcatttaactgggaagctgcatggttggggtccagggctgagtctgtcgtttactaaggtgtccccgcctctactgcccagtgcttgacacattgccagtgctcaatgtttgctatgcaatggatggaaaaatcacccttgtctaatgaatgttgagtctcacattttaatttgtgaataatttccccagttttatagcttaggagttttcatggattgctttcctgacctgaggttcacatgtttgaaatttaccctaaccagcctgactctctgccactttctgttgctggccttgtctgtctggaggaaggaggagggtagattaccttcatgctcactgaggcatcagtgataagtgaaattgattctttcccccaggcctgattcagcaggaagcatctcagacaccaaccactatgctgtcagcagttgcccggggctaccagggctggtttcatccctgtgctaggctttctgtgaggatgagcagcaccgggatagacaggaagggcgtcctggctaaccgggtagccgtggtcacggggtccaccagtgggtgagtgctggattgcccatgggtcctggcccctcacagggtccttgtggcttccacaaggactcagggttttaaagcaagacccag

SEQ ID NO: 12039 - DNA, 2300 bp, Homo sapien
ccttcatgctcactgaggcatcagtgataagtgaaattgattctttcccccaggcctgattcagcaggaagcatctcagacaccaaccactatgctgtcagcagttgcccggggctaccagggctggtttcatccctgtgctaggctttctgtgaggatgagcagcaccgggatagacaggaagggcgtcctggctaaccgggtagccgtggtcacggggtccaccagtgggtgagtgctggattgcccatgggtcctggcccctcacagggtccttgtggcttccacaaggactcagggttttaaagcaagacccagccttatttgctgatttccagagctgggtagaggaaggacagtggagagaggctgaggctgacttttgccctccatctctgcattcaggatcggctttgccatcgcccgacgtctggcccgggacggggcccacgtggtcatcagcagccggaagcagcagaacgtggaccgggccatggccaagctgcagggggaggggctgagtgtggcgggcattgtgtgccacgtggggaaggctgaggaccgggagcagctggtggccaaggtgagggggcaggcggtggaaggacacagagaggggaacatgcagaacctttccttcactgcttggcccttgtggggtgggtctagaatatgtcctgagaccatgactgcacccaggctgcccaagctaacctcgctacccagaaggtccctcaggaaagtgacctgttcgtgagaggaccctcaccccacccccaggcccggggagaatcactgtggaggaggagtctgaaggggtgagggaggtccccagagggactcctggagcagaccttcctctctcagtgcctggccccaggagcctgcccttgggacacctaggtcattttcctttaggagctctgcaagctttgcctgaaggccttatgacctgggctgccctgggagggatagtcctcctcaggccatctccacactcatccaatctcctctccgcaggccctggagcactgtgggggcgtcgacttcctggtgtgcagcgcaggggtcaaccctctggtagggagcactctggggaccagtgagcagatctgggacaaggtgagaggcctcccctggggaggcggctgagggcccgattccagctctgcactgggctccagcatgcctgtgcccaccaagactctgtttccctccagaggttatgggagaagcaggccctgggtggtagtcctgcctggccagctgtctcccaaaatgtgcccggatgctactttctggcttgttggttcttaaatctggcccccacactttctgctttgttttctcttctcatcactttttcatttaatcattcagcaggtatttattgctgtctgccaggcaccactattccaggctctagggatacagctgtgaatggttagtcagagtctctctgtaagagtcaaacatttttgtatggtacacccttttgtaggggaagatacggatactgtgtttttctttggtgacctgtgcctgtagcggagactgtctctcctagaagggggctcctcactgagtcccacacaaacttgccgacaggaccagatccagccatcagcattccgggggcttagacatcccagcctgctgtaagtccattcaaggattctgctaccttgtccacaagggaccgggagagaccttgtaaaatgccttgaagctcatcttgggcctagttgttccccagtgacttctgttcccttcactctcatgttttgttttctgttctctctgccagaatgcgtcgtgatgaatctcattctttctgctattgtgagcattcaccactctgccctaagcactgggtcaaagtgtttcctgccttctggccttagagtgttctgccttccctagatcctgcactctcacttgccaacatcatcttcaggctggcccctcccttctatctgcccttggctgggtgcccttggctacatcctcagagatgatctgaaatttgagctccctgcagcccctgctgagcagcttccccaggctctttagctatgttgttaatgcctccaaaggatcatttgtgattttatagctgggattttattgctgacagtctcctaaccctcctgaatcattttgctgtttagtgtctcagttcacaggatcatgactctttttctcgaaactgttgcagtcctccctcctgaagctgagggcagatgccaacaatctgaccttactttctctgattctcccctgttctccaaggacttggc

SEQ ID NO: 12040 - DNA, 2300 bp, Homo sapien
cctactaaacagtttccaaagttcaggcttccctttgccaaagttgataagtgtggtgtaaaggtcatgttagttgagtgttaatttttttgcagactagcagaaacgagaagaccaggtttgccttgtagcagagccagaaggtgtgcctgaccacagggcaggatagtcatgccaggactctgaccctcagcttggcttagatggagagaggcaaggtgtacagaattgctttgcatttacccccaaagacaaggtagttaaaagaagggaagataacacaccacatactcactaccaaccaatgagacctagcaaaggcgtcacacaaatccttgtcagatttgtggggatcctggggcagtcctgactgccagaatccaccggaggccatgagtggagggctgaggacatcatttctaagtacagtggaaatgaaatctggaaggtagtgcaaaggaaagggcaggagactcatcttctcagggaagtcgtgggatccctgccatcacatatgtccgctgatgacccttatttgtcagtgcatgacgtaacattgtctacacgtttagaaaagagcaaaaatatgttcaaaaatctgatggaatgattaagacacaaggagggagatctaaactcatcaaatttaggatgaagatggctgtgagttaagaatttatagggagttgggcacagtggttcacgcctggaatcccagcactttgggaagcagagatgggaggatcacttgaggcaaggagtttgagaccagtctgggccatatagtgagactcttatctctacaagaaataaaaaattagctgatcatggttgcgtgcacctgtattaccagctactcagcgggctgaggaggcaggatgacttgagttcaggagttggaggctgtagtgagctatgattgtgccactgcattccagcctgggtgacagggtgagatcctgtctctaaaaaaagtggaatttttagagtttaatattgtcccaaagaagatccatatgttctggtaggcatgaatattctggacatcccgaaggtgtgatgcagcgtggagagtgggtgcacatcagcatcaccagcacctctgttaagcagaatactgtgcatgggtattaatccctggtggggaattctgtgcgactattaagaatcccagaggagaactctaaacaccttgccagcttctactaaggttcctagatctggcaggtttctagatctggcaggaggttttgcccaaacccagctgccagtgtatgagtttggtgagacagagcacttgtgcaacatgtcaggcaaagcaagtttagtactcccaggcagggagcaagggccaacagaagtctaggatccatgatgtgctggtcccccaaggcttagggaggctgcccagggtggatgcagtcttatctgtatgtgctccactatacatctgatatagtttggatatttgtcccctccaaatctcatgttgaaatgtgatccccagtgtggaggtggggcctggagggaggtgtttgggtcagaggggttgatcccccatgaatggcttcgtgtcctccccgtggtaatgagcgagctctcagctattacttcatgtgagatctggttgttttaaagaacctggcaccttctcctttctcttttgccccctctcatgccatgtgacatgctgcctccctctttgccttccaccatgagtgggagcttcctgaggacctcaccagaagctgaggagatgctggtgctaggcttcttgtagagactgcaaagccgtaagacaaatgaacttcttttttgtataaattgcccagatattcctttacagcaaaacaaaatggactgatatagcaccactactgagggaccctgaaagcattctgctctggttttatacctcagaggccacttggattggtgagccaagcattgcaggctgttctaggaatgacggagacaaagcctgggctattctgggcatttcctcctatctcagaatgttgcattctctgtacattctgcccaagaattgcaagcaaaggagggtcagccaaggctatttgcaggcttgtcctcctgtctggttgaaagatccttcagtaccagccaactctctctcctggttccatgttcactctgctactttctaattattactccaggttggagggatggatgatggacaacaacttttctcatcactggaagggcatgttccccactgaaactgaatccactgttttttgtttgtttgtttatttgtttatttttgtttttgagac

SEQ ID NO: 12041 - DNA, 2300 bp, Homo sapien
cttcttgacttccttccatccttttctgctcacaggccccctccctaatgtcccctgtgctctccacaaaagaaatagtgctagaggccaaatagcaaccctgcccacacaaggaagggccatgtaatgttcaccaagcacccaagccacaattctctcttcccagaatcctttgctctttgaagtgtagtcttcctcaccttcctgccaacctcagcccctgagtccacctgtctacctctgaagagaagggaaagagagatcaaacgccccctgcaggcctgtccctttgaaccaagccctgagaacccccgcagccgtcctcctgtgtaccctcccccagccgcacacacagatggagagccctgggaagggttcccacagtgcgttagctccaaacagtgcaagaggacaagcagtgtggcgcttccagcctctgtcaataattcatgaggctcagactgaggagcaccagtcagagtcagccttccctggacatggggaaaattatactgaagctctcctgtctcatcgggatctgctgagtagcaaagcagagtattgcagctgtaacttcttggctgaggaaaacactagaattccagtgcaggccgttctattacttgctcaccatacacccccttttgaatgttgaaaccctttttcagctgctcagcttacctgcacatatactaaatgaatcttgagcaaacatgaattctattcaaaagtcatgcctagaactggatttcacaaaccaggattctttcccctttaattgtagggactggcataaggctgccaaactggtgatttcaccaataacacatctctaaacctacccatctgctttcatcatcttttctaaaagaaaacactaacacacacacacacacacaaaaagaagcaaacgtatactccacaataaaggactgttaaataagcttagctttatgaaactcactgtaattgtttccttttctcattttgccttgaactagtgaaaacgctgccatgaaccagcactgcttctcagtctggctttggaggccagtgggttaaaccaattcagatgcttgcatttgggtctgttggggcctttctacactgtaccataagccatccagatttcttcattctcccggaaacccaggagggagatcatttcagcccacttggcagaagtgcagactgaagtcttggacacagaatttatagctggcaaggactttattcatcatccataccctcagtaatttacagatgaagagtctggcccagggcaccaataataatcactacatggtggcagtaactactatgtgcttagtagcttacagttcataaagagattttgcattcaacaaatatttattgaactaagatggcggctaagacctggggacagagtggttagggagaacttgagtgccccgagttctttgcatttccaccactgcttgagggactgtccagcctcctcgctaccacttagcccctgtaaaggaggaagtccctttgtcaacggacatgagaatgctgtttggccaatgaccatagtctgccctccagggcccgtgaagatggaagagaccttgggcagagtgaagggcagtgccaggcctggcgcagctactccctatcacgtctctctcccaggctcttccagcctcacctggtggactccatggcgaccacaggcctcacctccatgggcagtctcaaaacatttgccctcctgtgggctgtcacacacatagacccagactttcttggagaaggaattctgaagaagcaaaagcaaccaactcaaaacccccacttcccagagaagaaaaggtgggcaagcagatgcagaaaggcagcagccaaagcctgcgggttcctgcaagggccaggggaggggcgagccctacaggcaacttgaacggagagctcacccgccagcccggaaaggcaagccccagtcaggcggaaggtagatggtggaggggcgccgcggcggatggaggtgcccagggccacagaccgctcacagcggtaccggggcggggagcagggcgggcagggaatcggcccgcccttcgtcctgcccctcgccctactctgtcaccgcccctgggaagagtggaacccatacttgctggtctgatccatgcacaaggcggggctgctaggcctctgtgcccgggcttggaattcggtgcggatggccagctccgggatgacccgccgggacccgctcgcaaataaggtggccctggtaacggcctccaccgacgggtgagtgctccggccgg

SEQ ID NO: 12042 - DNA, 2300 bp, Homo sapien
gggaggtctgggtctttccttactggctgtgggaccttgggaagttgctccagctatctgagccagggtctgcagactgagagaatagtccttgccttgcttgggttgttgtcaggtctagagataacctgtgtaaggctctgaacacaggaaatggcacatagtaagtggctgaaacatggtgggctgcttcctgaggttcccagggacttgactctataagctgaagaagaggggaatgtttattaactcatgggtgggaacatgtattttgtgattgtatttacccttcacatctgttcaattagattgaaaattactgcagaaccagtaccagctgtttctttggggtactcaagggatgatgcagggttgaagcattagaatgttttaaaattctctgactgagatgggatgattctctgacgttagtatatggacataatagaaaggcacacagtaaaaatgtgctgctgtctaggaaagcagggaaggaggctcaggctggctccgttttccacctcctggctctgtgcccatttccctgcagctcaccgtggccaccagccgctcccggtcctccgccttccccacatggcacacggtgcccgtcacgctcagcccctccccctgcagcgtggccaccgcctggtccacattctgctgcttccggctgctgacgaccacatgggccccgtcctgggccaaacgccgggcgatggcgaagccgatcctgtgagcagaaagagacaaagactgctaaggcctgtgcaggggaagaggtcgacagtatgagctctgaagttaagactgcccgggtttgaattctggctctttctctatataacccctacgtgtgcctactatgtgtaaaacaggcttaatggcatggccatttttggcattcctttacttgtttttattatgacctggaccacagcctcagttcccaagaactgacatcactttctacagttcccaccatgggtgacaggcttcatcccctcttgggactgagaggtgagaaatgagctgggtttgcagcagcagccacttccgtgatttgagggtctcactcagaacagccctgcccccaggtttctttcttactcgtctacatcattctcaaaattctatccttagttattttttggggtgcatgtgaaaagatggtctccggtcaaaaatgtaaatattgccttgggaggaagagttacacattttgcatttgtcagctattagcattttacctacatttgtattttagttttgtgaagagctggcatctagcaaagtcctgtagaaatgaggaccaggatagacaagaatggtgggtgagaaacaggctgggcaaggtcggcccagatgtaccgacctaaacaaaaatctcgacatatggctctggtgtcccatctaggtaagggggaggggttccgggggactttccggtgcccaaatagaatgtctggtacattttcaaagtgctggaggccgtgggatagtattttgaaatccagatttccttggatttccagtttctggtcttcccagacgctaggtggcgctggttgactggggcagcccagaacactggggagactagatcgatagggctgcacagaggtggcacagttgtgccagaggtagcagggacaggagggctggcaagggagggtccagggctaggggattcggagtggcttcaggcggaccacgtggctaccttttttccagggccagactttggcagcgtgtaaggtctgaggacaggggcaccggaggccgaggatgagaggccagtgcctgtttccaggcagccagggcctcagaaactccggccggagcactcacccgtcggtggaggccgttaccagggccaccttatttgcgagcgggtcccggcgggtcatcccggagctggccatccgcaccgaattccaagcccgggcacagaggcctagcagccccgccttgtgcatggatcagaccagcaagtatgggttccactcttcccaggggcggtgacagagtagggcgaggggcaggacgaagggcgggccgattccctgcccgccctgctccccgccccggtaccgctgtgagcggtctgtggccctgggcacctccatccgccgcggcgcccctccaccatctaccttccgcctgactggggcttgcctttccgggctggcgggtgagctctccgttcaagttgcctgtagggctcgcccctcccctggcccttgcaggaacccgcaggctttggctgctgcctttctgcatctgcttgcccacctttt

SEQ ID NO: 12043 - DNA, 2300 bp, Homo sapien
ctcccaaacggctccttccaccatcaggatcaaggccccaatcttggggtctgtccatcagcctaagccaagcttttttggactcacatttgtgactttcttggactcatatttggctctttccaatgcacatttgagcatttgccagacagttccttaaaaatggaattaccctattctgtctaccatactactgtctactattgcttaagatcctcctcttctaagattatgcaaattatttctgccaaccttccaatctgttagcagaatcctgtactttccatttttgggtagattctcccttccactctgggaaataaagtgtatgccgtgagcctcaagggaagaggagcttcctttgtgaatgcttcatatttgcttcagcagctgcaaggctggtgtccactactaattctgacatcgacttatatactttctttgagactaaagtccagtacccggtagtccacaggcagccaataaaggaagggagcctgggaggtctgggtctttccttactggctgtgggaccttgggaagttgctccagctatctgagccagggtctgcagactgagagaatagtccttgccttgcttgggttgttgtcaggtctagagataacctgtgtaaggctctgaacacaggaaatggcacatagtaagtggctgaaacatggtgggctgcttcctgaggttcccagggacttgactctataagctgaagaagaggggaatgtttattaactcatgggtgggaacatgtattttgtgattgtatttacccttcacatctgttcaattagattgaaaattactgcagaaccagtaccagctgtttctttggggtactcaagggatgatgcagggttgaagcattagaatgttttaaaattctctgactgagatgggatgattctctgacgttagtatatggacataatagaaaggcacacagtaaaaatgtgctgctgtctaggaaagcagggaaggaggctcaggctggctccgttttccacctcctggctctgtgcccatttccctgcagctcaccgtggccaccagccgctcccggtcctccgccttccccacatggcacacggtgcccgtcacgctcagcccctccccctgcagcgtggccaccgcctggtccacattctgctgcttccggctgctgacgaccacatgggccccgtcctgggccaaacgccgggcgatggcgaagccgatcctgtgagcagaaagagacaaagactgctaaggcctgtgcaggggaagaggtcgacagtatgagctctgaagttaagactgcccgggtttgaattctggctctttctctatataacccctacgtgtgcctactatgtgtaaaacaggcttaatggcatggccatttttggcattcctttacttgtttttattatgacctggaccacagcctcagttcccaagaactgacatcactttctacagttcccaccatgggtgacaggcttcatcccctcttgggactgagaggtgagaaatgagctgggtttgcagcagcagccacttccgtgatttgagggtctcactcagaacagccctgcccccaggtttctttcttactcgtctacatcattctcaaaattctatccttagttattttttggggtgcatgtgaaaagatggtctccggtcaaaaatgtaaatattgccttgggaggaagagttacacattttgcatttgtcagctattagcattttacctacatttgtattttagttttgtgaagagctggcatctagcaaagtcctgtagaaatgaggaccaggatagacaagaatggtgggtgagaaacaggctgggcaaggtcggcccagatgtaccgacctaaacaaaaatctcgacatatggctctggtgtcccatctaggtaagggggaggggttccgggggactttccggtgcccaaatagaatgtctggtacattttcaaagtgctggaggccgtgggatagtattttgaaatccagatttccttggatttccagtttctggtcttcccagacgctaggtggcgctggttgactggggcagcccagaacactggggagactagatcgatagggctgcacagaggtggcacagttgtgccagaggtagcagggacaggagggctggcaagggagggtccagggctaggggattcggagtggcttcaggcggaccacgtggctaccttttttccagggccagactttggcagcgtgtaaggtctgaggacaggggcaccggaggccgaggatgagaggccagt

SEQ ID NO: 12044 - DNA, 2300 bp, Homo sapien
acatcccaaatcttcccaaagccattctgatgtgagacatgagctgcaggcctggttcataactcattaataagtgaggggattgtcaacctagagcaccaatgaatgatctagcccatgtagctcaatactggattcacattagaatcacctggggagctttttaaactgcaggtgctcaggccccacccactcccagagattctttttaattggtccaaggtaggacttgaccatctgggcttttgtttttctttgtcttttcttttcttttcttttttggtttaagcctctcaaatgattgcaagatacaagtagaatggagaagcattaattcagcccttctaggtttgagttactcactctgcccacctctagagcattctatggcagggagattaaagtgtctcctaactatgcagtcactgataaaataagaattagcacattctcactaaatgaacctgactttaaggcacaagtatagattcctgaaaaagttctaagctgaacctgtacaaatggaatcattttaaacacaccatttactgtcacacagactccctgatactttagtgtgtgcacatgtgaaaccatttttttgaagtatgaaataattgctcaccattttatctatataactttggattttggtgtcctgagctctctaaaaaccggtgtgtttctatagtatttgaatattatgggtaatagttttgcagagtacagtatgcttatactaaattataacagcatatcctcgtggtaaccctatttgataggcagaaagcttgtacactgaccctgaaaaagccatctgataattcttgattaagcaaatttaactccctgtgtcccaggtgagggaggcagaactgtttgatttttacctccttccttgcttcccttattccccaggttaggcgagccagaggattgtgctggcatcgtgtctttcctgtgctctgaagatgccagctacatcactggggaaacagtggtggtgggtggaggaaccccgtcccgcctctgaggaccgggagacagcccacaggccagagttgggctctagctcctggtgctgttcccgcattcacccactggcctttcccacctctgctcaccttactgttcacctcatcaaatcagttctgccctgtgaaaagatccagccttccctgccgtcaaggtggcgtcttactcgggatttctgctgttgttgtggccttgggtaaaggcctcccctgagaacacaggacaggcctgctgacaaggctgagtctaccttggcaaagaccaagatattttttcccgggccactggggaatctgaggggtgatgggagagaaggaacctggagtggaaggagcagagttgcaaattaacaacttgcaaatgaggtgcaaataaaatgcagatgattgcgcggctttgaatccaattgacctgttcatttctcagtgttgggtgcttagctgagcagagagcagaagtctattcaggctggatctctggatcccccagccctcctccctgtctccagaacttgagcgtgatgttcacgggtggaggtgtctgcagagctgccagctggaaggaaggtggcacgggaactcccaggacgccacgggaatccccgaggcagcgcgagcccggagagagtggggaaggatgaactctctaacacctccccgccccttgcctcccagatcaggccaggtcctctccccgcatggccctacgacccgagttccctcccgagtcagcaagtacaagctggatgggtcctgagccggtggggaatagagaaaggccctgcaaggtacccaggcccacaaacaaaagcaatgggttctgcccacgggcccgaggattcagtagaaggaaagtggggacgctgtcccccgccccaaaggcactgacactgggcgacacacgctgagcctctcacgccgacgggcctctcacgccggagccggcaagaaaggtcggcgccagcccgcgggctctcaggaggctcggcagcgcgacgcgcatgctcagtcgggcagctctccgggccggcgtgggagcccgcgctccaaggcccggtggggggaggggcgctcacgcaaccgccactgtctggagcgggctcgcctctgcggcagccctcaccgcccgggctttactgaagcggagtctagcatgtgcggctgctccacagcggtgtgggtggcggcggctcctctgcagcagcctcggcagtaggggtcagggtggccaagcccaccgtggagctcatctgagagttgtaaggt

SEQ ID NO: 12045 - DNA, 2300 bp, Homo sapien
cagccccacacagatggagagccctgggaagggttcccacagtgcatgagctccaaacagtgcaagagcacaaggagtgtggcgcttccagcctctgtcaataattcatgaggctcagactgaggagcaccagtcagagtcagctttgcctggacatggggaaaattatactgcagctctcctgtctcatcgggatgtgctgagtagcaaagcagagtgctgcagctgtaacttcttggctgaggaaaacactagaaatccagtgcaggcctgttctattacttgctcgccatacacccccttttgaatgttgaaatccttgttttttttctttttgttgagacagagtctccatctgtcgctcaggttggagtgcagtggcgtgatcttggctcactgcaagctccgcatcccgtgttcatgccattcccctgcctcagcctcccgagtagctgggactacaggcaagtaccaccacgcccggctaattttttgtatttttagtagggacgagtttcaccgtgttagccaggatggacttgatctcctgaccccgtgatccgcccgcctcggcctcccaaagtgctgggattacagggtgagccaccacgcccagctgaatgtccaaatcctttttcagctgctcagctgacctgcacatatactaaatgaatcttgagcaaacatgaattctattcaaaagtcatgcctagaactggatttcacaaaccaggattctttcccctctaattgtagggactggcataaggctgccaaactggtgatttcaccaataacacatctctaaacctacccatctgctttcatcatcttttctgaaacaaaacactaacacacacacacacaaaaagaaggaaaggtatactccacaataaaggactgttaaataagcttagctttatgaaactcactgtaattgtttccttttctcattttgctttgaactagtgaaaacgctgccatgaaccagcactgcttctcagtctggctttggaggccagtgggttaaactaattcagatacttacctttgggtctgttgcggcctttctacactgtaccataagccatccatatttattcattctcccggaaacccaggagggagatcatttcagcccacttggcagaagtggagactgaagtcttggacacagaatttatagctggcaaggactttattcatcatccataccctcagtaatttacagatgaagagtctggcccagggcaccaataataatcactacatggtggcagtaactactatgtgcttagtagcttacagttcataaagagattttgcattcaacaaatatttattgaactaggatggaggctaagacctggggacagagtggttagggagaacttgagtgccccgagttctttgcatttccaccactgcttgagggactgtccagcctcctcgctaccacttagcccctgtaaaggaggaagtccctttggcgagggatatgagatcctgttttgccaatgaccgtagtctgccctccaagggcccgtgaagatggaagagaccttgggcagagtgaagggcagtgccaggcctggcgcagctactgcctatcacgtctctctcccaggctgctccagcctcacctggtggactccatggggaccacaggcctcacctccatgggcagtctcaaaacatttgccctcctgtgggctgtcacatacatagacccagactttcttggagaaggaattctgaagaagcaaaagcaaccaactcaaaacccccacttccccaagaagaaaacgtggacaagcagatgcagaagggcagcagccaaagtctgcgggttcctgcgggggccaggggaggggcgagccctacaggcaacttgaacggagagcgctttgatcactcaccagcccgggaaggcaagccccagtcaggcggaaggtagctggctgcggggcggggcgactggcgggcggcgggaggcgccaaccgccacagacgactcccagctggccgagggcgggaagggggcaggcagggaagcggcccgcccttcgtcctgccccttcgccctactctgtcacctccgctggaaggagtggaacccagacttgctggtctgatccatgcagatggccaggctgctaggcctctgtgcctgggcacggaagtcggtgcggatggccagctccaggatgacccgccgggacccgctcacaaataaggtggccctggtaacggcctccaccgacgggtgagtgttggtgccggagtttctgaggccctgg

SEQ ID NO: 12046 - DNA, 2300 bp, Homo sapien
gagcttcttcacttctctcagccttcaaagaattaaaaagttagggcctttttctgattaggctttggcttaagggaatgttgtggctagtttgatcttctgtccagaacataagaactttctctccatattaacaataaacctcttttgctttcttatcatttatatgttcagagaagtagcacttttaatttccttcaagaatttttcctttgcattcacaatttggctaactggtgcacatggtctaactttcagcctgcctcagctttcaacatgccttcctcactaagcttaattgtttctagcttttgatttaaagtgaaagatgtgtgactcttccttttgcttaaacacttacaagccattgtagggttaatagttggcctaatttcaatgtaaatgtgtctcagggaatatggaggtccacagagagggagagagatgagagaagggcagagcagtcagaacacacaacatttttcaattaagttgaccttcttttctgggtgtggtttgtggtaccccaaaacaattataataaaaccatgaaagatcactcatcacagatcaccgtaacagatataataataatggaaaggtctgaaatattccaagaattaccaaaatgtgacccagagacaaagtgagcacatgcaattggaaaaatggctcgaattaatgcagggttgccacgaaactccaatttgtaaaaaaaaaaaaaaaaaaaaaaaaaaaaaacaatatctgcaaagcataagaaaatatgtgtctataacttttcttttaatttgtatattttttaaactatcacagtatgtcaaatccaaacataatggctgatccttgattgaactctggactttaaaaaacacacacacacatttgggggataattgaggccaatatgttagataaaattatcatcattgtcaaactcttggttgtgataacagattatggttgtgtaaaagaaaatccttactctttggaaatgtatgctaagtatttggggatagaacattgtactatctgcaactgagtttacttattttattttaggttatttatttatttttgtgatggagcctcactctgttacccaggctggagtgcagtggtgctatctcagctcactgcaacctccacctcccgggttcaagctattctgctgtctcatcctcctgagtagcttggattacaaacacatgccaccacgtctggctaatttttgtatttttagtacagacgaggtttgccatgttgcccaggctgttctcgaactcctgacctaaaagtgatccacccatcttggcctcccgaagtgcagggattgcaggcatgagccaccatgcccagccctgagtttttttttttttaatttacatttttttatttttgttctttgtaatttttgattttattatataaaatctttcagaaaacttgcaactgagtttcaatggttcatttaaaaaactgtacagatctacagagaggacaaataggacaaaatgtgaacaattggtgactctaagtgaaggatatctagacattcattgtacttctatctccaatttttctgtaagattgaaatattttaatataagcagttgtctagaacagtgtaaacagggtcatacatttgttttagattatggatgtggggattctgattgtagcctgtcccccagcttccccagaaggtgactcctcatgatcccactttctaaccatgcctagccagacagtccttcctagagggccaagaacatctcactccctaagcccagaagccagagaagtgctagaacaaccccacatatccaaggtcaggccacattttccctgagaagcatggcctactctagggcaggtccaggaggctgacaattccaggctctacctacttggaagaaacagagaaaacacagctcaaatccaaaggccccttctggcccaaatcatacttggctgattatgaaacaagatgaaccaggctccatttttgctcacctgaacctaatgtatcattatctagctgagcagctggtgagagctacttctccctgaacctcagttccttcatgtgtaagatgcaggtatatcatcctaagatcttcgtcagctctgacaaacatcctaggaacccactctaactcctcattttttcatgcctcctccagtgctcttcactcatgctgtttccccttcttctcttggcttcagactctggacattaatgtgaaggccccagccctgatgacaaaggcagtggtgccagaaatggagaaacgagg

SEQ ID NO: 12047 - DNA, 2300 bp, Homo sapien
tgtccctcaaggacaaatgccagcaatgcctaattccgtactggtccagacatcccaaatcttcccaaagccattctgatgtcaggcatgagctacaggcctagttcataactcattaataagtcaggggattgtcaacctagagctccagtgaatgatctagcccatgtagctcaatactggatgcacattagaatcacctggggagctttttaaactgcaggtgctcaggccccacccactcccaaagattcttttttaattggtccaaggtaggacttgaccatctagggttttgtttttctttgtcttttcttttctttttttgtttaagcctctcaaatgattgcaaggtacagctagaatggagaagcattaattcagcccttctaggtttgagttactctgcccacctctagagcattctatggcaggcagattaaagtgtctcctaactatgcagtcactgataaaataagaattagcacattctcaccaaatgatcctgactttaagggacaagtatagattcctgaaaaaattgtctctaagttgaacctgtacaaatggaatcattttaaacacaccatttactgtcacacagactccctgatactttagtgtgtgcacatgtgaaaccatttttttgaagtatgaaataattactattttacctgtataactttggattttggtgtcctgagctctctaaaaaacagtgtctctatagtatttgaatattatgggtaatggtttttgcagagtacagtatgcttatactaaattataacagcatatcctcatggtaaccctatttgataggcggaaagtttgtacactgatcctgaaaagttatctgataattcttgattaagcaaatttcattccccgtgtcccaggtgagggaggcagacctgtttgatttttactcccttccttgcttcccctattccccaggttaggcgagccagaggattctcttggcatcgtgtctttcctgtgctctgaagatgccagctacctcactggggaaacagtgatggtgggtggaggaaccccgtcccgcctctgaggacccggagacagcccacaggccagagttgggctctagctcctggtgctgttcctgcattcacccactggcctttcccacctctgctcaccttactgttcacctcatcaaatcagttctgccctgtgaaaagatccagccttccctgccgtcaaggtggtgtcttactcgggattcctgctgttgttgtggccttgggtaaaggcctcccctgagaacacaggacaggcctgctgacaaggctgagtctaccttggcaaagaccaagatattttttgcccaggccactggggaatttgaggggagatgagagagaaggaagctggagtggaaggagcagagttgcaaattaacaacttgcaaatgaggtgcaaataaaatgcagatgattgcgcggctttgaatcgaatcgacgttttctcagtgcggggtgcttagctgagcagagagcagaagtctggccaggctggatctctggatcccccagccctcctccctgtctccaggacctgagcgtgatgttcaggggtggaggtgtctgcagagctgccaactggaaggaaggtgggacaggaactcccaggacgccacggggatccccgaggcagggcgagtcgggcgagggtggggaaggaggaactctctaacacctccccgcccctcgcctcccagatccagccatgccctctcccagcatggccctaggtcccgagtcagcaaggacaagctggaggggtcctgagccggtggggaatagagaaaggccctgcaaggtgcccgggcccacaaacaaaagaaatggcttctgcccacgggcccgaggattgagtagatggaaagcggggacgctgccccccgccccgaaggcccggacaccgggcgacgcacaccggccagctcacgcgggagccagcgagaagggtcggcgcgagcgcgcgcggggtctcacgcggctcggcagcgcggagcgcatgctcagtccggcagctctccctgctgggcgggggagccggcgctccgaggcggggggaggagcgctcaagcagccgcccctgaccggagcgggctcggccgctgctgcagcgctcagcgcccgggccctgctgaagccgggtctagcatgtgccgcggctccccggcggcggcggcggctcctctgcagcagcctcagcagcagcggccgccatggccaagcccagcgtggagctcacccgcgagttgcaaggta

SEQ ID NO: 12048 - DNA, 2300 bp, Homo sapien
ctgccgtgaggaggttcaatgggtatgttgggcagggaccccatagggaacaggtgggacctggagggaaggggctaagaaggaagtggggagcaggtgtgagccagttccacctctccaaggatgtggacaccatctaccatgctgaagataaccgggagttcaatcttttggatttcagccacttggagagccggtaagcagatggggcagagactccaccctcaaattcccaaattcagcccaaccccagcccttcccaggagtgcccttctggtcccacagccccagctctatctccccaactccatcccatccccatctacccatttaggccttccccagcccaaccaccctatccttggtctcttcttttctgacccaaccacctgctcaccactttcctgcccccttccatatccccacagagacttggccctaatggtagcagccctggcctacaaccagtggttcaccaaactctactgcaaggacttgcggctggtaggaactgggaggggctggtgaggtgggagaagtagtgccccccttggcccctgatcacaagacccccctctgtcctcagggctctgaagtgctagaacaggtgctacataccctaagcaagtcggggagcctcgaagagctggtgctggacaacgccgggcttaagacgtgaggccagtctcctccttgggcagtagtgcacccttgatgtagttttagggtcccagaacctcagagcatgatgcaggcctctggactatcttatccagtgcctctctctacagaagaggagaccaaggccaaaagagggcacaaagcaagtcggaggtcaagctagaactcagacccaagcctcctgacgcccagctccatggcctttccccaggatgttccatgccccgtcctctttttccattaactaccaagcagggtgggctgctccagtcttgaggacccaaagctgacctttgtctcagcacaacttcctaaggtgtggaatgcccccaggtactccggagtggtgacaagctccctggcaggccctgagctgttcccctgttgtgggggcctctgaccatgcagccccagccaggcagtcaggtagaggaggaggggaagcccagaggctgggacctggggctcagctcaggacaaatccttcctccccttccctgaagggactttgtccagaagctggccggggtgtttggggagaacgggagctgtgtgctgcatgccctcactctgtcccacaaccccatcgaggacaagggtgagccccagccctgaatcctgtccccatcccaatgcagacccctgtcctagcccagagcccaaccaggtctgaacagcagctctccagcctgattccagcccctgccctgacacctccatccttgacccaaggcctgtaccctactcgagcccccaacctgactctgtgccacctgcacccactgccctgcccctcactgggcccgtttctctctccactccccaggttttctcagtctgagccagcagctcctctgcttcccctctggcctcaccaaactgtgcctggccaagactgccatttcccctcgaggtactcgcaccaaggacccctgacctctgaccctaccctggtgctgcctggggtgttgagctccagaggtacacccacacattcacacaccacctcagggatggaagagtgaaaaggagccacgtttggggagaggggaagagttatgtgctgaggggaagaggtggggctaggggccaacccagcccagtgcccgctgtgctcagggctccaggcactcggccagaccttcggggcaaacccagcatttgccagctcccttcgatacctggacctgagcaagaatcctgggctcctcgccacggatgaggccaatgtgagtcctcagaacagcctcagccccctgcagaaagcatgcttaagcttcaggagctgggaggccttctgccccatggcctctgggggtggcgagactccatcatcccttcccctgcaacccctcttccttcctactccaggccctctacagtttcctggcccaacccaacgccctggtgcacctggacctgtcaggaactgactgcgtcatcgacttggtgaggagttggtgatgggaagccagtctgaggtgatttggggaagaccacagtgggcctcggtctcaccccctatccctgagtacacaggcgggcagagctgtctagatgacttcaggttcagctgaagtataaagcaatgtccatagttcatacctgtgtggcacttt

SEQ ID NO: 12049 - DNA, 2300 bp, Homo sapien
ggtcgacccagtgtgagtccctaaggcttcacaagaggatccccttcactcagtgacaccagagccaggagttttacctttaggacccaaatgccagagacagtagccttgagggattgggcaggagtccaggcatgccaatgaacagatgagggattgcccagtttttatgagagctagaccttgtcacagataagaaagctctgtctgccgggcagtgtcattcttattttggtgaaggatagagccaccaagaacaccaagagccaccaagcttaggaaacactaggtgagctgggcatggtggctcaggcctgtaatcccagcactttgggaggctgaggcgggcagatcacgaggtcaagagatcgagatcatcctggccaagatggtgaaaccccatctccactaaaaatacaaaaattagccgggcgtggtggcgcctgcctgtaatcccagctactcgggaggctgaggcaggagaactgcgtgaacccaggaggcggaggttgcagtgagccaaaatcatgccactgcactccagcctgggtgacagagcaagactccgtctcaaaaaaaaaaaaaaaaaagaaaaagaaacactgggtgaactgaagtctacatttccataaatgtccaagcccaaaggggaatgctctgagtggatgggaggtggggcttcctgacctagatgagatgtcccacgggactttcctcccagcagatgccagcacctgggactcgtcaggagaatgggatggccacccgcctggatgaagggctggaggacttcttcagccgaagggtcctggaggaaagttctaggtgtgatgcctaaacacactcccattttcagcaggccccaaggccctagaagggctgctgtgtcctcccagctcccatgggagtctccataacagcagtgcccaaagccagtctctgtgagaaatttccccacattctcatccttccccacccagccctcagggcccatgacctctgcgtcttcccaggacagctgggaagaatggggccagagtgaaccaccacagtggggttggagagcaggtgtggatgagagggaggtggggggcagccctgggacaggatacccattagtggtgagaggcccggggggtagtgttccctgtcactgtcctgcagactgcccagggtctgtccaggaggagccaggtcacttggagaagctgagaggagttgcaggggaggtgcctgggaagaaacatcagtctgcgggaaaggctgctggaggattacaacgggacaggaaaggcaagggcatcatctccctgagaactaagtggaaagggctgcagtgcagcaggggagaccagatgagaggaaagcaggtttatcagacccaggattgagcttgcatctggcatttgttgctaacttaccccgattctccccagctacccccggactctgaggaccgtgcggccaggactctcggaggcaccgctgcctccactccagaagaagaggcgccggggcctgtttcactttcgccggccccggagcttcaagggggacagggggccggggtcccctaccactggactcctcctccctccacccccaccccctcccccgactcaggagagcccccctagcccagaccccccaagcctcggcaataactcctctccctgctggagcccagaggaggagagcagcctcctccctggatttggtgggggccggggaccttccttccgccggaagatggtaagtgaggcagggggtgctgtgtcttccccttttcctgccccacacttaacccagtctcctaccccaccccaagcttaatgggagaatgctaggacccagggttcttgggaacattggtcatttcaattctcctctccttgagagtggactaagacccagtggccaagagcatgctgggagtgctatatgcgaatgcaggcgttggaaggactcttcagagggtctctgcagggcttccccgtggctagggactcagtgaggcaggggtcctcctgacaactccctcacagcctggggagcccccttcgactgggaactgctaataaataagagaccttgttctagggcactgaggggtcagagccaggggaggggggcccagcccctgggacagcacagcagccaagggttcacggtgttgcccttcccgggttggaaagagccaagggttggagcttcgatgggaaacgagaggtgagtggagcctgggacaacaaactgtgggtcctgagggtatctgtccaccaccctctccttcccactcc

SEQ ID NO: 12050 - DNA, 2300 bp, Homo sapien
cctccccaggagccaggggtcagggaggaggctgaggctggagatgcagctccaggagtcaacaaaccccggctgaggctgagctcacagcaagaccaagaggagcccgaagtccaaggtctgccaccctggctgagtggggggctcagggcacctctaggactttgctgtccacatcaggtcctcttccagagcatggaatgagtgacaaccaggagtcacagcctggatgagcatcccagcatgagccccactcctgtgttaggcctgccttgattgttatttcagggccccctgatccaggccggcggactgcccccctgaagcccaagaggacacggcgggcacagtcctgtgacaagctggaacctgatagaagacggcctcctgaccccacaggtgctggtggtgagagggcaggtccccccttcccacctatctgtccaacatgacaccccccgaagccccaacaccaggtggctggctgtccctgcccaggaaacagggctccctggatttgtccccagcaggaaccagtgagccaggaacagactgacaactgccacaacaccctcctcagccctcgacatgtgcctcgcaaggactcagacccctatccacccccagtccccagggccccctgccagcccctgtcctacaggggcaagacggcaggaccaggcatgggggagctggaggcagggactagaacagagggagccacctggagagacggaggctgtcagtgcctgcctcgatacctctctctgcagagagcttctgggtgggggcttatctcctcccccaggagggtggatctctgtccctctatccccagggactctctcccctcttgtatagaataaaaaaacaaaatcatcgcctgcctcgagtctctgctatcttccccattcactgcctccacaatctgctctcttcccacaaaccctcagagcttggccacagtggagaaaaatgagaaacattccacagggatagacttggggttctgagaggagcaggagaaaaaaacagagaactgccgagggaaggggactgataagtccccaagccaagatgggtgttatgcccagggtcagggctgagcttcctggagaaagaaccaaaaggacagaaaccaacacaaagtctgtccagcttttgggggtgtaatgggattggaagccccagtgtaccagagggacacgggagcagtgtgtgtgtgtgtgtgtgtgtgcatgcatgcacactaatgggggaattacatgatgttgtgtcgtcctgggggcaccctcactagtcagaagtctcaatagcagagtggcttgcaggtgaacagaagtctctgtggcatgaggtcagcaactaaagtagctgtctcccatggtgttctagcaaatactatcttggcattcaagatcccactcaaaagccccttcctctgtgaagtccttcctgatgccttccccactcatccatattgcaccctgctttaatgtgctcccactgcatcctgagcaggtccataacattgcacctgtcacgcttcattgcgtatgcgtattggcttatcctctctctgtctgcctgtctttctgttccatatacatctgcctcccccaggggcagaggctgtgtcttaatcacctgtgtagccccagcacctggcacagtgcctgacacccaggagatgctcaataaatggctgctatattaatacatgagcagcttaaggggatggagggcgaaggtaaatgctcttgcgtactcatcgcagaccacaatgtgcccaaatgtcttcatgtgtggtttgcagctccccaggcaactgcttacttcccttacttactgatttcaccaggaattacttgttttgtttccttaagatctgtgcatggcacagcccctcccacaagggtaaggccatatgggttgaatcttggggggtgttgggtacattgtggcaccgggaagaagccttgggagtcagtccttcagcagatgccctcatgtgaccaggatatgaggttgggtgtccttaagcaattatgtccatttcctgtgtctccttataaaatggtggctagggaactggacatcattctcaaagctatgacgttcagcaaggtatgtgatggcttttaaggagcacgggaagatcacatcctgctgtattccgggttagtttgagtgagtacatgtgtgacaaggacagcccagtgttcctgtatatgtgactgcagatatccttagctagtgtaacaatgttgaaagtgatgtgagaaggggtatgtttccca

SEQ ID NO: 12051 - DNA, 2300 bp, Homo sapien
gcctcgcaaggactcagacccctatccacccccagtccccagggccccctgccagcccctgtcctacaggggcaagacggcaggaccaggcatgggggagctggaggcagggactagaacagagggagccacctggagagacggaggctgtcagtgcctgcctcgatacctctctctgcagagagcttctgggtgggggcttatctcctcccccaggagggtggatctctgtccctctatccccagggactctctcccctcttgtatagaataaaaaaacaaaatcatcgcctgcctcgagtctctgctatcttccccattcactgcctccacaatctgctctcttcccacaaaccctcagagcttggccacagtggagaaaaatgagaaacattccacagggatagacttggggttctgagaggagcaggagaaaaaaacagagaactgccgagggaaggggactgataagtccccaagccaagatgggtgttatgcccagggtcagggctgagcttcctggagaaagaaccaaaaggacagaaaccaacacaaagtctgtccagcttttgggggtgtaatgggattggaagccccagtgtaccagagggacacgggagcagtgtgtgtgtgtgtgtgtgtgtgcatgcatgcacactaatgggggaattacatgatgttgtgtcgtcctgggggcaccctcactagtcagaagtctcaatagcagagtggcttgcaggtgaacagaagtctctgtggcatgaggtcagcaactaaagtagctgtctcccatggtgttctagcaaatactatcttggcattcaagatcccactcaaaagccccttcctctgtgaagtccttcctgatgccttccccactcatccatattgcaccctgctttaatgtgctcccactgcatcctgagcaggtccataacattgcacctgtcacgcttcattgcgtatgcgtattggcttatcctctctctgtctgcctgtctttctgttccatatacatctgcctcccccaggggcagaggctgtgtcttaatcacctgtgtagccccagcacctggcacagtgcctgacacccaggagatgctcaataaatggctgctatattaatacatgagcagcttaaggggatggagggcgaaggtaaatgctcttgcgtactcatcgcagaccacaatgtgcccaaatgtcttcatgtgtggtttgcagctccccaggcaactgcttacttcccttacttactgatttcaccaggaattacttgttttgtttccttaagatctgtgcatggcacagcccctcccacaagggtaaggccatatgggttgaatcttggggggtgttgggtacattgtggcaccgggaagaagccttgggagtcagtccttcagcagatgccctcatgtgaccaggatatgaggttgggtgtccttaagcaattatgtccatttcctgtgtctccttataaaatggtggctagggaactggacatcattctcaaagctatgacgttcagcaaggtatgtgatggcttttaaggagcacgggaagatcacatcctgctgtattccgggttagtttgagtgagtacatgtgtgacaaggacagcccagtgttcctgtatatgtgactgcagatatccttagctagtgtaacaatgttgaaagtgatgtgagaaggggtatgtttcccaatgtgtatccgccgggggctgtaactgtcgtggtgtcacagtgagtttatgtactggcgcctgtgtgtgtcaagatatgtgtgagcctgtgagtcgtgggtgcatgtgtcgccatcatttctctgtttgaatgtgtatgtgcatgccactgcaatgtgcgcatctctgcgattctgggtgtgggtgtagtgtgaaggggaagatgtgtgtcactgtgtctgtgggggtcctgcctctaagccacccccagcctgccctcctcccccggttctgtggctccctcccaggctgtggccctgccccttccctcttctccctcccaatccatccacgcggggggagctggtgctgcgcccccccccacccctccccatccaggccccataaatagcagcagagccggagctggagccggcgccagcggctggagcagcaagggagtcagggccagggccagagagccggagagaggagcccccgaccgagagcccaggtgagcccacccttcctccccagcccagccccagcccagcccagcttggcccagtctccataacaacatctcctggagcccgcagagagatcccagccc

SEQ ID NO: 12052 - DNA, 2300 bp, Homo sapien
cagtgcagacctgacagctgctggttgggggcaagtgtctggccaggccagagcaggcatgaaaaaggggctgcactcaacacttcccattccttcttcaaccagggaaattgtagagtctctttcctgggtgtccactttggagagctacattccatgggcatgtgtgtggggtcctgcctctccatgatcctcattcccattttgtggttggttcctaggccttaggcttttttattcttttgagaaaacagcagtagatccaggcagtcacacagagaagcttgaatggtgacgatggtttctgctccttaaaacagaaacccaggtgtgggaagagagtgatgtcatctgatctaggttttccaatatgtgtatggaaagcatggtaggagagaccacatacacatgcacagacagacatatatacatgcctccccagggaagctgggtagactgcaggcattctgtgcagttctcaaactttctttcttttctcttcttttttttttgagatggagtctctctctgttgcccaagctggagtgcaggggcacgatctcggctcactgcaacctccgcctcccaggttcaagtgattctcctgcctcagtaggagtagctggcattacaggtgcctgccactatgcccagctaatttttgtatttttagtagagatggggtttcaccatgttggccaggctggtcttgaactcctgacctcaagtgatccgcccaccttggcctcccaaaatgctgggattacaggcgtgcctggcctttaaactttcaagcatgtcagacttgctggaagggccttaaaacacagatttctgggccccacccccggagtttctgactcagtagatttaaggtgagatcaggtaacatgtatttctagcaagttcccaggtgatatggatgctgctgctctggggaccacacttcagaaaccaccttcttagataatctgtatctgccagcttttccccaacatataaggctgggaccaggttaagttttataagtgatgacctttggggtctgatggacacccaggcctctgtgttgagaaagaggaactattaaccccatgggagtatttgggtggcctcagaaggtaggaagtggcctttaactccatagaccctatttaaacagcttcggacaggtttaaacatctccttggataattcctagtatccctgttcccactcctactcagggatgatagctctaagaggtgttaggggattaggctgaaaatgtaggtcacccctcagccatctgggaactagaatgagtgagagaggagagaggggcagagacacacacagggaaaaggtgagagaaagcagagggcatatgaggccagttacaaaagtgtctccgacggactggtggtgattagatttcaatgtcccttgaggcccagaaggaaggaacagagttccctgttctcttttttcctactctttctcccaagctggattagcaagaatgggagagacaaaatatggtggtcaagtcctggagatcccctgtgggaaaagttgctttcctttctgatgcgacggctatgaggggcataagaccagtcagcatgaagatggggcagaggtagaaatgtgaggattcttgaaaataggaaacagatccaaaaggcccggtgagagtgggcgtgggagagcttatagtctccaaagacagatgaggggctgcagggccttggaaggtgggggtgctgggagtttgtctggtcctctttttccaatcccaggctatgcatggctagggctgagggttgtgttcacatagaggggtggtggttcagacccatgtttctgtccgaactgggaaactgagcacttgggagtcggatcatcagtgaggagctttgttggggaagatgctccctttccttctttgagaataagcacacttgtactctcctctctctccatttcccccaaccccaggccaataagatatgcaaatgatctccttaccttattggttggaggcctcaggaccacagatgacctcagagagctggccctttaagaatgccctttgggctctgtgcccacagccccctggagctgagcagaggcaccaggccctgctccatggagccttcagtctcctgggaagctgtgcctgtctggctctggcactgaccacatcctctcggccatttctgaagtgagtatatccagggcctacctgggtgtcaggccgctcacctagaaccccctctttaacacctgctctctgttgtctgttttcaagaatccta

SEQ ID NO: 12053 - DNA, 2300 bp, Homo sapien
tatatgttggcatacttctggggtcctgcctccctttttccttgattcttcccttagggtgaccgagcaaatgactctttaagcccgtgtccacatatgtaaaatatagttgtgaaacagaatgagattatgcatgcagagttgctgacacagagcctggcacctactgtccatagcataaacattattcttctctcttaactttccaagtggatttgcatgcacagtgtggggagtggcttggtagggagaggggttggtgtttggagaggcaggagtccaagaagtgccttagaagctatcacctgaagccaggtgagagataagccctgaactaaggccctggccatggggatagttgcagacttgagggctaattgagaagtacaattccaaaggtcctggcatctgattagctatgcaggataagaatagtctagactgattccctttggggcaactggccagatgatggtgccatttgctgaggtaggaaaccatgagagcaggtgcaggattatggagaagatgatgaccttcaggtcaaccatgctgccaccagtgtgcacacctttaggcccaaaggttggccaagaggtatgtgtttgcagctgggtaagtgtggacagagtttggatctatgaactggggggaaagagatccaaatacatatacctgaggttgagtgtaggctagagcctgagggggaagagacggggaccagtagcaagcccgtggctggagaccagctctccttatcccactatgttccagcatagaactccaagaaatctgagaatcaagactgtttctgttgcaagtggcagaactccaattaaaattagcttgagcaagagaagaaatgcatcaattcctgtaactgaaatcaggaatccattgctcgccatctccctgctctgcttcctctaggctggcttctgtctcagccaggttcctgctttgcagtgccaagctaacactcagcagctccaggcttatattctaccagctcagcaactcagcagaaagagagctaacttccaaagttttagaaaaagtcccagagagggatctcatgcccatccttgaacatccttgattgctgtggccagagtgaggaacacaaaagttggctaagctgcaagcctacccccaagaggggtgacatcagacccacatgacaatacagactgaggagatggttccccaaaagaaaatcagggtgctattaccagaaaaggcgagtggatgctgagcagacacccatcatagatatgctgagtttgaggtgctatatagcattgtgggtgatatccagtggtctcaggttggagagagatgtcccaatggaggtatagcttgagaaatcacctgaggactttatgatggtagttgggtgggcagatgagtttcctcattggattgtggagagaaagaatgaccaggccgggcgtggtggctcacgcctgtaaattccagcactttgggaggccaaggcaggcggatcacgaggtcaggagttggagaccagcttggccagcatggagaaaccccgtctttacaaaaaatacaaaaaatcagccgagtgtggtggcaggcgcctgtaattccagctactctgcaggttgagacaggagaattgcttgaacccgggaggcggagtgtgcagtgagccgagatcgcgccactgcacgcactccagcctgggtgacagagtaagactccgtcaggggaagaggggatgtgccgggggaggagaatgaccagatcagaggaccaaggaagagacccaggggtagagagactccaccatttcatggcaaggcagaaaggagccttgatcaggaggagaaacggggatttaggagttggggactaagtggaccttagcattgggcacttggactacagaaaggcccaggactcagggtgtcgcgtccccaggaggaggaactggaaaggcaatgcccaaccccctaacttctagacgtctggcccctgtagtctcccgcccctggcctcgcccctcgttcctagcttgtttgccacctagtgtctctcccgggagcaagagtcctcaaagttacatcatgtgcggctgggagggcggtggcggatggggggcggggcctcgaagtcgggggccgaagagtggacccagtcctccaatgggagagatgggtttggcggtttggaggcaggggttggggcggcggctgggctgacctggagcctggagccccggggccgagggagctggcctgccagcggggcggaggaaagctagtgccagccctacc

SEQ ID NO: 12054 - DNA, 2300 bp, Homo sapien
gcacagtgtggggagtggcttggtagggagaggggttggtgtttggagaggcaggagtccaagaagtgccttagaagctatcacctgaagccaggtgagagataagccctgaactaaggccctggccatggggatagttgcagacttgagggctaattgagaagtacaattccaaaggtcctggcatctgattagctatgcaggataagaatagtctagactgattccctttggggcaactggccagatgatggtgccatttgctgaggtaggaaaccatgagagcaggtgcaggattatggagaagatgatgaccttcaggtcaaccatgctgccaccagtgtgcacacctttaggcccaaaggttggccaagaggtatgtgtttgcagctgggtaagtgtggacagagtttggatctatgaactggggggaaagagatccaaatacatatacctgaggttgagtgtaggctagagcctgagggggaagagacggggaccagtagcaagcccgtggctggagaccagctctccttatcccactatgttccagcatagaactccaagaaatctgagaatcaagactgtttctgttgcaagtggcagaactccaattaaaattagcttgagcaagagaagaaatgcatcaattcctgtaactgaaatcaggaatccattgctcgccatctccctgctctgcttcctctaggctggcttctgtctcagccaggttcctgctttgcagtgccaagctaacactcagcagctccaggcttatattctaccagctcagcaactcagcagaaagagagctaacttccaaagttttagaaaaagtcccagagagggatctcatgcccatccttgaacatccttgattgctgtggccagagtgaggaacacaaaagttggctaagctgcaagcctacccccaagaggggtgacatcagacccacatgacaatacagactgaggagatggttccccaaaagaaaatcagggtgctattaccagaaaaggcgagtggatgctgagcagacacccatcatagatatgctgagtttgaggtgctatatagcattgtgggtgatatccagtggtctcaggttggagagagatgtcccaatggaggtatagcttgagaaatcacctgaggactttatgatggtagttgggtgggcagatgagtttcctcattggattgtggagagaaagaatgaccaggccgggcgtggtggctcacgcctgtaaattccagcactttgggaggccaaggcaggcggatcacgaggtcaggagttggagaccagcttggccagcatggagaaaccccgtctttacaaaaaatacaaaaaatcagccgagtgtggtggcaggcgcctgtaattccagctactctgcaggttgagacaggagaattgcttgaacccgggaggcggagtgtgcagtgagccgagatcgcgccactgcacgcactccagcctgggtgacagagtaagactccgtcaggggaagaggggatgtgccgggggaggagaatgaccagatcagaggaccaaggaagagacccaggggtagagagactccaccatttcatggcaaggcagaaaggagccttgatcaggaggagaaacggggatttaggagttggggactaagtggaccttagcattgggcacttggactacagaaaggcccaggactcagggtgtcgcgtccccaggaggaggaactggaaaggcaatgcccaaccccctaacttctagacgtctggcccctgtagtctcccgcccctggcctcgcccctcgttcctagcttgtttgccacctagtgtctctcccgggagcaagagtcctcaaagttacatcatgtgcggctgggagggcggtggcggatggggggcggggcctcgaagtcgggggccgaagagtggacccagtcctccaatgggagagatgggtttggcggtttggaggcaggggttggggcggcggctgggctgacctggagcctggagccccggggccgagggagctggcctgccagcggggcggaggaaagctagtgccagccctaccaggttccgcccccgcgcctgcccccctcctttttaagcgcctcccgccagcctctgctgtggctcgcttcgccgcgctccctccttccccgccttccatacctccccggctccgctcggttcctggccaccccgcagcccctgcccaggtgccatggccgcattgtaccgccctggcctgcggtgagtgacccccggcccggggcccacccgcaccttccg

SEQ ID NO: 12055 - DNA, 2300 bp, Homo sapien
cattgggatgttctagttaagttgattttgccttggtgaacccaaagtggcctcagtgcacctatcctgcaggttgtggagcccaaggcttaccagttattgtacttggggagctttcggatgaggccctgctgctccagcagggtcagtgtggcagtattctcagcctcagttccatcacagatgtggatgccctctggttggcacaggcgggcactgtgctctacaaaatctcgaatgccagtgggaagctggcccagatctccactaagcactcgcagggtctggatgctacggcatgatggccagcccaaggggctcagcccatgccagttaagcctataggagaaacagaggcaatgagctagttgctgtcatcgagagtggacaaggcaggtggtggagagacagaaagcttgggctgcagcctgctaaaacatgtctgcatgcagggaccatgaagagcaggttgcagttggtgtgtgggatgtgttcaggacacatgtatcttgtagcctttatgaggcttgaggagggtgtctcctgctcagcgagggacagatatggccaaatgagcaaaaaaggcacatgcctggctgtgtggaagtatacatgtaggcatgctgatgttactgcctgtgtagcccatgcccatgtttaactgtttaatcaacgtttagaaataagtagggagatggctgggcacggtggctcatgcctgtaatcccagcactttgggaggctgaggcaggtggatcatgaggtcaggagatcaagaccatactgggcaacatggtgaaaccccatctactaaaaatataaaaattagccggatgtggtggcgtgtgcctctagtcccagctactcaggaggctgaggcaggagaatcgcttgaacccgggaggtggaggttgcagtgagccgagatcgggacactgcactccaacctgggcgacagagcaagactctgtctcaaaaaaaaaaaaaaaaaaaaaaaaaaaagaaatgagtaggggcctttggcccaagtgtcaagacaagaagttgggcccaggtgacaatttcatatgtctggtatttgaagcctcatccattttatttccattttcaagtatagttttttataaattaaaatggcagctgtgtttattctttccttctggtgtgtatgctgtaagactatgaaagccccaagcaaaggtcacagtctttccagtgccaggtttctagatgagggctcttgcacagagaataggtgactggatgctgggcttccaggccctgatctgctgctgcccacttggaccaacaatggttgcataaaatgttgccctcgggtaagtatttctgaactctgcggaaggttgaccactggggaatgagtgtcactggctggggttcatgggcttaattctcaggaggtcagcgtcctgttgtctgtcctctcatggccctgggagacagagaagcaacgtctgctctgattggcctggactcaaggtggagtaaacccgagagagcaaagaccatgaaggggatgttactctcctcctctatcaaggcctcgcccatcagaaactgcccccacacccaggaccacgtgaccccgtgcttcccctggctcttcttcctagaggccacatgcctagagagctttggtgttggtgggagggtggaacagcagcttgctggcagctcagactcagagggtgttagcctggggaaggaagaaagctcagagcatggatacgggagcttgagtctgtctggggtagaagctggggtggtttccgctaaagcaggatagatgatcagtgtggccccaggggcaggggaggagggctactgggacctgggtctgttcctgcctcagagggaagttctccgtgagcatcagttttcaagcacacagtcttgaggacagcctctctctccctggagcctggctcacgttatctcttgtgaagcccccacaccctcttgcagccctctaagtgggacgtttccttcagagaccacccacaagggctgcccaagtggaacgggctgtgcgacagatgtgggtcacttccgactctgggacaaaagctgagaagagaggcctcagagaataaataggagactaagaggacaggcagacaaacaggacgagcctgggggctccaggcctggacggaggaagaagccagctatgtaagaaacgaaggcaacttggcgccctcctcccaccttgcttgcctccctcccctgggcccaggtccctcgggctgctctggacttcccgccaggttccagtcctt

SEQ ID NO: 12056 - DNA, 2300 bp, Homo sapien
accagttagaatggcaatcattaaaaagtcaggaaacaacaggtgctggagaggatgtggagaaataggaacacttttacactgttggtgggactgtaaactagttcaaccattgtggaagtcagtgtggcgattcctcagggatctagaactagaaataccatttgacccagccatcccattactgggtatatacccaaaggactataaatcatgctgctataaagacacatgcacacgtatgtttattgcggcactattcacaatagcaaagacttggaaccaacccaaatgtccaacaatgatagactggattaagaaaatgtggcacatatacaccatggaatactatgcagccataaaaaatgatgagttcatgtcctttgtagggacatggatgaaattggaaaccatcattctcagtaaactatcgcaagaacaaaaaaccaaacaccgcatattctcactcataggtgggaattgaacaatgagatcacatggacacaggaaggggaatatcacactctggggactgtggtggggtcgggggaggggggagggatagcattgggagatatacctaatgctagatgacacgttagtggtgcagcgcaccagcatggcacatgtatacatatgtaactaacctgcacaatgtgcacatgtaccctaaaacttagagtataataaaaaaaaaaaatgattccgtcacattctgggagaacgcaggtaaaatcaatcaataaataaagatcccgattttccaggctggataacccagaaaccacggaatcctaaagtctcaataaacgttaaagcacagatagtaagtaatctggcaatagaggatgggcgcccagcagaccgcctacataatcagtggagccgagtgcaagatgaaaataccaggcacttgctttaaaattactaataatttcaagaccgttaacactagaacattaaaccaaacattcaggacccttctaagcgcagaggccatcaaagctagccctggtgacaagctcaggtctccggatctagagactaggagacgtcgcccgaaagctggccaaaccctcgccctcactgggagaggccccaggagggcccaagaaggccacgagccctcgctcccatccctgccctcaggagcgggcggagggaagctcgcagctttcccaaggaagtgcaggctgcagggaatgaagttcagctcggaccctgagcctctgagcccgagacagcaaggtcattcaacccacacgtccccacccagccagggcgaggatcagagatgtggcaactcccggccttggactcaggcttgttactcataaacccgcaggagggggcaggagggggcaggaggcggcgagcgcgcaccctggacccgcggccgggggcggagaggcaccgcgaggacagagggactagcgaaggtctgcaaatcccggagggccaagggagcgtcaaaggggacagcggaaccggaaaagctttgacagaaagacgcgtgtattagggaacgtctgcaaagaccgcggcggaaagccagggattgtcttaaaaaattgtcagaccggataaagggaggtctaaaaggggaccgtcccaagagcaaggcttccaaaagctaagcccggaaggacggtatggaggtctactgggacgctgggcaccccttagggcagaaccgactggagctgcggccagcgacagaagaacggctccagctggacaggggaagcagtggggagaaaggaggcccttgggcactgtctgaaaagtgcgatgccaaatgatctttagggacagacagtaaattatatcccttgctaaaatacctctcggtagcgaaccaccaaacgtttcttttttaagccccgcctctcagccgttacgcctagttcggctgtctctgattcaggaagctggcagttcccacttactcctccccagcaagagctaacagccctccttgggtgtgcactttctcctcccctcaggcacctcgcgcattctcccgcctacctatcaatcatcgtgctccgctgtccagttggctggccaagggggcggggccgtcgtgtgacgtttgcagcccgccggccaggaagccgcgagatgcgtgacgagcgaagcgcgtgacggaggagcggttggccaacgcagtggcggcagtcggtgtaaacaaggcctcgcgccgctgcgggtcctgcgaccgctcctggctggtgggtggtctcgcgtggggcggttaccgccggcttcagtgggaggtgcttctcggcttcctcccc

SEQ ID NO: 12057 - DNA, 2300 bp, Homo sapien
tggtggggtcgggggaggggggagggatagcattgggagatatacctaatgctagatgacacgttagtggtgcagcgcaccagcatggcacatgtatacatatgtaactaacctgcacaatgtgcacatgtaccctaaaacttagagtataataaaaaaaaaaaatgattccgtcacattctgggagaacgcaggtaaaatcaatcaataaataaagatcccgattttccaggctggataacccagaaaccacggaatcctaaagtctcaataaacgttaaagcacagatagtaagtaatctggcaatagaggatgggcgcccagcagaccgcctacataatcagtggagccgagtgcaagatgaaaataccaggcacttgctttaaaattactaataatttcaagaccgttaacactagaacattaaaccaaacattcaggacccttctaagcgcagaggccatcaaagctagccctggtgacaagctcaggtctccggatctagagactaggagacgtcgcccgaaagctggccaaaccctcgccctcactgggagaggccccaggagggcccaagaaggccacgagccctcgctcccatccctgccctcaggagcgggcggagggaagctcgcagctttcccaaggaagtgcaggctgcagggaatgaagttcagctcggaccctgagcctctgagcccgagacagcaaggtcattcaacccacacgtccccacccagccagggcgaggatcagagatgtggcaactcccggccttggactcaggcttgttactcataaacccgcaggagggggcaggagggggcaggaggcggcgagcgcgcaccctggacccgcggccgggggcggagaggcaccgcgaggacagagggactagcgaaggtctgcaaatcccggagggccaagggagcgtcaaaggggacagcggaaccggaaaagctttgacagaaagacgcgtgtattagggaacgtctgcaaagaccgcggcggaaagccagggattgtcttaaaaaattgtcagaccggataaagggaggtctaaaaggggaccgtcccaagagcaaggcttccaaaagctaagcccggaaggacggtatggaggtctactgggacgctgggcaccccttagggcagaaccgactggagctgcggccagcgacagaagaacggctccagctggacaggggaagcagtggggagaaaggaggcccttgggcactgtctgaaaagtgcgatgccaaatgatctttagggacagacagtaaattatatcccttgctaaaatacctctcggtagcgaaccaccaaacgtttcttttttaagccccgcctctcagccgttacgcctagttcggctgtctctgattcaggaagctggcagttcccacttactcctccccagcaagagctaacagccctccttgggtgtgcactttctcctcccctcaggcacctcgcgcattctcccgcctacctatcaatcatcgtgctccgctgtccagttggctggccaagggggcggggccgtcgtgtgacgtttgcagcccgccggccaggaagccgcgagatgcgtgacgagcgaagcgcgtgacggaggagcggttggccaacgcagtggcggcagtcggtgtaaacaaggcctcgcgccgctgcgggtcctgcgaccgctcctggctggtgggtggtctcgcgtggggcggttaccgccggcttcagtgggaggtgcttctcggcttcctccccctcatggcgtacacacccccggcgcaccacgtgggcgtgaggcgaggaaggaggggtgttaggccaaattctattttcattggctgtcactgctgccggcctttgtaagggggcgctctgattggtcgataaggtgggggcgtcgagggtctttgagtcctaaggcttctaattggttagatgagataagctagtgaagcgctttcttccgagagggatttcgattggtcggtcagagaggttacctggaaatccaacaccgcccaacacccctcccgctccccagtccggggacttcgataggtgagtttggtgtagaaaacaaatctttcttcagttggtgagctagggtagcgcactacggttcactcttgctttctttgcttcacaggattggagaaggtttgtgttcccgacgccttggtagttggcataggctaaagaaaagggatctcagccccgaggaagggtcaccctcctagagatagctactaccccgtctcaggagaccctggtatttctagagcacgctttg

SEQ ID NO: 12058 - DNA, 2300 bp, Homo sapien
ctatcattcaaaatatcactaaaaggttttctagtaaaagtcttccaacattaggggcttttcctcttaccaggtgggttgtatcgatccccaagacgaccatcccaagctctgtcattctcttcctctgagtccaagagggcctgaatgaattgtaaatttgctgcacctcctccctgcaccaacctcacttggcctctgtggagagacccccattataaaggaggggacttcttcccccaaaccaaccaaattcagagtcaatggctatctagctcttagaccacttggtactcattttgaggtttgaggctgactagaccttggctgttatttttggtctcctataaaacacagtaggaaagagagttttactcttacagcaagagcaagaccaacatgctgtggacgtgacctactaagttgacctcccagcgagctaaacattctaacatcatttccttagaacaagagcaagaccaatacgctgtggacatgacctactaagttgacctcccaacaagctaaacatcctcacagcatttccttctgagcctctgcctgagaagtccaccacagaagacaatattctaagctgggtgcggtggtgtgtgcaactgtagtcttagctacctgggaggcaaggattgcttgagcccaggagttgcaggctgtggtgtgcacttgatcacacctgtgaatagcccgttctccagactggggaacacagtgagccctgtctatgtctactaaaaacaacacaaaacacaaacaaaaaagaatacaatattctgaagggacccccaaacccatcttctcctcaaagagccataagcaaagaaagaaagccagctgcacccttttccagtcaattccaggtggtctctcccttcaaggcattctttcctcaagaacaggttagagtcagggcaaattaaacttgtttttcaagtaaatcgaagtggcctcatatcatgtgtcaactgccttactaaaaagttcaacactcccttcccatctcttcaccccttacatcactcctttcccactaggaccccccccttttttttttcaagcttacttggaaaatagactatatttgtgtagtcacagagacaggctcccttgaatagcccctcaaacacatgagcaggtcctcttggtgaccctccctaggtaagaaccactcttactgggtatggagctgagtgccatgggtgcccagcagggaaaggctgttcagctcaaacagaacagctgtcctgagcgaatcccatttcctaacctctgtaattttcctgcctggagttgggatcaaggcactgtggtagcacctgctgggggtcacaccagagggtaagttacctgcggaggagataggccagtacctgggccagatccacatcttcatcctcttcttcctcttcctcactccgacgcaggccagcccctcttcggggcaagccctcggaggggtctccggacccggatcctgcactgctgctgttccgcgatcccatcttctggtcacagcattcttaggtcctgtgcgggggctcctcctgtcacctccttgggtttggtgaaagcaaagcgtgctctagaaataccagggtctcctgagacggggtagtagctatctctaggagggtgacccttcctcggggctgagatcccttttctttagcctatgccaactaccaaggcgtcgggaacacaaaccttctccaatcctgtgaagcaaagaaagcaagagtgaaccgtagtgcgctaccctagctcaccaactgaagaaagatttgttttctacaccaaactcacctatcgaagtccccggactggggagcgggaggggtgttgggcggtgttggatttccaggtaacctctctgaccgaccaatcgaaatccctctcggaagaaagcgcttcactagcttatctcatctaaccaattagaagccttaggactcaaagaccctcgacgcccccaccttatcgaccaatcagagcgcccccttacaaaggccggcagcagtgacagccaatgaaaatagaatttggcctaacacccctccttcctcgcctcacgcccacgtggtgcgccgggggtgtgtacgccatgagggggaggaagccgagaagcacctcccactgaagccggcggtaaccgccccacgcgagaccacccaccagccaggagcggtcgcaggacccgcagcggcgcgaggccttgtttacaccgactgccgccactgcgttggccaaccgctcctccgtcacgcgcttcgctcgtcacgcat

SEQ ID NO: 12059 - DNA, 2300 bp, Homo sapien
tgtttgaggggctattcaagggagcctgtctctgtgactacacaaatatagtctattttccaagtaagcttgaaaaaaaaaaggggggggtcctagtgggaaaggagtgatgtaaggggtgaagagatgggaagggagtgttgaactttttagtaaggcagttgacacatgatatgaggccacttcgatttacttgaaaaacaagtttaatttgccctgactctaacctgttcttgaggaaagaatgccttgaagggagagaccacctggaattgactggaaaagggtgcagctggctttctttctttgcttatggctctttgaggagaagatgggtttgggggtcccttcagaatattgtattcttttttgtttgtgttttgtgttgtttttagtagacatagacagggctcactgtgttccccagtctggagaacgggctattcacaggtgtgatcaagtgcacaccacagcctgcaactcctgggctcaagcaatccttgcctcccaggtagctaagactacagttgcacacaccaccgcacccagcttagaatattgtcttctgtggtggacttctcaggcagaggctcagaaggaaatgctgtgaggatgtttagcttgttgggaggtcaacttagtaggtcatgtccacagcgtattggtcttgctcttgttctaaggaaatgatgttagaatgtttagctcgctgggaggtcaacttagtaggtcacgtccacagcatgttggtcttgctcttgctgtaagagtaaaactctctttcctactgtgttttataggagaccaaaaataacagccaaggtctagtcagcctcaaacctcaaaatgagtaccaagtggtctaagagctagatagccattgactctgaatttggttggtttgggggaagaagtcccctcctttataatgggggtctctccacagaggccaagtgaggttggtgcagggaggaggtgcagcaaatttacaattcattcaggccctcttggactcagaggaagagaatgacagagcttgggatggtcgtcttggggatcgatacaacccacctggtaagaggaaaagcccctaatgttggaagacttttactagaaaaccttttagtgatattttgaatgataggttacattgaaagaaggtacgataatttaaggaataaggagtccttacagccccagtatattcagccacaggggtgggcttgggtacagttctgctaactgtcctctgaggctggcagacctaggatgaaacttctccttggtactcacagtggatgctacccctgacacccgggagctggaattcaatgagatcaagacacaagtggaactggccacagggcagctggggcttaggcgggccgcccagaagcacagctttcctcgaatgttgcaccaggtaggcctctccacctcccagcctggcagcaggcctgccaaagcagccagaagctctgccagccccagagaaaaaggaagtcaactttccaaagtagaagcctcaagcgctggggctggagagttaaccagcctccatcggagttctgtgggacagactatgatgtgtgtgtccatttctataacaagagcaatatctttggaggagggggcttgatatggctgaagtggccctctatttctgctagcaatattccccaatcccttccatttagagagaacggggcctctgccatcggggaagcttctcccttggagaacagtctcgagtgatatctcagtgagtatggggcttggtgaagagactctaagggccagataggtcttatctcctaaactttgaaggggtaggtgttaaaggagcctcagagatattaaaggttaggttaaatggggttgaaactttgagagtaaacaaagtagaaaagtgtagaaaattgtagaaatttagaggatggtggaatggttgaaagacgggattgcactcacagccaaaagggaagaatgactgttctgatattccagctctgttaggattctgctgattgggacactccttatcctgagcacccctcaccctcactttctctctccttccctagcttcttgcccaatgatctgggcttcactgatagctactctcagaaggctttctgtggcatctacagcaaagatggtcaaatattcatgtctgcttgccaaggtaccagaccctggtcctataaactatcttttcctggaacatgggacattccccctgactgaggctagaaagccacagacggggagctcagacctggcttaaggatgcttagcca

SEQ ID NO: 12060 - DNA, 2300 bp, Homo sapien
aggtcaacttagtaggtcacgtccacagcatgttggtcttgctcttgctgtaagagtaaaactctctttcctactgtgttttataggagaccaaaaataacagccaaggtctagtcagcctcaaacctcaaaatgagtaccaagtggtctaagagctagatagccattgactctgaatttggttggtttgggggaagaagtcccctcctttataatgggggtctctccacagaggccaagtgaggttggtgcagggaggaggtgcagcaaatttacaattcattcaggccctcttggactcagaggaagagaatgacagagcttgggatggtcgtcttggggatcgatacaacccacctggtaagaggaaaagcccctaatgttggaagacttttactagaaaaccttttagtgatattttgaatgataggttacattgaaagaaggtacgataatttaaggaataaggagtccttacagccccagtatattcagccacaggggtgggcttgggtacagttctgctaactgtcctctgaggctggcagacctaggatgaaacttctccttggtactcacagtggatgctacccctgacacccgggagctggaattcaatgagatcaagacacaagtggaactggccacagggcagctggggcttaggcgggccgcccagaagcacagctttcctcgaatgttgcaccaggtaggcctctccacctcccagcctggcagcaggcctgccaaagcagccagaagctctgccagccccagagaaaaaggaagtcaactttccaaagtagaagcctcaagcgctggggctggagagttaaccagcctccatcggagttctgtgggacagactatgatgtgtgtgtccatttctataacaagagcaatatctttggaggagggggcttgatatggctgaagtggccctctatttctgctagcaatattccccaatcccttccatttagagagaacggggcctctgccatcggggaagcttctcccttggagaacagtctcgagtgatatctcagtgagtatggggcttggtgaagagactctaagggccagataggtcttatctcctaaactttgaaggggtaggtgttaaaggagcctcagagatattaaaggttaggttaaatggggttgaaactttgagagtaaacaaagtagaaaagtgtagaaaattgtagaaatttagaggatggtggaatggttgaaagacgggattgcactcacagccaaaagggaagaatgactgttctgatattccagctctgttaggattctgctgattgggacactccttatcctgagcacccctcaccctcactttctctctccttccctagcttcttgcccaatgatctgggcttcactgatagctactctcagaaggctttctgtggcatctacagcaaagatggtcaaatattcatgtctgcttgccaaggtaccagaccctggtcctataaactatcttttcctggaacatgggacattccccctgactgaggctagaaagccacagacggggagctcagacctggcttaaggatgcttagccagaccatgtttcccatgataaagggaagactccacaggtacactgagtgggagatgtctaatctagaaaagttacaaggaaactgtcccataattctgcctgatctttacttacacagaccagacaatccgactctatgactgccgatatggccgtttccgtaaattcaagagcatcaaggcccgcgacgtaggctggagcgtcttggatgtggccttcacccctgatgggaaccacttcctctactctagctggtctgattacagtgagtatgcaccaggcttccactgactctccagcctgggacctgaggtttccatgtgcctgtcccctctgagccaggatccctcactttgtcctgggaaaatcactcccaaagtgctccagtacccttgtcccctgtttgatctcttccctagcttcacttccactcttcttcccccatccctgaaagattcttgtttttcttgcttctcttagttcatatctgcaatatctatggtgagggagatacacacactgccctggatctcaggtactggcttccctttctggtcagactcatcagaaacttctcaagggaagctctttgggagcaaacctcttgagttggaagttctgtttaggggaaaaagtatactggtgggtctgtgtgcattcctgggagggaagcaccatcttgtcagccagaggactgggtaaaatagatggttgc

SEQ ID NO: 12061 - DNA, 2300 bp, Homo sapien
tcaggtgatccactgcctcggcctcccaaagtgctgagattacgggcatgagccactgtgcccagcctaaaaacaacataacttttatatgcactgggaaaccaacaaaattgactcgccttatgcaatattcactttattacagtggtctggaaatgaactcacaatatctcctaggtatgcctgtacaacaaacattttacattacttcgataacataaaattatattgtaaatgcatctcttactgagaatggtcggtctgtggggctttgatctaatgaagctataaggatactaacaatttgaatttctctcttaatttggtgccctggaagtaacacaggttctgggtgagatgggtagcaccttaggtaactttatcacttggcagacggggaatgaaaagcgtggatgggaaaggagatctggcacgggagtttcacactaggtagatcaatttgaggaatgagaacacagaagccaaggatctgaacatttatttatttattatttatttttgagacagggtctcactctgtcacctaggctggagtacattggcacaatcacggctcaccgcagccttgacctcctggccttaggtgatcctcccacctcagcctcctgagtagctaggactacaggcatgcgtcaccacatctggctaattttttttttgagacagagttttgctctcgttgcccaagcttgagtgtaatggcatggtcttggctcactgcactcagctcacctctgctcccaagttcaagcgattctcctgcctcagcctctcaagtagctgagattacaggcacccgccaccatatccggctagtttttttgtatttttagtagagattgggttccaccatgttggccaggctggtctcaaacacctgacttcaggtgatccacctatctcggcctcccaaaatgccgggattacaggtgtgaaccaccgtgcccggcctactttttgtattttttgtagagatggggttttgccatgttgcccaggctggtctcaaactcctgggctcaagcgatccatcagctttggcttcccaaagtgctaggattacaggcatgagccaccacacctagcttgtttattcttttaaaactgcctattttgccatgaaataggtacccttgctgtgaaagcctgtgaacacccctggatgtgtgtaccttcatttaaaaactgccttagagggcatgaaatgtcatcagggaagatctattccgagctgggtgtgagctctagccctctccctgaccatcggtttgctctggggtatgaggttctgagtgtgaggcgcccactggggcctggcgtcagggccgacttgcttctcttaggctctgcgttcaggggctacctcttccaaagactacacagctgcaggcccagcctcagagcagaggtgatatgggtattaccaggctctaatggaaagtgtgctctctcgatatctacttgcagggaagcttctgaaattggtaagggagcacctattgcaaggctcagtgaacaaatggttttggtatttccctttttcatggggcaccagaagggtattttctcctacacaggatcgcatctgaagactttgctgaactgtgttttcctgaagtgaggagatgaaagacctcagataggaaaaacagagagtgagagagagagacagacactgagccaggttcccacacagtttattgagggagccaaagccagtgagaggacgaaggagtcctacttcaacctacttccttaaagctgtgtgcctccagcatgaagggaccttcccagagggcagggcctgccctataaggggccacatgaagccttgtggagactcctgcctctcataccacagcctgtcctaccctaaagacccagacatgacagcagacataatccccaccccaggagggtgctgaggaaacacccttacccatgcccctcccctagagacctcaggaagaaaggccaggacacctgtcctgtgattggccagttgaatcctcaacgtgaagacctggcaggcctggctgacaggtctgttcagatgtggcctcaggcatctactctaggatccaacccctaacattcaaacatgattaaaaacacccaggacacttctcttgctggcagaggccacaccccagataatggcagtcctgccaaactctggccagagatagggacccaagctgactgggtgtgagcacgtaaggagaccactctgccccatggggagaatcttccagggctcagctgaggctcagagccca

SEQ ID NO: 12062 - DNA, 2300 bp, Homo sapien
tcatgcctgtaatcccaccactctgggaggccaaggcaggaagatcacctgaggccaggagttcaagaccagcctggtcaacttagtgagactttgtctctacaaaataaatattgaaacaaggtctcactctgttgcttaggcttggagtgcaatagtgccatcacggctcactgcaatgtcaacctcctgggcccaagtgatcctcccatttcggcctcccaagtagctggaattacaggcacgtgccactatgcccagctaatttttttaatttttgtagggacggcgtctcactgtgtgagaccagctcaaggtggtcccgaactcctgtggctcctcaggctggtcccaaagtgctgggattacaggcatgagctaccacacctggccaaaaaataaaaaataaccaaccatggtgatgcattcctgtagttctagctactcaggaggctagggcagatgatcacttgagcccaggagtttgaggctgcagtgagccgtgatagcacactgcattccagcctgggcaagcgtgagacactgtctcaaaaaaataaatcataaaactttaataaataaaaatgagtggaaagaatttttttttttaagacggagtcttgctgttgttgctcaggctggagtgcaatggcacaatctcggctcactgcaacctccgcctcccgtgttcaagcgattctcctgcctcagcctccagaatagctgggattacaggcgcccgccaccgtgcccagctaatttttttattttcagtagagacggggtttcactatgttggccaggctggcctcaggcgatccatccacctcagcctcccaaactgctgggattataggcgtgaaccaccatgcccagcctagttcaaaattcttttatagggttcattgaaggtcactattccaaggtatgggctttaggatctggaaggaatctgattgattatccaatctgtcttgatcagtttataaaggaaattgatttactgaggactgaagagggttcattgattttcctaaagtcacacagttgggcccagaactcaggtgtccttgcttgctcattcctttcactacttccgctgtgctctgaaatcccaccactggttttgaggaatgaggaagaaagaaaaagtgatctcgaaacagttactgactaacaggcactctccgtggataggtagctgactgccctgctgtcgccgcctcagcagtcagactgggagggcaggcttatatggagagccctgaggcccagggtagttggttggaggatggaacttaaggtttcaattgactcctgtctggcaattgcccttttagggtctcctctacctctgtcacctgggagtaaacctaatctttagggatctgagggtcaacgtgatcaacagatgaaaccgccagtttatacagcagccctgggccaaactagtcccttagagaccctcaatccagacaggaactagggcagagccaagctgctggggtcacagggcactgaagtggatacccatgctgatctgcctcccaaggcctatgatggccacagtgctgtgcacagccaccttgctgcatcctgctgttggtgggctcttgtgctcagaaccccaggagaagggctagatcacactgataagactggcagctttttttaaaaaacgactttcaaggtttggttatttttatctccatgacctctgatttccctgtggagcaaatggtaaagtaggggtgggtggagagggactttggcagactatggacaaggacagccctgaacagctggccctgtcacaggaactggaacatggtcggagccaaggacacaggactaacaggaaaggacacagactgctgtcaggacacatactaccacacacccgaggccaggaccctgctgacgtggcagacctccaccctggccccttactgccccccgcccctctcccccacctgccagctgccaacagggctctgccttgtgtctgccacacctgtcactgcctatccttgtccagggggggccccatcagcccctcctcagctgcccagcaaagcaagcagttagtggggaggggagggaacatggagcgggggccggtggtgggggcaggactgggggccggggcccgaatccaggcactgctgggctgcctgctcaaggtgctgctctgggtggcctctgccttgctgtactttggaagcgaacaggccgcccgccttctgggcagcccctgcttacggcgcctctaccatgcctggctggcagcagtggtcatc

SEQ ID NO: 12063 - DNA, 2300 bp, Homo sapien
attatatatattattatatattttatatataatatttgcatatataatatatatataatttttttttaaagacagagacctggcagtgatggcagtgtaatcccagcactttgggaggctgaggcaagaggatcacttgagcccaggagtttgagaccagcctgggcaagatggtgagaccctgtctgtataaaaattttttttaaaaggtaaaacattttttacatttttatttttattttatttttattatttttttggagacagagtctcactctgttgcccaggctggagtgcaattctggctcactgcaacctccacctctcaggttcaagcgatctcctgtctcagcctcccgagtagctgggattacaggcccccaccaccacacccgtctagtgtttgtatttttagtaggcacagggtttcaccatgttggccaggctggtctcgaacttctgacctcaagtgatctgcctgccttggcctcccaaagtgctgggattagaggcgtgagtcactgtgcccggccatttttacattttttaatggttgaaaaagcaaaagaataagaatattttattacaggagaaagttacatgaaattcaaattccagtgtctataaaatgttatctcaccaaactaattcatttacatatggcagctttcctactacaatggcagagttgagtagacagacactgtaaggcctataaagcctaaaatatttactctctggccctttatagaaaaagttggccagacgcggtggctcatgcctgcaatcccagcactttgggaggccgaggcgggcggatcacgaggtcaggagatcgagtccatcctggctaacatggtgaaaccccgtctctactaaaaatacaaaaaattagccgggcgtggtgggacgcgcctgtagtcctagctactccgtaggctgaagcaggagaatcgcttgaaccctggaggtggaggttgcagtgagcctagatggtgccactgcactccaccctgggcgacagagcgagactccgtcccccaacacacacacacacacacacacacacacacacgtttgccaaaacctggtttaaatcagtaaattatcctggaaaaaaaaaaaaaaacacctggctaatatcagagagataaatgctatgaatgtactaaaacaggatgatttgtaatagatttggagggaggttccttataaaggatgatgaaaatagttctctctgaagaggtgacatctaaactgagaaccgaatgacaacacccagggtaagggtgttttaggcaaagggattattagcaagggcaaaggccctgaggcagaaatgaacatgacacatctgagaaacaaatagcccaaatatttgcaagtgtaatgaatgaaggggcaagcagtagaaagtggacttaaaggggagacaggtgcgacagccttttggatttcattcaaaggtcaacaggcagctgagaaagggttttaagccagagagaggcatgaacccgctgctccgtgagagtgggttatagaatggcatctgcagccgtggtccaggagagagttggtccgggcttggatagggatgctgccagctctggtgccggtgttgctacaggtgcgcaggatgtcggcagagccagaggcccacgctagcaaggctaggaaagacaggccaggtcttattccatctctagggaaagacggaagagccctaagtaaagcttatctgtcccaggcggagcaggggaagaagagagcaggtggggagccagttgggaggcgggaggtggaggttgggacgcggagagactggcttgggcttggcgatgggaggacccggacccgccgtcctcaggcggcgggcggcaggtggcgggaggcgggaggcggggaccgggccagcggaggtggggagcctggaagctggccctcgcgaggcggcgcggggagggtgggtgaagagcgcctgtgcgcgctaggcggagcctcacccgccgccctcctctgcggcaccgccccttccatggcagggctgaccccgcctcctccatccgaccccgcctcctccagccctccccgccccactacccaggaaggcggagctgggtgcgagcgccctaccgctttcgctttcccttcgcggtgcccactccactccttgtgcggcgctaggccccccgtcccggtcatggccatgctcagggtccagcccgaggcccaagccaaggtgagcgccgcggggtctagaaagggcccactggggaggcgtggctggagcggccgggggc

SEQ ID NO: 12064 - DNA, 2300 bp, Homo sapien
ttgagcaatctgaaggccccattggacatcccagtgcctgatccagtcaaggagaaagagaaagaggagcggaagaaacagcaggaggcaagctgggaagacctgggagaagggatccaactatgggggtaatcaaccttagtcctgactctcatgagctcctctctttctgcagaaggaagacaaggatgaaaagaagaagggggaggatgaagacaaaggtacttgaaaccacaatggtgggaagagacttgagtcccactcacaggagctcctcctaaggatttctttccagtctccccttcgcccctcacacaggctcaatcatgtgactgacccattgctcactctctaggtcctccctgtggcccagtgaactgcaatgaaaagatcgtggtccttctgcagcgcttgaagcctgagatcaaggatgtcattgagcagctcaacctggtaagccctcccccttaaactctcaggcttcaagtcaaaccattgtcctcttggtccctgccatttagggcctggcacttgccaggttttagcaagagagggcacagcaagtgaaaccagaagtccaggccctggggctcaggatagacccggcacgcctccacccagtgtggggagggaagcaagggagaatatgaaactgggaattgggtagagggctgatgtggcattatgccattccctcttcccaggtcaccacctggttgcagctgcagatacctcggattgaggatggtaacaattttggagtggctgtccaggtgagagcgctgccccacttccctgctcttttctagtccatgcttccttccactttcccccttgctttttttccctaggagaaggtgtttgagctgatgaccagcctccacaccaagctagaaggcttccacactcaaatctctaagtgagtgaccacccatgtgcacactgtttttgttttgggagacctccttcttctactccatacacacttctccttccacaggtatttctctgagcgtggtgatgcagtgactaaagcagccaagcagccccatgtggtaggtgaggcccaggtcagggtgcatgggggaaggacacatgtaaggtcaggcctgacccgagcttcccacagggtgattatcggcagctggtgcacgagctggatgaggcagagtaccgggacatccggctgatggtcatggagatccgcaatgcttatgtgaggaggcaagggcagggcaggggtgggcagaggcagctttcccaggccacccactccctgaccctgcaggctaggggttaagggtgacaaagctcagcttctccacaaggctagaaatggggcacagagccactggaggcctctgactgacctctactccctggccctgtaggctgtgttatatgacatcatcctgaagaacttcgagaagctcaagaagcccaggggagaaacaaagggaatgatctattgagagccctctctcccattctgtgatgagtacagcagagaccttcctgctttttactggggactccagattttccccaaacttgcttctgttgagatttttccctcaccttgcctctcaggcacaataaatatagttataccactgcccatcagcccaagtctctttattggaaccgggccccgctggccctggctcaggcatttccatttccattagtgggaccaacccactgggtgatttgagtgttgagccgctggttggtccagtcctgccggatgtcatcaaggtggcagtcaaagtccacaaggtgctggtgggcccgatcttccagtagagctcccaccatctgccgtgactcttcccagtccctccacatcactctgaaatagtaacccccatggaggtcaaacagcaagtagtgggtccagacacagacttaacagagattgggtctagagaaagacccttggggcagggccaaggacagaggagacccaggagccttgggcttctaagaagaggtagagggagtggggtactcacaagttcttatccttagggacccagcggagaccttggttctccaggacgatgaccgggggcacacgaggctgaggcaccagtttctgattatccaactgagtggacaaagatgggcaagtgagagtttcaagggtccccccaccctacttgcttttcacctccccacccagaaacccaagcctcaccataataagtactgcatcagggaagaattctgcaattcgcccagcaattttcaaggccaggggcccagggctgtgtagagggaagatcagaggagtgagg

SEQ ID NO: 12065 - DNA, 2300 bp, Homo sapien
tgcctcccacattgcagatggattaccgggccttggtgcatgagcgagatgaggcagcctatggggagctcagggccatggtgctggacctgagggccttctatgtgagtgtggagtaaggctttaggggaggtggatgagtgggggcaggcaggggattggctaagaacctgactcttgcactctggccttctcccaggctgagctttatcatatcatcagcagcaacctggagaaaattgtcaacccaaagggtgaagaaaagccatctatgtactgaacccgggactagaaggaaaataaatgatctatatgttgtgtggattcccttctggcgtgtgtcattcattcaaaaagcatttattgagtggcacctatgtccagcctgaagatgaatgtggtgggaaggggtgggtgtcacaaagacaaagatgacttagatgcccactgtaatcttgactgtgagaaagaggggattcaggccctttctcatccagtagtcaatgtgccatctccccttccctagtcacctcttatctcacttaccttctttcttctcctgcttatctgtttccatctaaggcaaaaaggggggaaagtagctttagaaaagtcacagaggttgaagggctatcttctccattgggtttatagtccaagtccttcaccctgagtgcctagggtggggattgttacatgccatggcagccatgcagataacctgtattttggaatgtaacagtattattttcatccagaggtctcaggaattattggaagagatggcatttgcacagagcccttatgggaataatcaggctttggatacacaaggggaaagttctgtggtcaacatcaggaatgaagaaagaaagaatcctcatcagttcaggaaaagcctagaaggagaataaggtttcactgggagaactatggagaactacggatgaatgattggactccccccacccttttttttttttttttgagatggagtcttgctctgttgcccaggctggagtgcaatggcacgatctcagcttactgctacctccgtctcccgggttcaagcaattctcctgcctcagcctcccgagtagctggaattacaggcatgtgccaccacacctggctaatttttttgtatttttaatagagacggggtttcgccatgttggccaggctggtctcgaactcctgacctcaggcgatccacccacctcggcctcccaaagtgctgggattacaaggcgtgagccaccgcgccgggcctggactccctccttaagggctaggaggggaaaaaataatgcttccaaggcactgtggtgaaggaaatacatcgcaggacattatgggaaggatgaatctgtaagtttttcttactgtcctcccccatatccccttcagccaatcactgtctttatctctgcttttcaagattcagccctgggctggtgatagagacaagggttcctttgctgtgatcttgctgtaaactccatgggattgttctttaattcagggccttatcctgtcataaaatatgagataagaatgtgctgcgaagcactagactggctggaagcctgcccccatacatatctcattaaatccttaaaggaacacgggcaaaagataaaccaagggcaagaaaacctgcagtcgcgaaggcaacacggcccattagtaagtgacagagccgatctagagtacagagccactcaacccataataggcgcaaggcggtctgctttgcccgcagcgctccggaacacccggctacgggatagcgatccatccttggggctcggcggagcgagtggtagtgggcaacacaggtaacaggcaaagccaaccaccaaccgagagcggaagtcggggaacctagccaataagagtgcgggcaattttctgtgcttcacaatggtgggttctttccagtccgctggagacaaaggcggggcaacgttggggcgcggccgctgattggacaaattgaaagcctttagccctatcaaggagcaccacgtgggcgggactccaggagccagttctgcagggagctgcagtttggtctgtctcccaggcaggcgcagagtcgcggccgccagctaggggcgcgggaaggcggggctcggatgcaatcgggacctcctcctggactgggccgggggcggactccgggacccagggcgccgggagccggcgggctacctgcgagtcgagttagcgttgtcgccgaaccgaagtgagagggcacggggaagggtcaaagagcgtgccgaagcgctggaggg

SEQ ID NO: 12066 - DNA, 2300 bp, Homo sapien
tatatcataccacctctactatgaacccaatacagcagtaggttctgaggttacagagtggatactgcacagtctctaattttgggggtaccgttgtgataagagaggtctaacagaacgaggagaacaaaggggatctaagcccaaggcacagaaggaagttttctttttcaggactaggtctctgtatgaaggacttgtatctacggaggagtccagggcctcaccttgtgtgtcttctctttctgcttcccccatttcccaggcttaccagaatgcatttctctttgagagtccagacttctggcttaaccagggcaagcagggacaggactttctcattcccagggagaaatccacacttatggactgtgagaaagaggggattcaggccctttctcatccagtagtcagtgtgccatcaccccttccctagtcacctcttatctctcttaccttctttcttctcctgcttatctgtttccatctaaggcaaaaaggggggaaagtagctttagaaaagtcacagaggttgaagggctatcttctccattgggtttatagtccaagtcctgcaccctgagtgcctcacctcatcatccttgggtggagggtctgggatggggatgtccagtggggcccggagggaagtcaagtcagccacattgagggagtcctcctgcacagagctcactgtcaagggctgcccaacctcttcccttcatcctaggtcacagccttccctccatacatcccacttgcactctgcctcccaacctaggctcatgcctcacgccatcctaatgttcctaatccactatttgaaactattctctgcatgctgaatccagttgttagctagagagggtgggcaaaggggatagaggacataggatggggcagaaggggcccacactactcacttgcaagagctgattcaggtatatgattttctgtggcaagaatctgtagaggaattcctcagcctgtgggttacattgcaagggaggggaatcacagaatatgctcaatgagatgtctgacaaatggaactggaagggcctttggaaatcactgggtccaagacttgcaaatgaggaaactgaagacctgaaaatgaaaggacttgcccaagctggtaaatggcagaacgaaggttaggactgtgatattcctgctttggaagccatggtttttttcctccacatcaaaagacgggagaagtgccagaagtcgggagagtcataagaaaggtcagattaaaggtagctatcaataattccggggttactttgggtgaaggcttggtaagggaagtagggttaagtctagggtgacttgggggggtcattctgagaggctgttatcctcaagtattggtccaagattctgggtcaaatcgctcaaatccagagacttacctcctggaaaagattctgtctgaagacctccacctacacagagagcagtacccggatgttggttaagggtctgggttgtcaaaagcttccacccacaacagggtgccctcgaactgtggctcaggcctttctcaccacaaactagctttccctggaagctcctgctcactgcagtcagaaggcaggaatctgggaatccccgagaagtgaaggcactagcgagattgggggagttctctggcactgcttggtcccctgaaccacccagcttggcctccacccaagagggttctatgaccccttcctggcctccgattccccattacctgtttgcgggcttccccgctcaggcgcaccccacacggcttggccatgctgcttcagtcgctagatctctggtctcccggctagtcgcccgggctttcgctttcactccccaggtccaggcccgcccccctcaaccccgccccctttcttctttccgcccccctcctcccgctggcaggccgcaagcagtaggtagcccctcagccattcccagccagttgccactaggagaggcggtgctggctgggtcacagtccaggggctgcccgagggaggggctagggtaagtgggaccgcggagactggagcgggggctgtccctcggagaggggcggggcttatagctagggccaactggaagtccagggttggggtaagagaggtgggagtatggcaaagggggtattcagtggcggggctcccccaagaaggctcgaccgcaagtagcggacggagagagatcagagcgagtgggaggggcagccagagggagcgcctggggtggagaaggactagcagctcttagaagagagcgggcaggggttgggtgag

SEQ ID NO: 12067 - DNA, 2300 bp, Homo sapien
agggtctgggatggggatgtccagtggggcccggagggaagtcaagtcagccacattgagggagtcctcctgcacagagctcactgtcaagggctgcccaacctcttcccttcatcctaggtcacagccttccctccatacatcccacttgcactctgcctcccaacctaggctcatgcctcacgccatcctaatgttcctaatccactatttgaaactattctctgcatgctgaatccagttgttagctagagagggtgggcaaaggggatagaggacataggatggggcagaaggggcccacactactcacttgcaagagctgattcaggtatatgattttctgtggcaagaatctgtagaggaattcctcagcctgtgggttacattgcaagggaggggaatcacagaatatgctcaatgagatgtctgacaaatggaactggaagggcctttggaaatcactgggtccaagacttgcaaatgaggaaactgaagacctgaaaatgaaaggacttgcccaagctggtaaatggcagaacgaaggttaggactgtgatattcctgctttggaagccatggtttttttcctccacatcaaaagacgggagaagtgccagaagtcgggagagtcataagaaaggtcagattaaaggtagctatcaataattccggggttactttgggtgaaggcttggtaagggaagtagggttaagtctagggtgacttgggggggtcattctgagaggctgttatcctcaagtattggtccaagattctgggtcaaatcgctcaaatccagagacttacctcctggaaaagattctgtctgaagacctccacctacacagagagcagtacccggatgttggttaagggtctgggttgtcaaaagcttccacccacaacagggtgccctcgaactgtggctcaggcctttctcaccacaaactagctttccctggaagctcctgctcactgcagtcagaaggcaggaatctgggaatccccgagaagtgaaggcactagcgagattgggggagttctctggcactgcttggtcccctgaaccacccagcttggcctccacccaagagggttctatgaccccttcctggcctccgattccccattacctgtttgcgggcttccccgctcaggcgcaccccacacggcttggccatgctgcttcagtcgctagatctctggtctcccggctagtcgcccgggctttcgctttcactccccaggtccaggcccgcccccctcaaccccgccccctttcttctttccgcccccctcctcccgctggcaggccgcaagcagtaggtagcccctcagccattcccagccagttgccactaggagaggcggtgctggctgggtcacagtccaggggctgcccgagggaggggctagggtaagtgggaccgcggagactggagcgggggctgtccctcggagaggggcggggcttatagctagggccaactggaagtccagggttggggtaagagaggtgggagtatggcaaagggggtattcagtggcggggctcccccaagaaggctcgaccgcaagtagcggacggagagagatcagagcgagtgggaggggcagccagagggagcgcctggggtggagaaggactagcagctcttagaagagagcgggcaggggttgggtgagggtcttccctctgccttcaggacagaccggagatggggcgggactcgctcgagaggggttagggccggccagagtcggttcccctgcagggtgggacttcctcggtgaggcccggagcgtaccggactggtccagctagaaaaagaaaggttttgagctgaataggataaccccgcgcctgcggctatccggaaggggtggaaccagattgggggaaggcggggaagagcgcttgactgagggaagatgctggcgcgctctgagggaggagccaggagccatttgccttctcattggttgggacctggccctccctcttggccgcgccccctggtttcctgacaccgctccaaccttaaccttaagccccgcccgttcctccgaaattgggtcgcagtcccaccctctctcctagtacttcctgttctcggctaaccctggcgctgggccgggggctggagagtgaccgtggtctgagtgacctggggcggctgcgtgggccggggtgggcctcaaagccgggcaccagacgggaggggcggcgctcgggccgcgcgctgcccgcgccgggtcctggcgggcggcgaggctggggctgactcctgcctca

SEQ ID NO: 12068 - DNA, 2300 bp, Homo sapien
ttttcctccacatcaaaagacgggagaagtgccagaagtcgggagagtcataagaaaggtcagattaaaggtagctatcaataattccggggttactttgggtgaaggcttggtaagggaagtagggttaagtctagggtgacttgggggggtcattctgagaggctgttatcctcaagtattggtccaagattctgggtcaaatcgctcaaatccagagacttacctcctggaaaagattctgtctgaagacctccacctacacagagagcagtacccggatgttggttaagggtctgggttgtcaaaagcttccacccacaacagggtgccctcgaactgtggctcaggcctttctcaccacaaactagctttccctggaagctcctgctcactgcagtcagaaggcaggaatctgggaatccccgagaagtgaaggcactagcgagattgggggagttctctggcactgcttggtcccctgaaccacccagcttggcctccacccaagagggttctatgaccccttcctggcctccgattccccattacctgtttgcgggcttccccgctcaggcgcaccccacacggcttggccatgctgcttcagtcgctagatctctggtctcccggctagtcgcccgggctttcgctttcactccccaggtccaggcccgcccccctcaaccccgccccctttcttctttccgcccccctcctcccgctggcaggccgcaagcagtaggtagcccctcagccattcccagccagttgccactaggagaggcggtgctggctgggtcacagtccaggggctgcccgagggaggggctagggtaagtgggaccgcggagactggagcgggggctgtccctcggagaggggcggggcttatagctagggccaactggaagtccagggttggggtaagagaggtgggagtatggcaaagggggtattcagtggcggggctcccccaagaaggctcgaccgcaagtagcggacggagagagatcagagcgagtgggaggggcagccagagggagcgcctggggtggagaaggactagcagctcttagaagagagcgggcaggggttgggtgagggtcttccctctgccttcaggacagaccggagatggggcgggactcgctcgagaggggttagggccggccagagtcggttcccctgcagggtgggacttcctcggtgaggcccggagcgtaccggactggtccagctagaaaaagaaaggttttgagctgaataggataaccccgcgcctgcggctatccggaaggggtggaaccagattgggggaaggcggggaagagcgcttgactgagggaagatgctggcgcgctctgagggaggagccaggagccatttgccttctcattggttgggacctggccctccctcttggccgcgccccctggtttcctgacaccgctccaaccttaaccttaagccccgcccgttcctccgaaattgggtcgcagtcccaccctctctcctagtacttcctgttctcggctaaccctggcgctgggccgggggctggagagtgaccgtggtctgagtgacctggggcggctgcgtgggccggggtgggcctcaaagccgggcaccagacgggaggggcggcgctcgggccgcgcgctgcccgcgccgggtcctggcgggcggcgaggctggggctgactcctgcctcaggatgccgggggaggaagaggagcgggccttcctggtggcccgcgaggagctggcgagcgccctgaggagggattccgggcaggcgttttccctggagcagctccggccgctactagccagctctctgccgctagccgcccgctacctgcagctggacgccgcacgccttgtccgctgcaacgctcatggggaggtgaggcccggccccgcttggaagggggacaccagggcctgaggcccaggccacgctcacacctctctgctctccttgctcccagccccgaaactacctcaacaccctgtccacggctctgaacatcctggagaaatacggccgcaaccttctcagccctcagcggcctcggtactggcgtggtgtcaagtttaataaccctgtctttcgcagcacggtggatgctgtgcaggtgaatcccctggccttatgggagagggggctggggtttggctagaaaaggcctgaggttgtgctgaatgggaaggggtccagccctactaggcaggaaacctcctgggtggtgactcgtttgaatgtgtggcaggggggccgagatgtgctgcgatta

SEQ ID NO: 12069 - DNA, 2300 bp, Homo sapien
attcctgtttcctttgtacaccagcccctttcctgccttccttacatcatcttcaaccttgtcttccaacagctgctccagtgcctgctgtcttggatgagtattctgcaataatacagataaaaacggtttccagctagacccctagaacaaagccctccctctaagccctggtcccttaacattcacagaaggaaaatcagtacccggagctcccagaatgctgaactatgcccatagttcagcagcacgggggtcctcaaacttacttgagttaggctgggctccccagccctggtgcataagtccatcaagactagaggagcatctcacctgcaatagcaggctgagctctgtccgaagcagcagtacttccagtgtgactgtagcaacctggtgctcatctggctcctcctgcccttcggggaagctcaacccatctggttgctcctctgtgtagccatataatcgcagcacatctcggcccccctgccacacattcaaacgagtcaccacccaggaggtttcctgcctagtagggctggaccccttcccattcagcacaacctcaggccttttctagccaaaccccagccccctctcccataaggccaggggattcacctgcacagcatccaccgtgctgcgaaagacagggttattaaacttgacaccacgccagtaccgaggccgctgagggctgagaaggttgcggccgtatttctccaggatgttcagagccgtggacagggtgttgaggtagtttcggggctgggagcaaggagagcagagaggtgtgagcgtggcctgggcctcaggccctggtgtcccccttccaagcggggccgggcctcacctccccatgagcgttgcagcggacaaggcgtgcggcgtccagctgcaggtagcgggcggctagcggcagagagctggctagtagcggccggagctgctccagggaaaacgcctgcccggaatccctcctcagggcgctcgccagctcctcgcgggccaccaggaaggcccgctcctcttcctcccccggcatcctgaggcaggagtcagccccagcctcgccgcccgccaggacccggcgcgggcagcgcgcggcccgagcgccgcccctcccgtctggtgcccggctttgaggcccaccccggcccacgcagccgccccaggtcactcagaccacggtcactctccagcccccggcccagcgccagggttagccgagaacaggaagtactaggagagagggtgggactgcgacccaatttcggaggaacgggcggggcttaaggttaaggttggagcggtgtcaggaaaccagggggcgcggccaagagggagggccaggtcccaaccaatgagaaggcaaatggctcctggctcctccctcagagcgcgccagcatcttccctcagtcaagcgctcttccccgccttcccccaatctggttccaccccttccggatagccgcaggcgcggggttatcctattcagctcaaaacctttctttttctagctggaccagtccggtacgctccgggcctcaccgaggaagtcccaccctgcaggggaaccgactctggccggccctaacccctctcgagcgagtcccgccccatctccggtctgtcctgaaggcagagggaagaccctcacccaacccctgcccgctctcttctaagagctgctagtccttctccaccccaggcgctccctctggctgcccctcccactcgctctgatctctctccgtccgctacttgcggtcgagccttcttgggggagccccgccactgaataccccctttgccatactcccacctctcttaccccaaccctggacttccagttggccctagctataagccccgcccctctccgagggacagcccccgctccagtctccgcggtcccacttaccctagcccctccctcgggcagcccctggactgtgacccagccagcaccgcctctcctagtggcaactggctgggaatggctgaggggctacctactgcttgcggcctgccagcgggaggaggggggcggaaagaagaaagggggcggggttgaggggggcgggcctggacctggggagtgaaagcgaaagcccgggcgactagccgggagaccagagatctagcgactgaagcagcatggccaagccgtgtggggtgcgcctgagcggggaagcccgcaaacaggtaatggggaatcggaggccaggaaggggtcatagaaccctcttgggtggaggccaagctgggtggttcaggggaccaagcagtgcc

SEQ ID NO: 12070 - DNA, 2300 bp, Homo sapien
ggcaaatcacaagactactttttaaacatctggacccaaggaaacaattttaatctcttttaaaaaacaaagaggccgggcgtggtggctcatgcaggtaatcttagcactttgggaggctgaggtgggtggatcacttgaggtcaggagttccagaccagcctgaccaacatggagaaaccccatctctaccaaaaatacaaaattagccgagcgcggtggcgcatgcctgtaatcccagctactcgggaggctgaggcaggagaatcgcttgaacccgggaggtggaggttgcggtgagcggagatcgcaccattgcactccagcctgggcaacaagagcaaaactccgtctcaaaacaaacaaacacaaaggaagataaccaagaagacagaggagcatcccaaatttccatcaatatagcttcctacctggtccccaatttaggaccaataatacctgggacagagggtgtggtgagggggccaggagcaatctctctcaatagggggtcaaattctgaaagctgcagcatctgaaaaagaaagggcagggaatgaataagggtttagggacacagagtctcacaattcctgtttcctttgtacaccagcccctttcctgccttccttacatcatcttcaaccttgtcttccaacagctgctccagtgcctgctgtcttggatgagtattctgcaataatacagataaaaacggtttccagctagacccctagaacaaagccctccctctaagccctggtcccttaacattcacagaaggaaaatcagtacccggagctcccagaatgctgaactatgcccatagttcagcagcacgggggtcctcaaacttacttgagttaggctgggctccccagccctggtgcataagtccatcaagactagaggagcatctcacctgcaatagcaggctgagctctgtccgaagcagcagtacttccagtgtgactgtagcaacctggtgctcatctggctcctcctgcccttcggggaagctcaacccatctggttgctcctctgtgtagccatataatcgcagcacatctcggcccccctgccacacattcaaacgagtcaccacccaggaggtttcctgcctagtagggctggaccccttcccattcagcacaacctcaggccttttctagccaaaccccagccccctctcccataaggccaggggattcacctgcacagcatccaccgtgctgcgaaagacagggttattaaacttgacaccacgccagtaccgaggccgctgagggctgagaaggttgcggccgtatttctccaggatgttcagagccgtggacagggtgttgaggtagtttcggggctgggagcaaggagagcagagaggtgtgagcgtggcctgggcctcaggccctggtgtcccccttccaagcggggccgggcctcacctccccatgagcgttgcagcggacaaggcgtgcggcgtccagctgcaggtagcgggcggctagcggcagagagctggctagtagcggccggagctgctccagggaaaacgcctgcccggaatccctcctcagggcgctcgccagctcctcgcgggccaccaggaaggcccgctcctcttcctcccccggcatcctgaggcaggagtcagccccagcctcgccgcccgccaggacccggcgcgggcagcgcgcggcccgagcgccgcccctcccgtctggtgcccggctttgaggcccaccccggcccacgcagccgccccaggtcactcagaccacggtcactctccagcccccggcccagcgccagggttagccgagaacaggaagtactaggagagagggtgggactgcgacccaatttcggaggaacgggcggggcttaaggttaaggttggagcggtgtcaggaaaccagggggcgcggccaagagggagggccaggtcccaaccaatgagaaggcaaatggctcctggctcctccctcagagcgcgccagcatcttccctcagtcaagcgctcttccccgccttcccccaatctggttccaccccttccggatagccgcaggcgcggggttatcctattcagctcaaaacctttctttttctagctggaccagtccggtacgctccgggcctcaccgaggaagtcccaccctgcaggggaaccgactctggccggccctaacccctctcgagcgagtcccgccccatctccggtctgtcctgaaggcagagggaagaccctcacccaacccctgcccgctctcttctaagagctgctagtccttctccac

SEQ ID NO: 12071 - DNA, 2300 bp, Homo sapien
cggtggatgctgtgcaggtgaatcccctggccttatgggagagggggctggggtttggctagaaaaggcctgaggttgtgctgaatgggaaggggtccagccctactaggcaggaaacctcctgggtggtgactcgtttgaatgtgtggcaggggggccgagatgtgctgcgattatatggctacacagaggagcaaccagatgggttgagcttccccgaagggcaggaggagccagatgagcaccaggttgctacagtcacactggaagtactgctgcttcggacagagctcagcctgctattgcaggtgagatgctcctctagtcttgatggacttatgcaccagggctggggagcccagcctaactcaagtaagtttgaggacccccgtgctgctgaactatgggcatagttcagcattctgggagctccgggtactgattttccttctgtgaatgttaagggaccagggcttagagggagggctttgttctaggggtctagctggaaaccgtttttatctgtattattgcagaatactcatccaagacagcaggcactggagcagctgttggaagacaaggttgaagatgatgtaaggaaggcaggaaaggggctggtgtacaaaggaaacaggaattgtgagactctgtgtccctaaacccttattcattccctgccctttctttttcagatgctgcagctttcagaatttgaccccctattgagagagattgctcctggccccctcaccacaccctctgtcccaggtattattggtcctaaattggggaccaggtaggaagctatattgatggaaatttgggatgctcctctgtcttcttggttatcttcctttgtgtttgtttgttttgagacggagttttgctcttgttgcccaggctggagtgcaatggtgcgatctccgctcaccgcaacctccacctcccgggttcaagcgattctcctgcctcagcctcccgagtagctgggattacaggcatgcgccaccgcgctcggctaattttgtatttttggtagagatggggtttctccatgttggtcaggctggtctggaactcctgacctcaagtgatccacccacctcagcctcccaaagtgctaagattacctgcatgagccaccacgcccggcctctttgttttttaaaagagattaaaattgtttccttgggtccagatgtttaaaaagtagtcttgtgatttgcccccatccacagcagattcagatgtagcctggtcttttttggaaagatgttccatctctcctgccctccaggctccactcctggtccctgcttcctctgtggttctgccccaggcacactgcactgcccatcctgtaaacaggccctgtgtccagcctgtgaccacctgttccatggacacccatcccgtgctcatcacctccgccagaccctgcctggggtcctgcagggtacccacctgagccccaggtgagagggcttctcttctgggtgggagtgaaatttagagaacttaagatcacttgattatggactacctgccagtttctgtgctaaagactgtttaatagaggacaagtagccagtcagaaccctgaaagagataatagacatacacatcaagcaggtagcaattgcagtaacccaggttgttatggtaataggtggtttgcaacctagtctgaagggtcagctgaatcaggtggcaatattttaaacacctagtgtaggtcaggccatgtgttagcagtatctactaggaagaagtgagctttaagctgtcatttaaatgttgcataagctatgggtataggagtattcgagacagacaatgtgtgcaaaggccagtgacatgagttgttacccaggaaatggagaatgcttagaggtgagggatccaggcaccaggtgccacttcagcaggccatgtctgcttttccattacagtttacctgcctcagcccaaccacggccccagtcgacctccctgctggccctgggagacagctctctttcttcccctaatcctgcaagtgctcatttgccctggcactgtgctgcctgtgccatgctaaatgagccttgggcagtgctctgtgtggcctgtgatcggccccgaggctgtaaggggttggggttgggaactgagggtccccaaggaactggaggcctagaacctgatcttgcacggggtcggtgggcctgccagagctgtacctttgagaatgaggcagctgctgtgctatgttccatatgtgagcgacctcggctggcccagcctcccagcttggt

SEQ ID NO: 12072 - DNA, 2300 bp, Homo sapien
tgatgtaaggaaggcaggaaaggggctggtgtacaaaggaaacaggaattgtgagactctgtgtccctaaacccttattcattccctgccctttctttttcagatgctgcagctttcagaatttgaccccctattgagagagattgctcctggccccctcaccacaccctctgtcccaggtattattggtcctaaattggggaccaggtaggaagctatattgatggaaatttgggatgctcctctgtcttcttggttatcttcctttgtgtttgtttgttttgagacggagttttgctcttgttgcccaggctggagtgcaatggtgcgatctccgctcaccgcaacctccacctcccgggttcaagcgattctcctgcctcagcctcccgagtagctgggattacaggcatgcgccaccgcgctcggctaattttgtatttttggtagagatggggtttctccatgttggtcaggctggtctggaactcctgacctcaagtgatccacccacctcagcctcccaaagtgctaagattacctgcatgagccaccacgcccggcctctttgttttttaaaagagattaaaattgtttccttgggtccagatgtttaaaaagtagtcttgtgatttgcccccatccacagcagattcagatgtagcctggtcttttttggaaagatgttccatctctcctgccctccaggctccactcctggtccctgcttcctctgtggttctgccccaggcacactgcactgcccatcctgtaaacaggccctgtgtccagcctgtgaccacctgttccatggacacccatcccgtgctcatcacctccgccagaccctgcctggggtcctgcagggtacccacctgagccccaggtgagagggcttctcttctgggtgggagtgaaatttagagaacttaagatcacttgattatggactacctgccagtttctgtgctaaagactgtttaatagaggacaagtagccagtcagaaccctgaaagagataatagacatacacatcaagcaggtagcaattgcagtaacccaggttgttatggtaataggtggtttgcaacctagtctgaagggtcagctgaatcaggtggcaatattttaaacacctagtgtaggtcaggccatgtgttagcagtatctactaggaagaagtgagctttaagctgtcatttaaatgttgcataagctatgggtataggagtattcgagacagacaatgtgtgcaaaggccagtgacatgagttgttacccaggaaatggagaatgcttagaggtgagggatccaggcaccaggtgccacttcagcaggccatgtctgcttttccattacagtttacctgcctcagcccaaccacggccccagtcgacctccctgctggccctgggagacagctctctttcttcccctaatcctgcaagtgctcatttgccctggcactgtgctgcctgtgccatgctaaatgagccttgggcagtgctctgtgtggcctgtgatcggccccgaggctgtaaggggttggggttgggaactgagggtccccaaggaactggaggcctagaacctgatcttgcacggggtcggtgggcctgccagagctgtacctttgagaatgaggcagctgctgtgctatgttccatatgtgagcgacctcggctggcccagcctcccagcttggtggtggattcccgagatgctggcatttgcctgcaaccccttcaggtaactggccttcccagctctttatcgtgtgttacctcaggcattctcttccctatcccatgttttccttcagttcctcccaactccctgtatttctgttgtgaacttcagccagccagtcaaagggataattctctctgccttcccagcagggggatgctttgctggcctctgcccagagtcaagtctggtactgtattcactgtaccttctgcaactcgagccctggctgggtgtgtgttatgtgcaaccggactagtagccccattccagcacaacatgccccccggccctatgccagctctttggaaaagggaccccccaagcctgggcccccacgacgccttagtgcccccctgcccagttcctgtggagatcctgagaagcagcgccaagacaagatgcgggaagaaggcctccagctagtgagcatgatccgggtaaggactgggcctgcgatgaggtagggctgagctggtctgggaaaggagatgctgcaggtggttaatagtttctatgaatcttgttattgttagcagcagctgcctg

SEQ ID NO: 12073 - DNA, 2300 bp, Homo sapien
caggcacctgtaatcccacctactcgggtggctgaggcaggagaatcacttgaacccgggaggtggagattgcagtgagccaagattgcgccattgcactccagtccagcctgggcaacaagagtgaaactccatctcaaaaaaaaaaaaaaaaaaaaccagaggtagccaatagccaggagtggtggtggctcacacccataatcccagcactttgggaggctaaggcaagaggattacttgagcccaggagtttgagaccagcccaaacaacatagtgagaccctgtctctatttaaaaaataaaaataaaaaaaagaggtaagatcttccgataataagttaactagtcaagagataaataacaaccaaaaaaaaaaaaaaaaaaaaaacactatctcaagagggtatgtgtttatgagccaaaagccagcttggataaaagtagggacaaggtccctgcctctgtatcagatggtctgccgttgacggcacctctgagtacccaccagcaccactgggaaagcaggagttgctgtgctcggtcccttccttggaggctgccttccctgccttgtggatatcccagttctggagctttgtggtcattggcctcccaacagaggctcccttcttccctcacctttaggcggctgccgagtgatagagcagaaggaggttcccaatgggctcagggacgaagcttgtggcaaggaaactccagctggctatgccggcctgtgccagtgagtgccagcaggacatgggcatggtgttgggcagtgggtagaagtggtgagggcatgcccaggcagtaaaatgggtccttgggagcagtaggtcttgcagtgggtgggagggaggaggctttctgggcaagggcatgggtagatagtagcaggcagtgtgggcacaggtgggttgttaatcttgttcgtccaggtgtctcagagtccagctatgttagacacactcagttaatattagccaacacaacaaatattctgctcccttttctccccagggcacactacaaagagtatcttgtgagcctcatcaatgcccactcgctggacccagccaccttgtatgaggtggaagagctggagacggccactgagcgctacctgcacgtacgcccccagcctttggctggagaggatccccctgcttaccaggcccgcttgttacaggtatagcctccacccagcctcatctcttaacccaccctacagaagtcacctggtgctgactgtgtctgagctccaggcttccaatatcattaccttctctctccttctgcagaagctgacagaagaggtacccttgggacagagtatcccccgcaggcggaagtagctgagggcaagggtcccgatgagggtcccatggcctgctccctcaggaacagctccagcaccaataaagaggcatcttaccacccaggcttcttggtggtccttcttcctggtgccaccatctaggggcaccagggaaagagcggggtgaacagagctttgctgaaaagggccccctgcaacctagtgcctgaccctccctggactcaggaccaggaaggagttgacaccctggatggtcaagggaggccctccccatccagcagcctggcctgggcttcctccctccctgcctccttttttcctttcatagaatttgactggtatttgaagtcacccaatatgtatcaggtgggcactgtgggggaatgcagatgcacaggtgtacacagcagtccagaggtcccaggcctgactccaggaaactggcctccctggggaagccacggtgtcacccagaggtcagatagaagcaagagtatctgagggaggcaggggaatgagccaggctggagctgagccagcagggcagggcccccctgctgcgacagtggcatcctgatagtgagatgctcagatgctgctgccctctagtggccgccagttccctgcaactcagaccacgtgatttctgggaaaaggccctccctggaggagaactgaaacttagggtggggactgtagaaaggggcggagagatcagccgcccagccaggagttaagctgaggtcgtctgagccctgcgacagcctggacagcaactcaggtaagatcagccaaggatgggagtcagcctgggatctagggctagaaagtccagccagattgagggcagggggtcctaggggtcgctctgttagactgagggatagacagaagatctcttaagtcaggaagtgggagattcagcctgagagtgagactgacaagggccagctcccc

SEQ ID NO: 12074 - DNA, 2300 bp, Homo sapien
ttgggagcagtaggtcttgcagtgggtgggagggaggaggctttctgggcaagggcatgggtagatagtagcaggcagtgtgggcacaggtgggttgttaatcttgttcgtccaggtgtctcagagtccagctatgttagacacactcagttaatattagccaacacaacaaatattctgctcccttttctccccagggcacactacaaagagtatcttgtgagcctcatcaatgcccactcgctggacccagccaccttgtatgaggtggaagagctggagacggccactgagcgctacctgcacgtacgcccccagcctttggctggagaggatccccctgcttaccaggcccgcttgttacaggtatagcctccacccagcctcatctcttaacccaccctacagaagtcacctggtgctgactgtgtctgagctccaggcttccaatatcattaccttctctctccttctgcagaagctgacagaagaggtacccttgggacagagtatcccccgcaggcggaagtagctgagggcaagggtcccgatgagggtcccatggcctgctccctcaggaacagctccagcaccaataaagaggcatcttaccacccaggcttcttggtggtccttcttcctggtgccaccatctaggggcaccagggaaagagcggggtgaacagagctttgctgaaaagggccccctgcaacctagtgcctgaccctccctggactcaggaccaggaaggagttgacaccctggatggtcaagggaggccctccccatccagcagcctggcctgggcttcctccctccctgcctccttttttcctttcatagaatttgactggtatttgaagtcacccaatatgtatcaggtgggcactgtgggggaatgcagatgcacaggtgtacacagcagtccagaggtcccaggcctgactccaggaaactggcctccctggggaagccacggtgtcacccagaggtcagatagaagcaagagtatctgagggaggcaggggaatgagccaggctggagctgagccagcagggcagggcccccctgctgcgacagtggcatcctgatagtgagatgctcagatgctgctgccctctagtggccgccagttccctgcaactcagaccacgtgatttctgggaaaaggccctccctggaggagaactgaaacttagggtggggactgtagaaaggggcggagagatcagccgcccagccaggagttaagctgaggtcgtctgagccctgcgacagcctggacagcaactcaggtaagatcagccaaggatgggagtcagcctgggatctagggctagaaagtccagccagattgagggcagggggtcctaggggtcgctctgttagactgagggatagacagaagatctcttaagtcaggaagtgggagattcagcctgagagtgagactgacaagggccagctccccagacccttgtaggcaaaggtcaggaggacctactgctggattgttcaaggaagaaggctcctggccccagcctcagtggaccatttgtttccttgccatctggccctgcccacttctgctgcagctccaaccccacccctacttcctgccccacctactcctggggccggcagggggtgggggtcaggctaggttgtgtaggctgtggggcggtgggtgaagagcctgatggatctcagcagaacctacctctgctgatgctcgggaatctagacagggcctgtcaccaggaacgatcaccaaaggaattcttttgtaaacaatacatctctgaaaagtcctaaaattaagaccagtgcccaaggtttccttccaggtatcacagcttagagtgctaaaaacaatgttttggggggttttgttgttgttgttgttgtttgtcactgctagtgatggcagaaaggaaacaattctgtcccatagagtgttgaaatgtgtttggagctaaaagaagatggatgggatctctgggacctgttgccagaatctagtctcaatggccagggtctcaggagatgttccctcccaaagtgtcagttctgatgcatcctgctcctattatcccccaggatggcatcaggcagggcacgctgcacccgaaaactccggaactgggtggtggagcaagtggagagtgggcagtttcccggagtgtgctgggatgatacagctaagaccatgttccggattccctggaaacatgcaggcaagcaggacttccgggaggaccaggatgctgccttcttcaaggtgaaagggcctggaaa

SEQ ID NO: 12075 - DNA, 2300 bp, Homo sapien
cttcggctcaatcgatcctcctgtctcagccttctgagtagctgtgactataggcatgtaatttgagaggccgaggcgggtgtcacctgaggtcaggagtttgagaccagcctggccaacatggttgaaaccctgtctctactaaaaatacaaaaaaattagccaggcatagtggcacatgcctgtagtcccagctactcaggaggcttaggtaggagaattgcttgaacccaggaggcggaggttgcactgagccaagatggtccattgcactccagcctgggcgacaagcaaaattccatctcagaaaaaaaaaaaaaaaaaaaaaaaaaaaactctcaaattgaaggggactgtaagaagatagggtcagctcagctgcagtaagatataagtctcaggaagaagcatgctctggagtcaaggcagagaaggacattctaggccaaagaaatggctgtgcaaaggtaggaggcatagggacaagggttattattacaactgtacctcttaaatttacacaataattgttgagaatatggcttttccaggctaggaagttgtgctgcatccaaaaatgctaaagtctatttcagccgggagaacactgacagctgggaaaggaccacacgtggcgtgcccataacctaagttgttcagatttaggaagtgaccccagtaagtcctttcggagtttcgtgtaagattgacttcttcagctgggggcagtggctcacgcctgtaatcccagcactttgggaggccaaggcgggcggatcacctgaggtcaggagttcgagaccagcctggccaacatggtgaaacccctgtctctactaaaaaatacaaaatttagccaggtgtggtggtgggcgcctgtaatcccagctactcgggagcctgaggcaggagaatcccctgcaccggggaggcggaggctgcaatgagctgagactgcgccactgcactccagcctgggtgacagagtgaaactccatctcaaaaaaaaaagaaaccagcctggccaacatagtgaaatcccgtctcttctaaaaatgcaaaaattagttgggtgtgatggagggcgcctgtaatcccagctactcaggaggccaagacacgagaatcgcttgaacctgaggggatggggggcagaggatgcagtgagccgagattgccgagatagcgccactgcattccagcctgggcaacagtgagagcctccatctcaaaaaaaaaaaaaaaaaatggacttcttcctcattgacctgtggtggctccaaggccatcaaaaaaaaaaaaaatggacttcttcctcattgacctgtggtggctccaaggccatcatctcacagcctttttttttttttttttttttgagacggagtcttgctcccttgcccaggttggagtggagctgcatgatctcggctcactgcaacctccgcctcccaggttcaagcattctcctgcctcagcctcctgagtagctgggattacaggcgcgtgccaccacgcccagctaacttttgcatttttaatagagacggggtttcaccatattggtcaggctggactcgaactcctaacctcatgatccgcccgcctcggcctcccaaagtgctaggattacaggcgtgagccactgcgcccggcctcatctcacatctttcttcctctgcagcacacgacacgccctagttggaaacaaagtcggagtttgtggattgggggaagggcggggtctaacctcaggtcaggcgccgtgcaaggtacatcttggcacccggaagaggcccagtacagttgcccccgaggtgacccgacctcccctaccaattgaggcgcccttgttgccaggcttgcggcgggggagcggcgggggagcgacggggatgcgctcattggtcaaggaaggggcgcctgttactagaggcgagaaccggagcccattggtcggaacacctcacaatggaccccagcggcgcgcaaaatccttatgattggtttgctggctgcctcgggagaccctgttgccaggatacttggcgttcccgacccgacccccgttccccattggctgtcagggcaaaagccgccatctaatgaggagcgaggtgcggtgccccgaagcgctcgcttcccgcggtgcgatctagtcctgcagtaggcggcccggggccacaccgcggccgcccaagccagtgcaaggcccaggggcctgacatcgctcccagcgctcgaggaccgaggcctgctgtggaggacaccgtgctccctcgggacctgctctggattcc

SEQ ID NO: 12076 - DNA, 2300 bp, Homo sapien
atcctctacaagtcgggttctacatattcttacagacctggctcaaatgctgcccttctctatgaaatatttatcccagtcttagccggaaccaaatgcagtttgggaactcagtactttgctagggccttgttttaccctttgccttgactcttgtggggttacatacaaccttgtctccccactagacttccttaagatcaagaatcttttctgttcacctctgtcaaccacaacacttgccaaggataacgatgcactgctgcttgcacaaattttttttttttttttttgagacagagtcttgctctgtcacccaggctggagtgcagtggctcaatctcagctcactgcaatctctgcttcccaggttcaagcaattctcctgtctccgcctctcaagtagctggaattacaggcactgctaccaagcccggctaatttttgtatttttagtagaaatcaggtttcacgatgttggccaggctggtctggaactcctgacatcaagtgatccacccacctcagcctcccaaagtgctgggattacagacatgagccaccgagcccggccttcttgcacaaattgatgagggctagataactggggtgcgggttggggagggaggtgagaacaggaactgaggaaagaagaccagagggcgggtgagtttactgcaagctgatgtcaatgcaacaagaattaggcataaaaggagattaccgtgcattgttgaagaaggctgtgaaaagtgggaaagcagggggctgaagctgaaccctatcttttgtttccaatccctctccaaagattcgacacctcttagaggctgcaatcccagagagagttgaagagatccctcctgaagttcctacagagcccagggagccaggtcagcagagagaaccttctttctggtgagaggcataggcaggcccaagagctgtagaaatgaccatttttgagcttaagagccaggccttgtgaggggcgctttttttttttttcgaggcagagtctcactctgttgcccaggctacagtgcagtggcacgatctcggctcactgcaagcaattgtcccgcctcagcctccctagtagctgggattacagatgtgcactaccatgcccggcgaatttttgtatttttagtagagatggggtttcaccatgttggccaggctggtctcaaactcctgacctcaggtgatccacccgcctcggcctcccaaagtgctaggattacaggtgtgagccaccgtgcctggtgaggggcattttatgtgtataacctcatcagtacctcacaagagtcctctgaggtcagatttcttatccttttttttttttgagagatggggtatcactctctagcccaggctggagtacagtggtgcactttaggctcactgcaacctccgcctcccggattcaagcaattctccttcctagtagctgggattacaggcatgcaccaccacgcccagctaattttcgtatttttagtagagatgggtttttgccatgttggccaggctggtctcaaacttctgacctcagttgatccacccacctcagcctcccaaagtgctgggattacaggcgtgagccaccatactcggctttttttttttttttttctttttttcccaggctggagtgcagtggtatgatgatcataggtcactgcagccttgacctccagggctcaagcaatcctcccacctcagcctccagagtagctgggaccacaaggataagccaccacacctggctagtttttaaattttttgtagagacagggtctcgctatgttgcccaggctggcctcaaactcctgggctcaagcgatccaaagtgttgggattacaggtgtgagccacttcgcccagcctccccactttaccgatgaggaaagtgaggctcacagtggttaagcagtgtacccagggtcaggatgccagagattagcctgggtctgattagaatccaggttaccttgacttcagagtccatgcttttccttaactgcatggctgtgggaatttggaaagaagcagagaggctagtgactctcttgtccctccagagaggattccggtcactgtgctgccacctgaggccatcacgatcctggaggcagagcccatacggatgctggagattgaggtgagttcccctgcacacagggcctgaggtccagcccccttgcatgtacttctctctgtccccagagtcctgccttttctgtctccatttccctattctctgtccctggcacttgagcacccagtggctt

SEQ ID NO: 12077 - DNA, 2300 bp, Homo sapien
ccatgttggaagaggctttgcggagcgagagcccataccagcgcaaagctggactcctggtgctggccgtgctgtctgacggagctggcgaccacatcaggcagaggtatgtattcccctgtcccagggtgagggttgcccacagggaggaccatggctgtcctggtttacgcttgttgttcaagcttatttatcaacagcgtttccccccattatcaaaagtgtcctggcttggaagataaatgacatggcttaccagctatagggaccaggggctgctgcccaccctctggtgacaggaaaagccttggtttttccagggaaaatgaagagaacaggtcagcctagggctctcaggtgtagcttctcagcctatgtcctcttgtttgccccatccagactgctgcccccactgctgcagattgtgtgcaagggcctggaggacccctcgcaagttgtacgcaatgctgcgctgtttgccctgggccagttctcagaaaacctacaggtgaaccaggctgaatgtgggagccaccacttgaatgtccccttcccctcatctttcatctcttcaagcatccctgctgccatcagcactcttgtgtgtgcccggcaggtgaacctgactcaggccctgcttgctccctcccccagccccatatcagcagctattcaagggaggtaatgccactgctcctcgcctacttgaagtcggtgcctcttggacacacacaccacctagccaaggcctgctatgccctggagaattttgtggagaacctaggtagtgatggcagtggggagcttggggaagggggatgaggcggcggctttggctgaatgtacaggatgtgcatctccctgcattgctgcctgtggtaggggaaagggtgtgatggtgccaaaaaaaggtttccgcctggagggaggtgggcgtgcaggtagcagacctgggttggttggtagaggagcatcctttcccacagggcccaaggtgcagccctaccttccggagcttatggaatgcatgctgcagcttctgaggaaccccagcagtccccgggccaaggagctggctgtgagcgccctgggagccattggtgaggagagaggcaggaggcagggatgtggggttcacccaaaggccctgtggctggtggtccctgccctctccagctctgattctgtccttccatcctgcagctacggctgcccaggcctcgctgctgccctacttccctgccatcatggagcacctgcgggaattcctgttaacaggccgtgaggaccttcagcctgtgcagatccagagcctgggtgagtgagaggttcccaggtggggctcccagtgccagcaaagggctggtgctcacctggtgttgacagattgcccccacaggagcacggatgtcttccttctcatcaaaggggtgtgcttcatgctgtaccaaggggtggggcgggatttctgaatccctcccagccaccacctttggtcccgtagcccacctccacctcctggtgctaatggagcccttgcccccacagagacactgggggtgctggcacgagcagtgggggagcccatgaggccgctggctgaggaatgctgccagctgggtctgggcctctgcgaccaggtagacgaccctgacttgcggcgctgcacgtgagtgacccctcaccctgcctctgcccttgtcccctcccctcctgtcttcccactggacccactggaatccccaccccagactccagtcgtctggtttggaccatagccaggtgttcccgggctcccccatcctgcctggtggtagcaggcaggaccttacagcttcttctgcctgctttgaccaggtacagcctatttgcagccttatcgggtctgatgggtgagggcctggcgccccacttggaacagatcaccacgctcatgctgctgtcactgcgttccaccgagggcattgtggtgagcaaagggtgggtgggctgggccaggcctgccctgcaatgggatttatctcctgggcccagctgagccaaagtccttgccgtgcctccgctccagcctcagtatgacgggagcagctccttccttctgtttgacgatgagagtgatggggaagaagaggaggagctcatggatgaggatgtggaagaagaggatgactcagagatctcagggtgcggaggggtgctcttctgatcaggaatctagactttggctttagacaagggcctagtgctggatctgctcctcttggtgcctgatcaccactgcctccccttcttactctagg

SEQ ID NO: 12078 - DNA, 2300 bp, Homo sapien
ccctgggcaatgcgatacgcatacgtattctctgctgcctcactttcttggtcaaagtcaagagcaaggtaagtgagtgcccattgacacacatcaccccacccccatctccacccttagtctcactcctggggctttcggtccatctcagggtatctaaagtactgtgggggttcaagccttggcctggcctcaccccagctcctgcctgggaggttgggaattttctgtcagaccccttatggcctggaagactggaatttttaatgtgagcccatcctgggagcagattcttagggacactgttccaccttctctgtcaaggccttactgaagaatcgtctcctgccacccttgctgcacacccttttccccattgtggctgctgagcccccaccaggccagttggatcccgaggaccaggattcagaagaggaagagttggagattgagctgatgggggagactcccaagcatttcgctgtacaagtgagatgtggggcaggacagagggggaaggtgttaggtggctgtgggacgttggggaggcagagatggagtcaagcaaagtaagtctccccatcccatctcaggttgtggacatgctggcactacacctgccccccgagaagctctgtccccagctggtaagtgtggctctgtccttctggtgtccctacctccaagtgtgcctagtccccctgaggccaacgacgtttagaccctgggaggtgtgaaggcctattaccacaggaatgggcaggctcttgctggggtttcagaagcgtgccacatgcttccctagatgcccatgttggaagaggctttgcggagcgagagcccataccagcgcaaagctggactcctggtgctggccgtgctgtctgacggagctggcgaccacatcaggcagaggtatgtattcccctgtcccagggtgagggttgcccacagggaggaccatggctgtcctggtttacgcttgttgttcaagcttatttatcaacagcgtttccccccattatcaaaagtgtcctggcttggaagataaatgacatggcttaccagctatagggaccaggggctgctgcccaccctctggtgacaggaaaagccttggtttttccagggaaaatgaagagaacaggtcagcctagggctctcaggtgtagcttctcagcctatgtcctcttgtttgccccatccagactgctgcccccactgctgcagattgtgtgcaagggcctggaggacccctcgcaagttgtacgcaatgctgcgctgtttgccctgggccagttctcagaaaacctacaggtgaaccaggctgaatgtgggagccaccacttgaatgtccccttcccctcatctttcatctcttcaagcatccctgctgccatcagcactcttgtgtgtgcccggcaggtgaacctgactcaggccctgcttgctccctcccccagccccatatcagcagctattcaagggaggtaatgccactgctcctcgcctacttgaagtcggtgcctcttggacacacacaccacctagccaaggcctgctatgccctggagaattttgtggagaacctaggtagtgatggcagtggggagcttggggaagggggatgaggcggcggctttggctgaatgtacaggatgtgcatctccctgcattgctgcctgtggtaggggaaagggtgtgatggtgccaaaaaaaggtttccgcctggagggaggtgggcgtgcaggtagcagacctgggttggttggtagaggagcatcctttcccacagggcccaaggtgcagccctaccttccggagcttatggaatgcatgctgcagcttctgaggaaccccagcagtccccgggccaaggagctggctgtgagcgccctgggagccattggtgaggagagaggcaggaggcagggatgtggggttcacccaaaggccctgtggctggtggtccctgccctctccagctctgattctgtccttccatcctgcagctacggctgcccaggcctcgctgctgccctacttccctgccatcatggagcacctgcgggaattcctgttaacaggccgtgaggaccttcagcctgtgcagatccagagcctgggtgagtgagaggttcccaggtggggctcccagtgccagcaaagggctggtgctcacctggtgttgacagattgcccccacaggagcacggatgtcttccttctcatcaaaggggtgtgcttcatgctgtaccaaggggtggggcgggatttctgaatccctcccagccaccacc

SEQ ID NO: 12079 - DNA, 2300 bp, Homo sapien
caccggtcaagccccagtattcgcccactgcggtccgctcagcaccttcctgcccggacccccacgtgcttgcttcctcgtcctagatccgccagtttgcggccgtgctgacccgcagacgactgaacacccgctggcgacggctggcggcggagcaacgggagaggtgggctgggcctggggtggggcggggccaggcggagacttttcttgggcaggctgggtaccaaacacctgccacctgtgttccagcctcaagtccctgatcctgacggccctgcagagagaaacagagtaagtacctacccacttctctcgggatcttgacgactttgtctaggtttctgccttccttttcggctccaggctgggacttgtggggcagggacttcagttctagacgcaaggtggagtgaggattttaaggctgttttgaagactaaagttcttgaggaagggtgatgatgatctgccaaacccaagtcagaagaataagactgaaattcaggctaagttagactgaacttaccagattacatgcccacagtgctgttgggctccctctgagctgctgtctcatgtgtcccaacttggcaaagaccctgtgcccacacctcctgaaagtttctgtcctggctgccccattgagcctggccactgtgtgcagaggaaggtattgaagggtgattggaggagatctctcctgtttgcaggcactgtgtgagcctcagcctggcccagctctcagccaccatttttcgaaaggaaggcttggaggcctggccacagcttttgcagctgcttcagcacagtacccacagcccccacagcccagagagagaggtaccatcacatggttggcaggagggagggcctgagaggctggatagaccttgtaagcttgctctcccatcctctattcttggacagatggggcttttgctgctaagtgtggtggtgacctcccggcccgaggccttccaaccccaccaccgggagcttcttcggcttctgaatgagactcttggtgaggtgggctctcctgggctgctcttctactccctgcgcactctgaccaccatggctccctacctcagcactgaagatgtggtgagatgtgggccctcgttatctttgactccctttcctcatgccttcatgtcctcacccgtaaaagttacaaagctgctttggattctttacctgcctgtggcccttcctgacaattgagaggggatgctgtaggtgggcctggctgttatgcctgggctcctcctcgcaattcaggctgtgaggaagctgccagctgctggggtgtgagattgggctgcatcatgctctctgtgatgtgtccctcagcctctcgctcggatgttggtgcccaagctgatcatggccatgcagactctgatccccatagatgaggtgaggacaggtgggcaggagctctgttggaaggagagtgcagaagtgtccagtttggcccactgaagaagagcatggtaaccttgtgccttgtttgtctgtcaggcaaaggcctgtgaggcccttgaggctttggatgaactgttggagtcagaggtgccggtcatcaccccctacctctctgaagtcctcacattctgcctggaggtgagcctggagtggacatggcccctgctacatgctctgctgggactctccttccctgtcgctgatttttattattctgtggacaggtagctagaaatgtggccctgggcaatgcgatacgcatacgtattctctgctgcctcactttcttggtcaaagtcaagagcaaggtaagtgagtgcccattgacacacatcaccccacccccatctccacccttagtctcactcctggggctttcggtccatctcagggtatctaaagtactgtgggggttcaagccttggcctggcctcaccccagctcctgcctgggaggttgggaattttctgtcagaccccttatggcctggaagactggaatttttaatgtgagcccatcctgggagcagattcttagggacactgttccaccttctctgtcaaggccttactgaagaatcgtctcctgccacccttgctgcacacccttttccccattgtggctgctgagcccccaccaggccagttggatcccgaggaccaggattcagaagaggaagagttggagattgagctgatgggggagactcccaagcatttcgctgtacaagtgagatgtggggcaggacagagggggaaggtgttaggtggctgtgggacgttggggaggcagagatggagtcaagc

SEQ ID NO: 12080 - DNA, 2300 bp, Homo sapien
ctccaacccagcttgggaactcccggcgtggggaacctacattgccagagtcgggtttccgcgattcagccggtgctcagcctaacggaagtggaggagccggacctctttgtgggaagcgaattgaatcaccttggcaacccgcggggcgtgcagcaacgccctttcctccggaagtgggtgtcagaacctccacgtgctgtccctccccctccccttttcggcccagtagcggcggctcagttgctgccatggagtcagccgggctagagcagctcctacgggagctgctgctaccggacaccgagcgcatccgtcgggtacggagcaggcgtaaccgggccagggcgagcgggaggttgcgggaaaggcccaactctcacccctagcttccccccaggccacggaacagctccagatcgttcttcgggcccccgccgctttgccggctctctgcgacctgctagcctcggcggccgacccccaggtgagacccctgactctcccctccgagcttcccactgtacgccaccggtcaagccccagtattcgcccactgcggtccgctcagcaccttcctgcccggacccccacgtgcttgcttcctcgtcctagatccgccagtttgcggccgtgctgacccgcagacgactgaacacccgctggcgacggctggcggcggagcaacgggagaggtgggctgggcctggggtggggcggggccaggcggagacttttcttgggcaggctgggtaccaaacacctgccacctgtgttccagcctcaagtccctgatcctgacggccctgcagagagaaacagagtaagtacctacccacttctctcgggatcttgacgactttgtctaggtttctgccttccttttcggctccaggctgggacttgtggggcagggacttcagttctagacgcaaggtggagtgaggattttaaggctgttttgaagactaaagttcttgaggaagggtgatgatgatctgccaaacccaagtcagaagaataagactgaaattcaggctaagttagactgaacttaccagattacatgcccacagtgctgttgggctccctctgagctgctgtctcatgtgtcccaacttggcaaagaccctgtgcccacacctcctgaaagtttctgtcctggctgccccattgagcctggccactgtgtgcagaggaaggtattgaagggtgattggaggagatctctcctgtttgcaggcactgtgtgagcctcagcctggcccagctctcagccaccatttttcgaaaggaaggcttggaggcctggccacagcttttgcagctgcttcagcacagtacccacagcccccacagcccagagagagaggtaccatcacatggttggcaggagggagggcctgagaggctggatagaccttgtaagcttgctctcccatcctctattcttggacagatggggcttttgctgctaagtgtggtggtgacctcccggcccgaggccttccaaccccaccaccgggagcttcttcggcttctgaatgagactcttggtgaggtgggctctcctgggctgctcttctactccctgcgcactctgaccaccatggctccctacctcagcactgaagatgtggtgagatgtgggccctcgttatctttgactccctttcctcatgccttcatgtcctcacccgtaaaagttacaaagctgctttggattctttacctgcctgtggcccttcctgacaattgagaggggatgctgtaggtgggcctggctgttatgcctgggctcctcctcgcaattcaggctgtgaggaagctgccagctgctggggtgtgagattgggctgcatcatgctctctgtgatgtgtccctcagcctctcgctcggatgttggtgcccaagctgatcatggccatgcagactctgatccccatagatgaggtgaggacaggtgggcaggagctctgttggaaggagagtgcagaagtgtccagtttggcccactgaagaagagcatggtaaccttgtgccttgtttgtctgtcaggcaaaggcctgtgaggcccttgaggctttggatgaactgttggagtcagaggtgccggtcatcaccccctacctctctgaagtcctcacattctgcctggaggtgagcctggagtggacatggcccctgctacatgctctgctgggactctccttccctgtcgctgatttttattattctgtggacaggtagctagaaatgtggccctgggcaatgcgatacgcatacgtattctctgctg

SEQ ID NO: 12081 - DNA, 2300 bp, Homo sapien
tggcgggcgcctgtagtcctagctactcactcgggaggctgaggcaggagaatggcatgaacctgggaggcggagcttgcagtgagcagagatcgcgccactgcactccagcctgggcgacagagcgagactctgtctcaaaaaaaaaaaaaaaaaaaaaaaaaaaacacagaacaaagaataatgggacctgaaagggtggaggtgaaggcagtcgactctgcagggacatccaggagcatgagtctgccgttagagtggcaggctgcttcagccccctccccttttggtcctggatgtaagtgggtgcccttagagatgtagctcctagtgttgaccctccctccgggggcccatccctgcagtgcctttcttcctgacgtggagtgtggtgaactcagtgcattgggccaatggttcgacacaggctctgccagccacaaccatcctgctgcttctgacggtttggctgctggtgggctttcccctcactgtcattggaggcatctttgggaagaacaacgccagcccctttgatgcaccctgtcgcaccaagaacatcgcccgggagattccaccccagccctggtacaagtctactgtcatccacatgactgttggaggcttcctgcctttcaggtatcctccctttattccatggctattactgtcaggttcctgacctcaatttttcctgtccctactcatccagtaccctaacccaacccgttgatccctggttcagtggtaccattcagagatcattaaatggttcctcctatccccaagcaggactgagcttgaatgatatgagagtgtctcacttataaagctctccggagacatttcccccttcaccttcctggtttctgactttaatgcctatggacatcatgtggggtttaaagcccatttgatgacccatttactttgttgaatacctctttgtgccaggcaaagaataaagtggaataaaatggacaagatccctgccctcaatctattagggaagatattcttgaagtgagagcggctaatcataggcaaaaaatccccatgaagccaggagatctggggcagagagtggagtgaactcacttttcacaatgacccagcaacatgggagagggtgggggctggatttcagcccagccactgtgctgatggtgcacagccctttaatgctgtgtatcatctcttttcttcacagtgccatctctgtggagctgtactacatctttgccacagtatggggtcgggagcagtacactttgtacggcatcctcttctttgtcttcgccatcctgctgagtgtgggggcttgcatctccattgcactcacctacttccagttgtctggggaggattaccgctggtggtggcgatctgtgctgagtgttggctccaccggcctcttcatcttcctctactcagttttctattatgcccggcgctccaacatgtctggggcagtacagacagtagagttcttcggctactccttactcactggttatgtcttcttcctcatgctgggcaccatctcctttttttcttccctaaagttcatccggtatatctatgttaacctcaagatggactgagttctgtatggcagaactattgctgttctctccctttcttcatgccctgttgaactctcctaccagcttctcttctgattgactgaattgtgtgatggcattgttgccttcccttttgccctttgggcattccttccccagagagggcctggaaattataaatctctatcacataaggattatatatttgaactttttaagttgcctttagttttggtcctgatttttctttttacaattaccaaaataaaatttattaagaaaaaggctcatgcagttggaggttttggtctggatataggaactcgagccctgctgttaagggcacggtcctttataaagccgagctggccactgaatgcccgaagctcgagttctccaacccagcttgggaactcccggcgtggggaacctacattgccagagtcgggtttccgcgattcagccggtgctcagcctaacggaagtggaggagccggacctctttgtgggaagcgaattgaatcaccttggcaacccgcggggcgtgcagcaacgccctttcctccggaagtgggtgtcagaacctccacgtgctgtccctccccctccccttttcggcccagtagcggcggctcagttgctgccatggagtcagccgggctagagcagctcctacgggagctgctgctaccggacaccgagcgcatccgtcgg

SEQ ID NO: 12082 - DNA, 2300 bp, Homo sapien
ctcagttcttgttcttttttctttttctttttctttttttttttttttttgagatggagtcccgctctgttgcccaggctggagtgcaatggcctgatctcggttcactgcaacctccgcttcccaggttcaagctattctcctgcctcagcctcacaagtggctggggttacaggcgcccgccaccaggcccagctaatttttttgtatttttagtagagacagggtttcgccatgttaggctggtctcgaactcccgacctcgggtgatctgcccgccttggcctcccaaagtgctggtattacaggcgtgagcccaccgcgcccgacctcagttctttttctaattagaaaattcactgattgtctaacaaaactccaccatctgcttctttgaacctcacctatatctgcagggaaagaactgggtcagaaagggcagtaattgtagaagcaggtaaattaagggcttttcaggccagaagtcacttgtgatttttccactgtgcttcttcccctggggagagagaagcttaagtccacttccttacacgttgctcccaggtggcaaaacagaagtcactgctcaaaggtccgattttcaaggggaactccctagacggcagatcccctttaaaacagctgagacaaacacaagggtaaactttttcaaaataatctgccatacaaagtgaagagaagcccaaagacatacacagtgataaataagaacaaaaacatagactaacggacctcgagatactttaccgtcaattaacaataaccatgttaggctgcccaactcacagagtcaaaggacagacctctctccttgcgcgcctctgcgccaaaccgggtttcggcttgcttatcgtgggctctgaacggtcactgtgcggccagggaagtctccagcacagcctcgggaagacattcctattacatatttatcactttggcgctggccattcgtgacaggtgggagacgagtgaggtgagattcagatgttgggacccttgcatgggacagatgcccaaagcttcgccccttccccggtttgggggccacgaaccgcctctcagggctcagcctcagcagcaggtggttcagccggaaagtgcttcgaacccagacgccgcctgcgctccatctccccggccctcgctagtcccgtcccgcggggacagctctcgggcctcggccagcgcgagcctcctggccaagagctctcaaaccccaaatctttccaggagcaagcgagcggcctagcagccactcctctcccgaaggggtgtcagggtcctcgctgccaggcctcagccccctccccgggaagccgtcgcgaaggagtccccaggggccgcagcagcgaaggccctctgcgttccaggcaaggagctttccgccaggctgaggtcgccgccggtgagggcggaagtggtaagactgacgtgtcctgggccgcgctgccgatcgccgggaggacccccgcctcgccgaagacgggcggggcaagccgagcctcacggggtccccggagctgggccgggcctccagatggagaaggcgcaacggggagttcttgagtaagccagagcggtgtccagcgcggtgtagccgcagccgccgctgtcaggcgcagcaacgggcaaccccgtagaagtcggtcggcaggtcctctccaacccgccgctaccgcgccgctgtgggagagaccccagcaggagcccaaaggcagctacgggggcgcgaaggccgctggcgccgcctcggccagcccttcccgcgcggtgaggaccccggggctgtggcgggaagggacccgaggtgcgagaccgagcggcgttgccatggaaacgggccagggcgcgtagtagaggccccgggccagacgggctgcgggtggggtgaaccccaggttgggaggatgagagagcagaggtggagcggggtctttgggatagagagacgtggggtagggtgaggcggggagggggccaatgggagcaagtggagccaggggacctcagttcgaggcacctgacctggggtttctgtaacctccctggtttctataacctcaggattcccccaaacaggttccactgccttaaggatgacagtcgtagggaaccctcgaagttggagctgccagtggttgccaatcctgatactgttgctgggcacaggccatgggccaggggtggaaggcgtgacacactacaaggccggcgaccctgttattctgtatgtcaacaaagtgggaccctaccataaccctcaggaaacttaccactac

SEQ ID NO: 12083 - DNA, 2300 bp, Homo sapien
cagtgcttatttttttgagacagagtttggttcttgttgcccaggctggagtgcaatggtgcagtctcagctcactgcaacctccgcctcctgggttcaagcgattaccctgcctcagcctcccaagtggctggggttatagccatgagccaccatgcccggctaattttttttgtatttttagtagagacggggtttcaccatgttggacaggctggtcttgaactcccgacctcaggtaatccacctcggcctcccaaagtgctgggattacaggagtgagccactacgcccggcctcagtgcttgctttttttaaaaaaaaaaaaatgctgatgaccaggcaccccctcccctgagaatcctgattttaaaaaagaaactttccagtagcagtgtgaaaaatgacccagggggaaggtgactaggagactagcaaggtggctctcatggtagtttaggtgagagaagatggagcctgaaccaaagaggtggaggcaagcatctggaagatattcaggaaataagtggagagggcttggtgacactgatatctgagcgggaagatagagagaaagaggcccaagtttctggctttagagaccaggtggttgtcagttagagattatttctaagccactctcagttcttgttcttttttctttttctttttctttttttttttttttttgagatggagtcccgctctgttgcccaggctggagtgcaatggcctgatctcggttcactgcaacctccgcttcccaggttcaagctattctcctgcctcagcctcacaagtggctggggttacaggcgcccgccaccaggcccagctaatttttttgtatttttagtagagacagggtttcgccatgttaggctggtctcgaactcccgacctcgggtgatctgcccgccttggcctcccaaagtgctggtattacaggcgtgagcccaccgcgcccgacctcagttctttttctaattagaaaattcactgattgtctaacaaaactccaccatctgcttctttgaacctcacctatatctgcagggaaagaactgggtcagaaagggcagtaattgtagaagcaggtaaattaagggcttttcaggccagaagtcacttgtgatttttccactgtgcttcttcccctggggagagagaagcttaagtccacttccttacacgttgctcccaggtggcaaaacagaagtcactgctcaaaggtccgattttcaaggggaactccctagacggcagatcccctttaaaacagctgagacaaacacaagggtaaactttttcaaaataatctgccatacaaagtgaagagaagcccaaagacatacacagtgataaataagaacaaaaacatagactaacggacctcgagatactttaccgtcaattaacaataaccatgttaggctgcccaactcacagagtcaaaggacagacctctctccttgcgcgcctctgcgccaaaccgggtttcggcttgcttatcgtgggctctgaacggtcactgtgcggccagggaagtctccagcacagcctcgggaagacattcctattacatatttatcactttggcgctggccattcgtgacaggtgggagacgagtgaggtgagattcagatgttgggacccttgcatgggacagatgcccaaagcttcgccccttccccggtttgggggccacgaaccgcctctcagggctcagcctcagcagcaggtggttcagccggaaagtgcttcgaacccagacgccgcctgcgctccatctccccggccctcgctagtcccgtcccgcggggacagctctcgggcctcggccagcgcgagcctcctggccaagagctctcaaaccccaaatctttccaggagcaagcgagcggcctagcagccactcctctcccgaaggggtgtcagggtcctcgctgccaggcctcagccccctccccgggaagccgtcgcgaaggagtccccaggggccgcagcagcgaaggccctctgcgttccaggcaaggagctttccgccaggctgaggtcgccgccggtgagggcggaagtggtaagactgacgtgtcctgggccgcgctgccgatcgccgggaggacccccgcctcgccgaagacgggcggggcaagccgagcctcacggggtccccggagctgggccgggcctccagatggagaaggcgcaacggggagttcttgagtaagccagagcggtgtccagcgcggtgtagccgcagccgccgctgtcaggcgcagcaacgggcaaccccgta

SEQ ID NO: 12084 - DNA, 2300 bp, Homo sapien
ctaaaaaatacaaaattagccaggcgtggtggtgcatgcctgtaatcccagctactcgggaggctgaggcgggagaatggcttgaacccgggaggtggaggttgcggtgagccgagattgtgccattgcactccagcctgggcaacaagagcgaaactccatctcaaaacaaaaacagacggggcgcggtggctcatgcctataatcccagcactttgggaggccaaggtgggcagatcacctgaggtcgggagttcaagacctgcctgaccaacatggagaaaccctgtctctactaaacatacaaaatagctaggcatggtggtgcatgtctgtaatcctagctactagggagggtgaggcaggagaatcgcttgaacccaggagttggaggttgtagtgagccaagatcgtgccattgcactccagcctgggcaacaagagcgaaactccatctcaaaaaaaaaaaaagagaaaaaaggtcctatgccaagttctcaaggaagatttggagtttgccacaaatacagaaaagcagttgtggatcattacgtgtgtgttaaaaaataaaattggggaggtaagcaggatcagacttaaagctgtgtgaaagaatttggatggacttgatcctaaagagaatggggagacactgaattgtttcaaatggaaataaaatcagatttatgctttggacttgggatggacagactggagtggagcagaaggctggcgggggccatctgttcgatgatggaggcgtgaactaagggattagcagtgggctcagaaaaccatgagaatattatcaaagagagaatcaggaggtataagagataggatttcgtgatagattgaatgtagggactgaggcaggagggtctgggatgacatatgagtgtctaaattaagggtgattagtgtacaactcacagaaaagtctgagagaagaaaataagttcaattattgatatggttaagtttgagatggatatggtaagttccatgcctggggcagacatggccacgtaatactggctgctctatctaaactccagatatatgggatggagatgaaattaggagcagtcagcataaatgtagtattgacaccatgggtatggacaagattaagggaggatgtgaaggtttgagaaaataaagcttgtgatgtaacacttgggatatgattaagggatggatagagaaagatataacttcagtgaaggctgaggagtgaccagaaggatgtggaggaaaactagagagttctggctcatagaagataaggatgcatttcaaggttagattttcctagaacatgttcaataccttacaatggtaatactttcacactcgtatttctcatgctgcattataagctttaggatcatagtgtctctattggccttattgaactaagggggctgcaatgggctcggaaagccttgagtgtatcattaaagagataagtaggagatagcagagacaggatttgatgaaagattgtatgtagggattgaggaaggaggaagggtctggcatgacatttgggtgacattttatccaagtattcagcacagtgtctggtacttagtaggtactcatatatcaatgaaaggtctgatctttaggagtttcaccagactgtggaaggtgcctctgggaatgagtacgtttccaactgcacttcattctctttttttttttttttttttttgagacggagtctcgctctgtcgcccaggctggagtgcagtggcgcaatctcggctcactgcaagctctgcctcccaggttcacgccattctcctgcctcagcctcccaagtagctgggactacaggcgcccgccactacgcccggctaattttttgtatttttagtagagacggggtttcaccgttttagccgggatggtctcgatctcctgacctcgtgatccgcccgcctcggcctcccaaagtgctgggattacaggcgtgagccaccgcgcccggccgcacttcattctcaagttttgtggccaacgatggataggaggtggattgtgatgtattcggaacatgggaccttgaggagttccgtaaccaaaaggagaaagtaacaacagccagtggagacaaaaagaactgcttctctttctttccccctccaagttcctagtggagggctgagtccagcatcccagactcgtgtgactatataggcaagcatttggggacctacttcactttgataccctagccttcagcagctcaaggtgttggcctttggataggaggcttccaagtagtaaag

SEQ ID NO: 12085 - DNA, 2300 bp, Homo sapien
taaatcaatagtgtaattcatgatgtggctcttaggggatggggtgctcagattaacgctctattttgggaagctttattattcaactcaacatatgctcattattttacatctttgtgctgtttaaatgctcaagtagtggggtaaaagccctggttcttccactttgattatggctctgcctgtctatagtccaaagtaatggcactgttagttcttttagaaatgggtattcgagctgggtgcggtggctcacgcctgtaatcccaacactttggggggccgaggcgggcagatcacttgaggtcaagagttcgagaccagactggccaacatggcaaaaccctgtctctatgaaaaatacaaaaattagccgggcatagtggcacctggctgaggcaggagaatcacttgaacccgggatgcaggggttgcagtgagccgagatcgcgccactgcactccagcctgggcgacaaagtgagactctgtctcaaaaaaaaaaaaaaaagaaaagaaaagaaatgggtattcgggtgtatgaagtaccttggttccttttccctcttccagtgtcaccttaaccactactgacacaatagcagggagacaaggcttctcacacaattgttcccagacacagaattcaaaccaagccttctagtagtgaaagctactaactatgggttctggataaaggaaagctacttgctccttccattccaagtagcaaagctacttgctccttccattccaagtagcaaagctacttgctccttccattccaagtagcaaagctacttgctccttccattccaagtagcaaagctacttgctccttccattccaagtagcaaagctacttgctccttccattccaagtagcaaagctacttgctccttccatggtattctccctccttgtccttgaaaatgggctttgtaaaagaaatttggggctgtcttggcagaggcacgaccaggggaaagcaatgagggaagactcagagatgcctccacgtggttctaagtggtagatggcagtttcttcagcctcagcaactaggcaactctaggacaaaccggcttgaaagatgaaataatgtttgcctggaacataggttgagatactaggaatgcccatttgttctatgttccaaccccccttctttgctctaattattcattgcttgaaataaggctccaagggccaggggaacagcttcaggggtagacaaggcagtatagacactaggattccatctgcccagttttattgggaacaagggcattataactgctatcaaagagaagggagcccaagggctccttctgtagcaagatccttcttcagagttgagccagggctgggagggtaagagacccttttttcaggcagggtcacactaccaccctcagcatgacttccccaaaaagttatcctcctttagctcagcacttggcacttaaggaagaaaggaccaacaaaggtagcattaggaagacaagcccagatttatcaggatacccactcagccaactgctttagtgcttcttcatcttcatccactttgggagctttgaggacaaagatacccagagaaaagaaaggagaagcagtaaggtctcagcaactccaaccatcccctgctatgacattcagagcctgctgaattctgtctccccagcaaaaaacctaaaggtatggtccttctgcttgctaggctgctgttcaatcccacagcacctttgtgcaaattagaaaaatggtgcctcttgctcctgccatttgcagccctaaaccagggtacacggcttgttgagtgaagcacaggctaggtgggtgcctatatgcagtcaacaacctgcacaactgcagcagcagccctttctgtgtggctcctttgaggcaggatggatgaggaataatctttccccatatctctcccaccctcttaagtcctcaagacaacagaacaaccctgcatacctggccctgccggcagatgagtagaaggtacactaggcaatttgactgagggttcttcttccttgtcgcccacatttaacaactcctgggccaattcctcctgctccagctcctctagctcctccagcagttcatcctggatagggaagacaagaccactttagatgaagaaaaaaacttctacctccaaaaacataccacttttgaagttccctcccaaacttgtcccaagagcctctcttgggtgttccttctggccagtcccatactttctgcaatattccctgacccttcacccccaatcacctcat

SEQ ID NO: 12086 - DNA, 2300 bp, Homo sapien
gtgcggctgcttcaaggtaagaagagcgactgacaactgacagtgtaatgctgaagggtgcatgcaagagacagtgaaacccctggtctacaaaaataggggcggtgcaagtttccaagtatttacatattttttcccttgaacgctctcctgtgccttttaactattaaaaagtggggccagcaggcgggcgcggtggctcacgtctgtaatcccagcactttgggaggccgaggcgggtggatcacgagatcgggagttcaagaccagcctgatcaacatggtgaaaccccgtctctactaaaaatacaaaaattagcagggcgtggtggcacgcacctgtaatcctagctactcgggaggctgaggcaggagaatcgcttgaacccgggaggcggaggttgcagtgagctgagatggagccactgcacttcagcctgggtgacagagtgagacaatgtctcaaaaaaaaaaaaaaaaaaaaaagtggggccagacacagtgactcacacctgtaatcttagcattttgggaggcctaggtgggaggatcacttgagcccaggaatttgagaccagcctaggcaatagagggagaccctatctctaccaaaaaaaaaaaaaaaattgtagtggcgtgcacctgtagtcccagctacttgggaggctgaggtgggaggatcacttgagcccaggaggtcgtgaccacagtgagccgtgattgggtcgctgcactccagtctgggcaacagagctagaccctgtctcaaaacaaaagctaaaacattggcccagcaccaattgtgtcaaataggaaggcaatggagttaaacagaggctgaggatgcctgtccatcccggaaaaacagcaagttgatttccctggttatacttactaactttgcttaataagttaacgtagccctggcccttcactttgctaatcccatcttttacaccgttttgcaggacaagtgagatagaaggggccaaccagctactggagctctttgacctcttcaggtactttgttcatcgggaaatctatccaggcagcaagatcacacactttgagaggtatgcggagataagggaggagcagggtgagaaagtatcagagaggcctgggaaaccaagatactagcttggttactcctgccctgtcttgaataggttgcagcagaagactggaattcctttctcccagatgatcttctttgatgatgagaggcggaatattgtagacgtcagcaaactgggtactgagtgatgaggaacagccatttggggtccctaggagggattaggtagatacatacaggttggatagtttgccctataggtggcactcacaaaggtcagagtaataatggagaaccctgaaagcttaatgaaatgtgacttcttatctttctaggtgttacctgcattcacatccagaatggaatgaatcttcaaactctaagtcaagggttagagacatttgcgaaggcccaaactgggcctttgaggtccagccttgaggagagcccatttgaggcctaaactgaaaggaaatcaagaaggcattttcaggtgcatttgtaatttattaaagttcatctgtgtgtgacagaagagattttacccacagtgtggggagtttctatttttctagcctgtgaaatggggttggttgtcctgaggtgcagagaccagaatgtgagacattagactgcatcaggtttgccatctaaacttagggcaaccccaagtgcttgaacctataccaccccactttcctgagctctgtaaagagcatgaagttttcccactgaccccatacactgaggtgccatcacactgcacatttccttccggagaacaagcacgtactcaggtggagatagaactgtctttttacttaatagaaaatgatgtggcagctttaagaggagcgcgtcggtctggggctggtggcttgggtcacgtgacaccggtggtctcgtttgcgcctcttgatgtcgcggcggcgccctgaggacggattgggcaaggctggtccctgtgtgatgagacatcaccctcccaggagcaaggcggaagtctggaggacgctgaggggcggaggcgggagaggcgagctcgcgatgagtggtctcggcaggctcttcgggaagggtgagccagggtgggactggccagccaggaggcgctggctggtgcaggggaagaggagaccccggcgagattcggccggaccgctgcgccgggcaggggaagagaatcaggagacaggctgactggaaaaccccggcggcc

SEQ ID NO: 12087 - DNA, 2300 bp, Homo sapien
cgacgctctagtcgccatttgtctatggcaggcagggtggctgccttagctgccggaggttccgcactctctaaggccccgggtgaagccccacctctgctgcgcgcagcctgcggtgcgggtcatggcgcggctaccgaagctggcagtctttgatttgggtgagggacgggaaggggagaatttcgtaaggtgctctccttttccacatccctaacagcagctcccgaatccctgcatctcccgccccaggctgaaccttccctctccttcctctcgcagattacactctctggcctttctgggtcgacacgcacgtagaccctccgttccataagagcaggtgaggtagggacagggaagactgggggcgagataggacccagccagggctgagcgcactcttgccctctccagtgatggaactgtacgagataggcggggccaagacgtccgactgtacccagaggtgcctgaggtcctaaaacgattgcagagccttggggtgcccggtgcggctgcttcaaggtaagaagagcgactgacaactgacagtgtaatgctgaagggtgcatgcaagagacagtgaaacccctggtctacaaaaataggggcggtgcaagtttccaagtatttacatattttttcccttgaacgctctcctgtgccttttaactattaaaaagtggggccagcaggcgggcgcggtggctcacgtctgtaatcccagcactttgggaggccgaggcgggtggatcacgagatcgggagttcaagaccagcctgatcaacatggtgaaaccccgtctctactaaaaatacaaaaattagcagggcgtggtggcacgcacctgtaatcctagctactcgggaggctgaggcaggagaatcgcttgaacccgggaggcggaggttgcagtgagctgagatggagccactgcacttcagcctgggtgacagagtgagacaatgtctcaaaaaaaaaaaaaaaaaaaaaagtggggccagacacagtgactcacacctgtaatcttagcattttgggaggcctaggtgggaggatcacttgagcccaggaatttgagaccagcctaggcaatagagggagaccctatctctaccaaaaaaaaaaaaaaaattgtagtggcgtgcacctgtagtcccagctacttgggaggctgaggtgggaggatcacttgagcccaggaggtcgtgaccacagtgagccgtgattgggtcgctgcactccagtctgggcaacagagctagaccctgtctcaaaacaaaagctaaaacattggcccagcaccaattgtgtcaaataggaaggcaatggagttaaacagaggctgaggatgcctgtccatcccggaaaaacagcaagttgatttccctggttatacttactaactttgcttaataagttaacgtagccctggcccttcactttgctaatcccatcttttacaccgttttgcaggacaagtgagatagaaggggccaaccagctactggagctctttgacctcttcaggtactttgttcatcgggaaatctatccaggcagcaagatcacacactttgagaggtatgcggagataagggaggagcagggtgagaaagtatcagagaggcctgggaaaccaagatactagcttggttactcctgccctgtcttgaataggttgcagcagaagactggaattcctttctcccagatgatcttctttgatgatgagaggcggaatattgtagacgtcagcaaactgggtactgagtgatgaggaacagccatttggggtccctaggagggattaggtagatacatacaggttggatagtttgccctataggtggcactcacaaaggtcagagtaataatggagaaccctgaaagcttaatgaaatgtgacttcttatctttctaggtgttacctgcattcacatccagaatggaatgaatcttcaaactctaagtcaagggttagagacatttgcgaaggcccaaactgggcctttgaggtccagccttgaggagagcccatttgaggcctaaactgaaaggaaatcaagaaggcattttcaggtgcatttgtaatttattaaagttcatctgtgtgtgacagaagagattttacccacagtgtggggagtttctatttttctagcctgtgaaatggggttggttgtcctgaggtgcagagaccagaatgtgagacattagactgcatcaggtttgccatctaaacttagggcaaccccaagtgcttgaacctataccaccccactttcctgagctc

SEQ ID NO: 12088 - DNA, 2300 bp, Homo sapien
acagcagaggctcatctacagtggcaagcagatgtgagtttggagtgagaatgacagcatggcgatcttatgtgaagatgagaagaggagagggggcacgtactgaggtggatcaggggtgcctcttgtttttggtgcctaagactctttggcaatctggtgaagcctctaagccccttctcagaataagattttttcaggcataaaacaaaatatatagaattaaaggaaaactaattatattgaaatagttattaaaatactaaaacaaatttgtgatatagtaatatatgtacttttttattaatgcataagatctaatggtaggtctaatatgaccataattttgaaatattttcaagatacctataaatgatcatgatagaaaatagttaattgctattgttaacaagttacctatattgctaatactactgtggtttttgggctatgtttaaagttagaagaaatgttaaatttcagttgggggttagtaaaaataaagatgggattttttttctcattcaagttcacagacccccaaagagatccaggaaactcaagaactcctgttctggccgggcgcagtggctcacgcctgtaatcccagcactttgggaggctgaagggggtggatcacctgaggtcaggagttcgagaccagcctggccaacatggtgaaaccccatctttactaaaaatacaaaaattagctgggcgtggtggtgggcgcttgtaatcccagctactcaggaggctgaagcaggagaattgcttgaacccaggaggtggaagttgcagtgagctgagatcgtgccactgtactccagcctagatgacagagcgagactctgtcaaaaacaacaacaacaacaacaacaacaacaacaaaaaactcctaagtcttctttttcttttttttctggcttccttttcctgcaggaatgatgagaagacagcagctgattacaagattttaggtggttcagtccttcacctggtgttggctctgagaggaggaggtggtcttaggcagtgatggaccctccattttacctctttaccctgtcgctcataatgaggcatcatatatcctctcactctctgggacaccatagccactgccccctcccctggatgcccagtaatgtatgtctactggtgggagactgtgaggatcccaggattcagtattcctggcccagagggcccttgctggctactgggtgttagtttgcagtcctgtgtgcttccctctcttatgactgtgtccctggttgtcaataaaatatttcctggcctcctggaatctttcttctgttgcacaagttgactgaaataaaaatggacctaatgctcactcagttatagcaggctgaaggaatcggacagtggaaggaatggtgctcttacggggattatcagactctaggaaaacctacttagtggtgtgttggaaccagttcctagtggctaatgagagccaattattggcacctttttccaactctattaagtgacttcatgttggtagcttgaaattggccatggtaggattatttacagaaactagcaaacactacagatcagttcctccccacaaactggttgttatacatctaccagtgtagtgctgacatggatggtgaaaccttcggagagtgaattctctcttgactgtggctgtactggacatttaggcctggttggagaacgccttcaagggtttggctgacactgtactctatggctggaatattactgaggactttgggttctacactgtcaggaggttgataatgcagaaagattgagtgacaagctgtgatgtatcacttgggtctcaagaagaggcaggtgctagaagaaaaggctttccttcttccctggcttcttagtataatagaatcgggcaaggctgggtggagtggagaagtagggaggatgcccgtggccaatgccttagaaagacttgactgctgtggttgcatgtgtggtcgtgttggtacctcgctgcaatcctcttccccgcccagcatcagatggcactcttgcgccatctccaggctgatgacgccccgagtggcgacgctctagtcgccatttgtctatggcaggcagggtggctgccttagctgccggaggttccgcactctctaaggccccgggtgaagccccacctctgctgcgcgcagcctgcggtgcgggtcatggcgcggctaccgaagctggcagtctttgatttgggtgagggacgggaaggggagaatttcgtaaggtgctctccttttccacatccc

SEQ ID NO: 12089 - DNA, 2300 bp, Homo sapien
ggctaacatggtgaaaccctgtctctactaaaaatacaaaaaaattagctgggcgtggtggcaggcgcctgtagtcccagctactcgggaggctgaggcaggagaatggcatgaacccgggaggcgaagcttgcagtgagccgagatggcgccactgcactccagcctgggcgacagagcgagactctgtctcaaaaaaaaaaaaaaaaaaaatcataaaacaatatccttacctagcactatattatttcctattttctccccctctctctttcttttttttttttgcagggggagatggagtttcactcttgtcgcccaggctggagtgcaatggcgccatctcagctcactgcaatctccgcctcccaggttcaagggattctcctgccttagcctccgagtagctgggattataggcgcccaccaccacgcccggctagtttttgtattgttagtagaggcggggtttcaccatgttggccaggctggtcttgaactcctcaccttaggtgatccacccacctcggcctcccaaagtgctgggattacaggcgtgagccactgggcccggccttttttttcaggcagggtctggagtgcagtggtgccatcactgctcaccgcggcttcgacatcccaggatcaatcaatcctcccatctcggcctcccgaatagctgggcctacaggcatgcgcccagacccttggctaattttttgaatttattgtacaggcagggtttcgccatgttgcccaggatggtctccaactcctgggctcaagcgatcggcctgcctcggccttccaaagtgctgggattacaggcgtgagccaccgcgcccagcctattttctctttttaatggcgccagtgacccattcacctattaaattgatgttacgactcttatataggccgctactcaacgttaaaaaaaatcatctttaacatactattttaatactagacctcaaatcttagctaagaagtagtttggaaggactggggaagagaaggttaagaatgactattatgtacggtaaatatgctaagaagctgatgaaataacgatagatttacttagctacaaaaaggccaaactagcattagacttcacttgtcagcagttttgtttttttgaggggggcgtgggggggggggtctctgtctgtctgaaggcacaaaagaggaaacagcagataggactaacgagggctggaaattggtgaagaaccaccacgggagttgagagatgcagatgaaggaaaccatggctagtagcaagaactagggcagcggtaactaacctgcctcagccaaggaagtgaggctggtccaggatgccaggctcagaaaggcaggtactgactgaacacactccccgctttggttcctgtaggacgggtgagataccacaccttggcaaccaccagtaaaggctcatagtctagcccttgggaggccccgattttagggctgtgctcggaggcgacctacgttagggactgggagaagcaggtaccctgggaatgaagaatggagagcagcgcttactccaagaatctgagagacgggggagtcaagccgctgctaggccttctctatgactgcgggggttcgaatacagtgagacccgacaaaagcgaccccattctgggtgatagcacagtcctggcaaaaaagcaggcatggcaaaataccccagggtcgtcaggtgggacctgggccccgctctcaaagcccttctgggtccccctatttcccaccacccctcgcgcggagccctgaggcagtcagcgtcctccaggctagggaaaggcgtggttttccttccccacgtctcccgtaaggcactgctgccagcccagtactactgcgtcttggcaaggctggaggtgctcccaccttcactttaattagcatcttctttccagtttggggctgcacacggataaattgctgctcctaccgctccggtcgccgctgccgccctccagcactcttgcctgcaagggccacttctacttccgggtcactgtctggctccacccccccccccccccccactgggttccggaaaggctcagggttgctcccgcgtttcggttcagtgacgtcgtaaattggaatgaggcatccagtttagcaacagcagagatgacgactctgcgattctgagagtccctggcgagcccgggctagcgaaaagtgggggcagaacgaactacatctcccatcgtgccaggaggcggtcccgcccgtttccccctgggagttgtagtctaaccccctcggat

SEQ ID NO: 12090 - DNA, 2300 bp, Homo sapien
gtgatccacccacctcggcctcccaaagtgctgggattacaggcgtgagccactgggcccggccttttttttcaggcagggtctggagtgcagtggtgccatcactgctcaccgcggcttcgacatcccaggatcaatcaatcctcccatctcggcctcccgaatagctgggcctacaggcatgcgcccagacccttggctaattttttgaatttattgtacaggcagggtttcgccatgttgcccaggatggtctccaactcctgggctcaagcgatcggcctgcctcggccttccaaagtgctgggattacaggcgtgagccaccgcgcccagcctattttctctttttaatggcgccagtgacccattcacctattaaattgatgttacgactcttatataggccgctactcaacgttaaaaaaaatcatctttaacatactattttaatactagacctcaaatcttagctaagaagtagtttggaaggactggggaagagaaggttaagaatgactattatgtacggtaaatatgctaagaagctgatgaaataacgatagatttacttagctacaaaaaggccaaactagcattagacttcacttgtcagcagttttgtttttttgaggggggcgtgggggggggggtctctgtctgtctgaaggcacaaaagaggaaacagcagataggactaacgagggctggaaattggtgaagaaccaccacgggagttgagagatgcagatgaaggaaaccatggctagtagcaagaactagggcagcggtaactaacctgcctcagccaaggaagtgaggctggtccaggatgccaggctcagaaaggcaggtactgactgaacacactccccgctttggttcctgtaggacgggtgagataccacaccttggcaaccaccagtaaaggctcatagtctagcccttgggaggccccgattttagggctgtgctcggaggcgacctacgttagggactgggagaagcaggtaccctgggaatgaagaatggagagcagcgcttactccaagaatctgagagacgggggagtcaagccgctgctaggccttctctatgactgcgggggttcgaatacagtgagacccgacaaaagcgaccccattctgggtgatagcacagtcctggcaaaaaagcaggcatggcaaaataccccagggtcgtcaggtgggacctgggccccgctctcaaagcccttctgggtccccctatttcccaccacccctcgcgcggagccctgaggcagtcagcgtcctccaggctagggaaaggcgtggttttccttccccacgtctcccgtaaggcactgctgccagcccagtactactgcgtcttggcaaggctggaggtgctcccaccttcactttaattagcatcttctttccagtttggggctgcacacggataaattgctgctcctaccgctccggtcgccgctgccgccctccagcactcttgcctgcaagggccacttctacttccgggtcactgtctggctccacccccccccccccccccactgggttccggaaaggctcagggttgctcccgcgtttcggttcagtgacgtcgtaaattggaatgaggcatccagtttagcaacagcagagatgacgactctgcgattctgagagtccctggcgagcccgggctagcgaaaagtgggggcagaacgaactacatctcccatcgtgccaggaggcggtcccgcccgtttccccctgggagttgtagtctaaccccctcggatccaacagcaacctcagtgcgtgaactctgttatccagaaggcctcgccctgccgccgccgaagctggaattcgtcggctagtagttctcgccggcaactagaggaacctgttggcgtggcccagaaggcttagcgggattgcacgaggttagttgctaagcaaggtggtctttggtcaactgccgcctggaccaaggcaacaggaagtgagtacctctattccggaaactagttatgaaccctccccgccccccgtcgccaacattccttcgttcccctaaatcagcctcttgccccattgctctttgcaggggtagaagaaggaagtgtagcggggtaaggaatgcaccgtcagggtctctcacaaccctttcccagctctcctccccaacaaacagtacctgggatggagccctagggtaatcgcagccacgggatgggtcgaggtgacaggcttcagggaccacacttcggcctttgcccgaccttccacaacttaagcgaagagaggc

SEQ ID NO: 12091 - DNA, 2300 bp, Homo sapien
aattctgttcatatatcagaaatatcggagcagaacttagctttgaatctcactaattcagatggccttttgaacttatcagataaagggcttcagtagtggaaaaaaccgtaaatcagagcatcctgactgctaactgccagagaactgactgggcatgggggtggggatgcaaacacctctgcagtcagctgggctaactggacaccaatagggatggggcatgaggaaagccctaccttacagagaaccttggccatctcaaaggtgcccacagtatccatattggcagcaatgatgggaaccccagagtatgtctgctttgagttccgaaatgaaaaggatcttgtgagatccacctgcagatatgaacaggaaattgaccatttcattaatccaaaaaacgtaccatattaggacaaggacaggcatctttcttggttgtggcccaccgggagcgtggggtcaagaaacagcaagtagagaagcttgctcacctcacttcgagacttaagggtactgcgtttgggcctcaaaaggacatccttgaagtccagtttcacatcgttgtcaatatgaggcatggcgcttagcctcggggtagcgatgaatctgagggctggaaggcaggaagtcataaggaccaatcttcccctgggctttaacgccctgttacggctggtggcctctcttcgcttaagttgtggaaggtcgggcaaaggccgaagtgtggtccctgaagcctgtcacctcgacccatcccgtggctgcgattaccctagggctccatcccaggtactgtttgttggggaggagagctgggaaagggttgtgagagaccctgacggtgcattccttaccccgctacacttccttcttctacccctgcaaagagcaatggggcaagaggctgatttaggggaacgaaggaatgttggcgacggggggcggggagggttcataactagtttccggaatagaggtactcacttcctgttgccttggtccaggcggcagttgaccaaagaccaccttgcttagcaactaacctcgtgcaatcccgctaagccttctgggccacgccaacaggttcctctagttgccggcgagaactactagccgacgaattccagcttcggcggcggcagggcgaggccttctggataacagagttcacgcactgaggttgctgttggatccgagggggttagactacaactcccagggggaaacgggcgggaccgcctcctggcacgatgggagatgtagttcgttctgcccccacttttcgctagcccgggctcgccagggactctcagaatcgcagagtcgtcatctctgctgttgctaaactggatgcctcattccaatttacgacgtcactgaaccgaaacgcgggagcaaccctgagcctttccggaacccagtgggggggggggggggggtggagccagacagtgacccggaagtagaagtggcccttgcaggcaagagtgctggagggcggcagcggcgaccggagcggtaggagcagcaatttatccgtgtgcagccccaaactggaaagaagatgctaattaaagtgaaggtgggagcacctccagccttgccaagacgcagtagtactgggctggcagcagtgccttacgggagacgtggggaaggaaaaccacgcctttccctagcctggaggacgctgactgcctcagggctccgcgcgaggggtggtgggaaatagggggacccagaagggctttgagagcggggcccaggtcccacctgacgaccctggggtattttgccatgcctgcttttttgccaggactgtgctatcacccagaatggggtcgcttttgtcgggtctcactgtattcgaacccccgcagtcatagagaaggcctagcagcggcttgactcccccgtctctcagattcttggagtaagcgctgctctccattcttcattcccagggtacctgcttctcccagtccctaacgtaggtcgcctccgagcacagccctaaaatcggggcctcccaagggctagactatgagcctttactggtggttgccaaggtgtggtatctcacccgtcctacaggaaccaaagcggggagtgtgttcagtcagtacctgcctttctgagcctggcatcctggaccagcctcacttccttggctgaggcaggttagttaccgctgccctagttcttgctactagccatggtttccttcatctgcatctctcaactcccgtggtggttcttcaccaatttccagccctcgttagtcctatctgctg

SEQ ID NO: 12092 - DNA, 2300 bp, Homo sapien
gttactgaatggcaataaaaataaagtaaaaataaaactgcataactatcaaccttaaagaaatgacaagacattccacaaagacacagcaatcaaaaatagaaaaaggatatgaagtccttaagactaatggagccacaaacaatagcagaattcatcaaccagggctacatggatcaaccagcagagtgcatatgttctcaaagtgcccagataactctctaccttctcagcaacaagtatagaggcaggtaatagtactgacaggagcagcatcttccatttcaaagtgaacaacttgtatataagaaaaacacatcccatttggggcacatcccagaaactcccaggaacctaggacttaaagaagaggaagattaaaaaaagaatggcagaagtattcttttattaatgaattgttcttattaaagaaaattaataagctgcttctcctaggatcttctagttaggatttttgaatgcttaaactgtagtttctggactaaaacagtgaatgcttaatgtggacaatcgcataactgaagggatgcatgtgactgtgagggggtgacctgggtggtgggaaaagttggcaaggtgtacaaactgctaaacaggacaaaagggaaaattctgttcatatatcagaaatatcggagcagaacttagctttgaatctcactaattcagatggccttttgaacttatcagataaagggcttcagtagtggaaaaaaccgtaaatcagagcatcctgactgctaactgccagagaactgactgggcatgggggtggggatgcaaacacctctgcagtcagctgggctaactggacaccaatagggatggggcatgaggaaagccctaccttacagagaaccttggccatctcaaaggtgcccacagtatccatattggcagcaatgatgggaaccccagagtatgtctgctttgagttccgaaatgaaaaggatcttgtgagatccacctgcagatatgaacaggaaattgaccatttcattaatccaaaaaacgtaccatattaggacaaggacaggcatctttcttggttgtggcccaccgggagcgtggggtcaagaaacagcaagtagagaagcttgctcacctcacttcgagacttaagggtactgcgtttgggcctcaaaaggacatccttgaagtccagtttcacatcgttgtcaatatgaggcatggcgcttagcctcggggtagcgatgaatctgagggctggaaggcaggaagtcataaggaccaatcttcccctgggctttaacgccctgttacggctggtggcctctcttcgcttaagttgtggaaggtcgggcaaaggccgaagtgtggtccctgaagcctgtcacctcgacccatcccgtggctgcgattaccctagggctccatcccaggtactgtttgttggggaggagagctgggaaagggttgtgagagaccctgacggtgcattccttaccccgctacacttccttcttctacccctgcaaagagcaatggggcaagaggctgatttaggggaacgaaggaatgttggcgacggggggcggggagggttcataactagtttccggaatagaggtactcacttcctgttgccttggtccaggcggcagttgaccaaagaccaccttgcttagcaactaacctcgtgcaatcccgctaagccttctgggccacgccaacaggttcctctagttgccggcgagaactactagccgacgaattccagcttcggcggcggcagggcgaggccttctggataacagagttcacgcactgaggttgctgttggatccgagggggttagactacaactcccagggggaaacgggcgggaccgcctcctggcacgatgggagatgtagttcgttctgcccccacttttcgctagcccgggctcgccagggactctcagaatcgcagagtcgtcatctctgctgttgctaaactggatgcctcattccaatttacgacgtcactgaaccgaaacgcgggagcaaccctgagcctttccggaacccagtgggggggggggggggggtggagccagacagtgacccggaagtagaagtggcccttgcaggcaagagtgctggagggcggcagcggcgaccggagcggtaggagcagcaatttatccgtgtgcagccccaaactggaaagaagatgctaattaaagtgaaggtgggagcacctccagccttgccaagacgcagtagtactgggctggcagcagtgccttacgggagacgtggggaaggaaaacc

SEQ ID NO: 12093 - DNA, 2300 bp, Homo sapien
caaaaaagattttttaaaaaattagccagggactgcgtgcagtggctcacgcctgcgatcccaacactttcggaagccgaggtgggaagatcgcttgagtccaggaattcgagaccagcctgggcaacaaagacttgtctctacaaaaaatagaaaaaaatgagccaggcatggtggtgcatgcctgtagccccagttactttggaggctgaggcaggaggatcacttaagcccaggaggcagaggttgcagtgagccaagatcactgcactccaccctgagcaacagagcgagactgtctccccacctcaaaaaaaaaaaaagagccgagcgcggtggctcacgccttgtaatcccagcactttgggaggccgaggcgagcggatcacgaggtcaggagatccagaccacggtgaaaccccgtctctactaaaaatacaaaaaagccgggcgcggtggtgggcgcctgtagtcccagctactcgggaggctgaggcaggagaatggcgtgaacccaggaggcggagcttgcagtgagctgagatcgcgccactgcacttcagcctgggcgacagagcgagactccgtctcaaaaaaaaaaaaaagtaaaacaacagaagttcatatctacataagaaagaaagaacattagagaaggaataaataaagggaaaaaggaagataactagaatttcacacatatccaatttggggtactttgggactgggtgtttcttgggcagtcgaatgtgcggatcagctgagactgatccggggcggagacaaggatgtgtgaaccattatctctgggaatggaagacatgggctaaagacggagcagtttcactaaatccttgtaaggtggtcaaggcaggcaactaatccagccaacaattaaggagtgtaagctgtgtgttaggttctgtgcttgctgatggaaatgagaggcaccaggaagcctgtggaagagacagtcaaggagagcagtcaattacattagggggctgacaagttcagtgcacaacagaatcctaaaacaagaaactaatttgtgtgtgtgtgtgagaccccgtctcactctatcactcaggctggagtgcagtcactgaagcctcaacctccctggctcaaacaatcctcccaactcagcctcctgagtagctgggactacaggcgtgccactacgcccggctagtttttttgattttcagtagagacaggttatcgccatgtgatccagtctggtctggaactcctgggctcaagcggatcgatcctcccctctcggcctctcagagtgctgggattacaggtgtgagtcaccgtgcccccagcctgtattctatttcttcttcttcctctttttttttttttttttttctttgagagagattctccctctgtcgcccaggctggaatgcagaggcaagatcgcggctcactgccacctcccgtctactgggttcaagcgattctcctgcctcggcctcccgagtagctgggattacaggcgcctgccaccacgcccagctaatttttgtacttttagcagagaaggggtttcaccatgtcgcccaggcttgtctggagctcctgggctcaagtgaccctcctgcctcggcctctcaaagcgctgggattagacacaagccaccacgcccagcctgtattttattttttaagggcgggcgccctcttctgttttataaaaggaacagtcgaattcctactggaagcgacgcgcgcagaggggaaggctttgtagacgccggctcgggtctggaatttaaagaactaaatttcgatgggtgaagacagtgggaaagggcggtggcatgatcctcgttttacagactaggaagtcgagcctcacgggagtgacggggcttctccgcaggctccgcgaagaaagcaaggctgggaggacccagacgaacggccacaacagcctcagcggccacgacagcctcagccgccaactcatgtcagccggcagagagtgcaggaagcgggcagctacagctccgctggggcgtggccttctgacgcaccgtcacggttccctctgtggccgcccattggctccctcttaccgcccttttccggggcaagggaagctagtagcggagccggaagtgaggcaccctcgggctcgagacagcggcgacgtttaaagctgagcgacccagtgccactggagacggtcagcttctccactcaggctcctccagcccgagccagaagaccccctcccccagaattctgggggccgatggaagggagccgagtcagatcgcgag

SEQ ID NO: 12094 - DNA, 2300 bp, Homo sapien
ctacagagcagctgtgagtttctccagctggaagcatcatacaattttttcccatgacccctgcaccttccacatgttccccctgccctggcccccattcaccatagctggggaggctcaagggctccacgttcccaggaatgggccagggtgtccttgctccgtcctgcctgaacaacactatcggtccccatgagtagcattctacggttgaagtacctttgagaatacttgataccatttgatcctcacagagtctcagggatgagatttttaggcccagtgtactgatgaggaaactgctgttgagacttgcccaaggttcttggccggagcgcttcagcactgaaaccaaagttgtctctacccttggtctaggattctagactcatgttcttgcttctgtattgctaaggaatggttgggcagcggcctggcctcagctccttgaggtcctgagctgagtgtctgctcccatggtgtccccccacacataccatgtacacaccttgtcctgacctagagagtcctgagtggtggtggggggaggggactggctcaggggttagggcactgactcaaacctggctgggtggggagagaaagattgattaaagctagggagagagtgtgacaaaggcatcctactggttctctgggatctgcctgggcccacatgtgctcacacacgtccggacagccagggccctgccccttcccgtatctgcagtgatgcacaaatccgcagcccctgcacaaagccctctggctgacctgcctggaagtttatatccactggtgtgtctactgagggtgttggaggtggggcacctgcccccacccccgggcaggttctggtgcttggagctggacaagaaaaggcagtgtgggtgtggagggctccctgccagttcctggggcctctctgtccccactccccacggcacctccctgcctgatgcatcaccaaacagcccctcctggattctgtttccttgtgtcttcttgtcggcctgtttttactgtcttctgctaggcggcccatgggcagagctgggacactagtgggaaggaaggaaagaaggaagaaggccctggctgacgggcctgaggacaagacccaaggagagcctccctgaagatgcctagcctcctcctctctaccttgggatcgccttggtgccatcctcagtgtttccccagtgacggggtggagtaaggatgcacacagcacaggtgcctgagccggttggtctggattcccaggaagaattccaggttggagaaaagggaatcctctagtccaactgagcagagactcctctcagtgagagaaaggtactctgtacccctggaagggggactcagttcccacccaagcctgagtggaaaggcctaaacatcccctaacccccgaggctacagcgggggtgggggacgtgaaatgagattgctcctactctgatctccctaatcccaaacttgagggcagctcactcatgcctggggctgtagagcagctgagaaagaagggacagacttgggggtggagggagtcagaatatctggtagagccagcaggtcaggggttagctggtggagccagtctgagggcctggctgctgatgtcaccagtctgcaacctgggatcccaggacctccctgggcaggatgagttccaggaccaggcccctgggccaatttcatagggctgagcctggcttgggctgcacagaactcggcagcaggagcctgtgagagcagaggtaggcagcctaagcttgggaccagaaggtcggccagacagggctgtgggtggaagggcctgcctgccccactgcccttgcagcttcttcatccgggagaaggggctcctcacatgcccagtctggtaggaatcagcctggtgccaggggccatcacagcggtggctcccaccaaagcccagcctaagcccccagacctcacccctgctccctccctagcatcttctccccatttcccgcccagaggcctggcctcttctctccgccccctacagcagtttggcccctccctcccacataagtcacttaccaggtctgtccctgcggcatccagtctgtgggtcctgtcccatccatcctgacctgttccatctcagccccaggactcagtactgcggttgccaacactgctgccaggtgaggggctcccacgggtactgtggtgccgagtccaggcggcccacactatcagaggccgtgcctggatccagcaaggtggggtgtgggccagctgtgtacctgtcagccccagct

SEQ ID NO: 12095 - DNA, 2300 bp, Homo sapien
atgtatgcaaaactcccatcacagtggctggcacaaagagaaccaataaatggcttaactctttcctcactgggactacaaatacacagggataggaaaaatgtctcttttcgagaatttgttataggatctaggaaaggacaagtatataatggacactttacatacatttccaggggctgagagaggtgtgaaggatatataaagatttaaagcactggcggggcatggtggctcacacctgtaatcccagcactctgggaggccaaggtgggcagatcacctgaagtcaggagtttgagaccagcctggccaacatggtgaaaccccgtctcttctaaaactacaaaaatcagtcgggtgtggtggtgcatgcctgtagtcccagctactccagaggctgaggcaggagaatcgcttgaacccaggaggcagaggttgcagtaagcagagatcgtgccactgcactcctgcctgggcaacagagtgagaccctgtctcaaaaaaaaaaaaaaaaaaaatttaaagcactaccttcttacccaggtgtgagttataaacacacacatgccacatggacacactattcgcaaagacatcacacacgtgtacgtgtggtacacacacactcactagccaccctgaacctcataaaggctccaccagaaaaccttctttgcagtaggcacagggaaaaaaatcacagtctttaaaagtacatatgaaggtctatcaaatcagactggggcattttagagaacttcctcgaggtgccacttgagttacatttttttttctttgtactgtggagttcaaaaagttaaatcttaaagataaacaggaattactgtggcaaaggaggagtgtggagaaaggagagtcaagagggaacaggctaacatatttaggaaactgcaagtatttctgtaggctgtcatgaagagtttttggcagggtcaggcaggatatacagccagagagtaggcagagcccaaatgccaataggtctgatgtgctgagctgagagattacaattctatcctgaaaaggagccactcagcacttttaggcacagatatgacgtcaaatctgcattttagaaaaatggattcagtagcacagaggatggactgataacaagggatgaggtggagaacactgaaaagactttcaacaatctggagaagaaattcggagtttgaactcctagtggcagtgggaagagaaagagtatttaagcgagtttaagaagtgaggaggaaatagtgccattcactacaatagaaaacataaaggccaatgtttagacaggatggatgaaagataatttataccttttggcttttggagtttgaggtgtctctgggacaccaggtgatatccaacaggtgtttgaatatgtatgtgcatgtatattatttattgttatttaagcttgcaagacatctgggctggagatataaatttgggtgtcatcaatttacaggtagtaattaaaacaatgagtgtggatgaactcacccagagaaagtgtaatgccagatttgtgggccaaaacagctctgaggagctccaactcgaagcagttgaaggcttacatttaaacattctcccaggaacagtgggtgaagtgaaaaaggggtgaggaaagggccctggagatcaccaacatttaggggtggaggtgaacagatgagaagagagaggcagaggtgcaggaggagaagccagaatgggggtgtcaagtataaagaaatgggtagcgtcaaatgcttcagaggttagagaaaatgacaggaaactccccctgttagatttgacatctagaaggctgtcggtgtggccagggtgaggtcagtggagtagtgaaggtgcgggtttccggctgttggagaaacctcttccactaactacattgcactctgagttaccaactggcatggtcctccccccatttcacacgcacgctacagtcgcccgtgcgcactcgtacacaccaggtggctaacaggtacgaggcgtttccggacagcgagcgcagagcccccgcgcacgcgcctccgagccggcctcttccgccgcaagtccctccccaagcctgcagagtgcgctgcgtttcgatgagccgggacgtggcgccgctctagccagcgcctgggctctgtggcgggcgccgcagctccgcgtcccccgcgcctcctcccagcgcaggtgggtccgcccgcggggggcgggggtgcccgggagccgtgggacgggcgggtagcggcaacctttggggagcagagtggtccccaacg

SEQ ID NO: 12096 - DNA, 2300 bp, Homo sapien
gattatgagagtggcatctgtgctcatcccacgtcactgaaaaagtgccatcactagggacctccctccaggttgacaaagacacattaattcatattatttggtgatggatgtcctatccgttacaaccatatctactatcccaccagcacccccacagttcaccattttgttgctcaacatatcctaagatagagctgatgggtgcaaaagcactaagatagtcatttgaaaacctggtttccaaacctggccccacctccaggtatgtgacttcactggccccacctccgggtatgtgacttcactgagtatctctgggctgctggggatccatcatgccctgtctcgctataacgctgtgctctgcgatggtcagagttataaagaatcaggaagctgggggcagaggaagtccctgttgcaagagataagaattgggcacttctgcttgtgccatggggaagcttcaactctgctatcactgacacgtggcaggcacccagcgctgctcttcccctttcattttcttgaccccaacttgtgctgggactcagatttcccaatatttgatttcatctgggtcccaagattagatccagaccatctggcctgagttgcctccccttgctggccccgcttccccacaaggccagcatccagcacccccacccaagattcccagaggtctctggatgcctccttccaccctcctcccacagtcctggccctggccggctccagcaaagcatggtgggcaaggctggagggaaagccagcaagaaagcgtcttctggaatcagcctgagcacaaggccaggctttattgcttctggctgtgcggcctcgggcagagcttcagtttcttgccatcatggctataaagtattcagtcattataatttctcattaattatggcttcgggagcacagaagttctcctctcttcgttgtccatttcttcttttgccctccactgaggcttctccaccccacaccctcagccctgccctcaccacgctctatcaaagcttgtttgtgggttccctcacctcccctctccccagagcacccattctctgctgggtgtaatgactacctgcgcacacctgacgcccacgctgacttcttctgccttgacctctcagcctctctccaggcaaggatttcttgttgcctcaggacatctccacatcaaaaccaaacatgtgagaagtagcccttcctcttctcatgcaaccatccctccccacgcccatgttctaggacctctgtggacaccacaaattctcaagtcctcagctttacaactgcaagccttcctcccagttcccttcgtccctgcatcttagtctcacctgctaccaaatcctgcctactggtcctcagaaatagtccttctccatcctcactctccatgcccactgcccccccacagccacagggacattcatgtggattctaggttctgccagatcatccctgaagagggggttttctaacctccttccccacatttacctccgttctgtgtctcccgtcccccactaaaccttttacccatacctgtgtctgggagagttttaaaataggaggatcagagctgcacatctgtgatttgtgcactttcagtataatacattatgcctcagtgacaagttttatagaagaatagagtaagcatcaaaagttaaacagaaaaaaatgtaaaccgttacaatcaccagatctaaaacaagttcttcttaacctgagtctgggtgaggtgtcccttctgtgggccctcatgggcccctgtcctactccatcttacgtgtctcacccaagagacctgctctgtccaatactagccactagccccatgcagttatttacatttaaattaggccaggtgcggtggctcatgcctgcagtcccagcactttgggaggctgaggcaggatgattgcttggaggccaggagttggagaccagcctgggcaatatagaaagatcctgtctctaaaaataatttttttttaaatttgccaggcatgggctaatttttaaaaattagctgggtgtgtgcctgtagtcccacctattttttttttttttttgagaccgagtcttgctctgtttcccaggctagagtgcagtggcatgacctcagctcactgcaacctccacctcctaggctcaaacgattctcctgcctcagcctcccatgtagctgggactacaggcacgtaccaccacgcccagctaatttttgtatttttagtagagatggcatttcactgtgttggacaggctggtct

SEQ ID NO: 12097 - DNA, 2300 bp, Homo sapien
gtcggttgtcccaaatgatccaactttcccccactgatttgacaggttcctttcgtaatacattgcgttctcacatacacttgtatctaattattctctgttttgtttcattgacttatcagtctactgttaacacctgtattgcattcttttaactattatgtcttgtacattttaatttattttattttattttttagagacggggtcttgctgtgttggccaggctggtctcaaactcctgacctcaagcaattctcccatctcagcctcccaaaatgctgggattacaggcataagccaccatgcctggcccctgtgcattttaatatgggtgacagcaggggtagggaaagcaatccccctcacccacaagacattagtctttttagtccttttttcggaattttcctggctgttctctttctttttatttatttatttatttttgagacaatctcactctgtcagccaggctagagtgcagtggcacaatctcagcttactgcaacctccgcctcctgggctcaagagatcctcctgcctcaggctcccgagtagctgggactataggcacgtaccaccacacctggctaatttttgtatttttagtacagatgggctttcaccacgttggccaggctggtctcaaactcctgagctcaagtgatctgcccccctcgcctcccaaagtgctgggattgcaggcgtgagccaccgtgcccagcttttctggctgttctcacgtttattcttctcattgagctttagattattttatcaattcctccaaaaggtcttattgagctataatccaatttgactgaatctatggattgatttacatagaaatgatgatttacatgtcagttcttagctttgaaagattttgtctgtacttattgtcatggttttatagtttttctatgtagacactatacatttcttaagttttctccccctgaacaattttgtttgtaattgttattgtgacagggctcttgcgttccatttcttcttccaaagattgctgtttctcatctgtcagtggttattttgaccagttttcctctcagaatatggcctcaagcccctaattcctcaggtcgctaacccaccctgtgtagccttcctagtggacaacaaccaccagaaggcaggggaagccgccagaggctgtggcacccaggccagcactaacacggttcattccttcttcccttgccccaccttctagaggccactacttttgctcagtgtatggggcacggctgatggtaccagctggccaggggctcatcgtggtcatctcctccccaggaagcctgcagtatatgttcaatgtcccctatggtgtgggcaaagctgcggtgaggacccagtggcataggagctgaggaggtaaaagacagtgatgttacctatagctcaggaggtacaatccccagtggtcagaatggtaaggctggctcctctcagctcctcctctgcctcatccatggacagttcctttgcttgtgctcctcttggttggctagagtaggcatcacactggggagcgtgggcagctgagaccttggggctcctgggaaggacagggtgggtggagcattcacagtagaagcagagagggcagggcaggaaagtgacatggctaggtggctcttaccctgccttccgcctctccacagtgtgacaagctggctgctgactgtgcccacgagctgcggcgccatggggtcagctgtgtgtctctgtggccggggattgtgcagacagaactgctgaaggagcatatggcaaaggaggaggtcctgcaggatcctgtgttgaagcaggttggcaaggggagggcgaaggaagcagagaacaggggagtcggcctctgcatcctcaataacaagatcagatactcccactcaccaggtgcttactgtggcaggtgcagggctgagcatgggacacacattatttcctttaatcctgtaagggagataccagctccattctacagatggcaaaactgaaacccagagaggtttagaaacttgttgaaggtcacatatgtcctaagtggaaaggctgtctagctccaaagaccatgcacttgacccccacaccagctagcttagaaggtccaaacactatttggcactaccagatccttccacttagcaaagacagcagatcctggtgccagggcacagggctcacctggatgtggggaggagtggctctggcacctgccaatactttgggtcctacaggccctgcttgaggtctttggcctctttggtctt

SEQ ID NO: 12098 - DNA, 2300 bp, Homo sapien
tgcttatgcaggggtccaggtaccctttgaactttgttcccaactccacatttctgacctccccctcagacccctgcatcttcatccccactcattgtcccttccattacccagcccctcacacctccctaccttcagatcattcatcaccctccctgtgccttccagacgatcctgaacaccaggaataaggcattctgggaaacccctgcctccatgtgggatgatatcaacaacgtcggactcaggtgggtgctccactgccaggacccatgttccctcactcacttagccaactcgacggccaggcctttccttacatgccctctccttttccctccggcctcccccatctctttcttctcccttccattccatttgtcccacttacctctggagaagttccatccaggtgagtctgtacctgagaatgtcaactctgtcagtaattttcattggaacaagcccttggcctctctcctgtctcactctctgcccatccaaatgcaagacccagaagggaggaagcctcctcctctcagtaatgcgcacagcctgtagtctatactttcaaaatggttagagggagaaattgttttattttagactgggagaagcttaagaagaaggagcgaacaccaatgctgtttagtctccacatcctcactccacacccacaggcaagggcactgccgggtcagagttgggagagcaggtacatcactgggtcacacagggtcatttagcccaggagtgagatgaaacacagcatttagaattcgcctagcataatgcacaccagttatgcctctgttactgttggaatgatgttacactctcatataatcaagtcatgcctgatggatgtgatcagtcacctgtgggagtaaccacgagattatcggcaaatctgtgactaaagcatgtaagaacacccaccgctccaattttggtactctggtaacaatcccaaggaagcaggattagaatgcaattgtgatttccaaagtggaaggaagatcattaggacagaggaggatggtgaggccaaaggcaagaaagggacacgttaagagctggaaattggccagtgttcatgaccatagcctccaaagagaggtgccttccacaccctcatctcttgctggccagggttttgaccctgaagcagagattcaaggcagaggcccagaccctcgaccttgggccctgatgaattatccaaggtaaaggccccttgatgagcccctgacagccccccagcacctcctgcccacccattccccatgcgcatttactgcctttcctctgtattaccttgggctgcactttcctttaaaactataactctacttgttttcatttggaaggtcctaattctttccctatgcaaaagaaatttattctggttaccaagttatgtgtgtgttactttttttaaatatggaaaaaatctgaagaccagtataatcttattcccctcagtgccatcccttgctctcttgcctgatatatagctactattaatagcctggcatatattctttcagatttttcatgtaaatatctctcattctttttaatacttgtacgtattctattgggaggatgtatgatcatttatttctctaatcccttatttgttgcagcagtggaattcttagatcaaagaatatgtacttcccttaggttatagagactgtgggaaaaatagaaaaaaagaaaagaaaacaaagaatatgtactttttaaagatttaataaatattatcaagctctcctacaaaaagaccctaccaattttttatatcaagacaatgaaggggaatatgtgtttccccatgtcctctaccacaccaggcagcgtcagctcatgcactcaggcaagctttgttactataataagccgaaaatatataaaggggttttaattcatacttcttccactatttgtcaggttgaactttttttcccctttgtttattggctctttgttcttttgtaaatcatctttgactttcgcattaatttataagagatcactgtgaaacaaatgactttggcatttattttacaaatatttttcccaatttatcactcatttttcacacgcatactccccccactcgtctgttgttgttgttgttgttgttgttgttgttgttgttttgaggtggaatctcgctctgtcacccaggctagagtgcagtgtgcaatctcagctcactgcaacctctgcctcctgggttcaagcgattctcatacctcaacctcccgagtagctgggattacaggcacctg

SEQ ID NO: 12099 - DNA, 2300 bp, Homo sapien
tcacacagcgtccctatgcttatggagctccctctgctggaatgcttttcctaacttcctttacctaattcttacctttcaaaactcagttcaagaaccacctacctcctccaggacgctttcccaaaccactttccctagccactctcctatgtcatctggatgctccccaacacccctagagtattctgtgcatatctccctcttataatttaccatattcacattacattgaagtgactgctttctgtacctgacttcctgttggaatctatcttcatttttaattaaaatttttttttttagagacagggtctcactgtcaccaggctggagtgcagtggtgcaatcatagctcactgcaacctcgaactcctgggctcaaacgatcctcctgcctcagcctcccaagtagatggtactacaggtgcaggccactgtgcctagctaattatttaaaaaatattttttgtagagactgggtctagctatgttgcccagactggtctccaactgctggcctcaagtgatcttgctgccttggccacccaaagtgctgggactacaggcatgagccactgtactccaccatggactgaatctttgaagagcagaaattagattttattagtcttggtaacttcagtggtttaccaatgcctagcaaatcatggatactcaaatatttatttaactgaagtctagtaaataagtaaaaaatgtgcagttcaataaagtcttgcctgaaatagaggaaagcacaggtccacaaccctttagttgcaattccaaaatctctgctctcaaacaaaaagttttttacttttctttcttttcttttttttaatacagtgtctcgctgtgtcgtctagactggagtgcagtggtgtgatcatggctcaactcctaggctcaagcgatcctcctgcctcagcctccggagtagctgctgggactgcaggaacgtgccaccatgcctggctcaaacacaaagttttttcataaaactcacttggcggcaaaattctaccttacctgaagttatttacggggtttttaatttccactttgaataaatattcacatcttgttgagtagtattatagtttcaggtaagggattaggaaaggagctgttaagtggaagggctctctcgggtggtttctgcaactgtggtcccagaggaagcactcacctcctgagcaacaacgcgaagggtgtccagatggcggccagtgatgtaaactgtggcgcctgctttgcagagctgcaaggcaatgccacggccaatacccctggaggcaccagtcaccacacacacttggccattcatgggagctgccatgactcacaggcaaaggaggcaggtctgtggaagcaaagacttactctgagggaagcctggagactgtgtgtgtgttggggcgaggttggggggtaggggagaacctcactagggctaagaggaggagccaaggtaagaatcctttgaggggagaggagtcagaggctgacaactgggtgcgggcctgaggacaaggctgactgtcttttgggaggcccagagagtgaagaaggggctgagtgggactgtccagaggtggacaactactacaaccctctgagtgtggctgcctggatatgggaatctggcgcggcagcccctcggggcgcgtccacgcagagtcctgggctatctgaagctccggtccctggcctgacccagtccggctgagccagaggcgcagcttccgggccggggatgagcgcgaagcctggagatcctaagccctaagtgggacgagcgtgcgccgcttacctgccacctgcgctgccgctgaggtctgcagattgcggggctgcggtggaagtctgggttctcgcccagattgagccggcgacgtggaggcagtgttcaaggattgattctgtagtaggacccggggcgattctgtgctgaggtagaggggcagagtcccaggccaaagttagaacctgcggatgggggcggagcgatctgggtgacacacccaccccgcccggctggggcggcgcggaactatgacgtagtagctgcgtcaggagcgcgcccgcgtttctaaactttgtctggataaggcgcacgcttggcgacgtcgaaggtccgtccgcagttaaggaagcttttgcagccggacaggtcgcgaagcacacatggggcagggtccgcgctctccacacaaggtggggcgccggttcccagctggtggcaaacgggggcgcggggccaaggggtcggggcgccccttaccaggccgtaa

SEQ ID NO: 12100 - DNA, 2300 bp, Homo sapien
aggagagaaaaatttcacagatgaacaaggattccgcttggagatgcagaacagatgtagtacaactaaatgtctcttctggatgactgaactgagactacatttctgtcttaatttttctaagaaacttcaaccagcttccccatggtccacagaagacagttcaacctcctcagccaggtattcaagccattccaaaataaagcctcatttaaactcgctaactttatttcctagtttttcaaaatgtggatcacagctcaagactgtaccatgaaatcaagttagtggtctcaactagcattttttttaaatgaaatagagcagaatagttttgaaaaggaaaaaaaaataacagagtgggctgcatgtagtaagggtatagtttcctgaacttttgcttgagtccagtgtgtatgttacttttgcttaagtccatttgtatattaagtcatgcttaaaaaaaattctcctcctgcgtccattctaatagccttccccaaacacaactgtacatccctacctctgggcctccgcacacactaatctttggcttgctaagccctgttcagattaggacaggtcaagctaattcttcccggtcaagctcccccatgaagacttactcttctgtttactgtctcattctgaactttctaaattcttcttccccctaggtccactttcctcttgtaatacttaccagatgattgggaaccacggggcctggctctctcagactccagaatagtccctcctaacacctgaagcagagttctgaccacgaagctgccatgtgtgtctccacagtagacaagaaaatcatcacacacctcagcggctagtcccaggaccagctcctccagggtctccgtgggaccatcctttccatcctcctcctcctcctcctcctcctctgcagcactccccagcaatcgagggagctgtagcaaagcactttgtaatacatggaccccgcatcggtgacaggccacagtgcgcaagttagagcgcagagcagcccacacgcgacaaagcggtttcaagggactgaatcccaacagttcctgcagcatctcactgccagtcctgttcgtggacaaagctagggcctgagtctctacttccttcattatattgtgcaccatcagatctgaaaagggaagaaagacacactttgaagagacttagtagagaatacagttatgtaccctcgcttaaccaagggtcgtgggtcggaggccgaggaagaggacatgggaaatgaaactaagtccccacgccctgccgaccctagaaagtttccttgcctgccctggatttgatgctcttggtctaaaccccgaagttgctgcctacctcgttcttccccagtctcgggagcctctttcaatgctgacagcgcccggcggaaatatcccagagcttccgggctcaggtgcgggtgcgaatctggagccggctccgagcgcccatccggaggcggccagggttgccgcttacggcctggtaaggggcgccccgaccccttggccccgcgcccccgtttgccaccagctgggaaccggcgccccaccttgtgtggagagcgcggaccctgccccatgtgtgcttcgcgacctgtccggctgcaaaagcttccttaactgcggacggaccttcgacgtcgccaagcgtgcgccttatccagacaaagtttagaaacgcgggcgcgctcctgacgcagctactacgtcatagttccgcgccgccccagccgggcggggtgggtgtgtcacccagatcgctccgcccccatccgcaggttctaactttggcctgggactctgcccctctacctcagcacagaatcgccccgggtcctactacagaatcaatccttgaacactgcctccacgtcgccggctcaatctgggcgagaacccagacttccaccgcagccccgcaatctgcagacctcagcggcagcgcaggtggcaggtaagcggcgcacgctcgtcccacttagggcttaggatctccaggcttcgcgctcatccccggcccggaagctgcgcctctggctcagccggactgggtcaggccagggaccggagcttcagatagcccaggactctgcgtggacgcgccccgaggggctgccgcgccagattcccatatccaggcagccacactcagagggttgtagtagttgtccacctctggacagtcccactcagccccttcttcactctctgggcctcccaaaagacagtcagccttgtcctcaggcccgcacccagttgtcagcctctgactcc

SEQ ID NO: 12101 - DNA, 2300 bp, Homo sapien
ggcactatggacacaaagggactatacaaagtgctctgaacgtcaaaccagaccaggtttgaaaagaagaggaataacctgaggtaagggccttgcttggtggtaagatgacctccagacaagtagatacgagaccatcctcctacttccctccttacctgcaatgtccttcagaaaggaggagctcaggtcctgaaggcgattcaaaaaggtttcagggacttcaaaatcagctggcttacattcctgagctggggtcttctgtgcttctgaaggaagattaagaacatgtgcagtggggagatcacaaactgccatccaggagagaaaaatttcacagatgaacaaggattccgcttggagatgcagaacagatgtagtacaactaaatgtctcttctggatgactgaactgagactacatttctgtcttaatttttctaagaaacttcaaccagcttccccatggtccacagaagacagttcaacctcctcagccaggtattcaagccattccaaaataaagcctcatttaaactcgctaactttatttcctagtttttcaaaatgtggatcacagctcaagactgtaccatgaaatcaagttagtggtctcaactagcattttttttaaatgaaatagagcagaatagttttgaaaaggaaaaaaaaataacagagtgggctgcatgtagtaagggtatagtttcctgaacttttgcttgagtccagtgtgtatgttacttttgcttaagtccatttgtatattaagtcatgcttaaaaaaaattctcctcctgcgtccattctaatagccttccccaaacacaactgtacatccctacctctgggcctccgcacacactaatctttggcttgctaagccctgttcagattaggacaggtcaagctaattcttcccggtcaagctcccccatgaagacttactcttctgtttactgtctcattctgaactttctaaattcttcttccccctaggtccactttcctcttgtaatacttaccagatgattgggaaccacggggcctggctctctcagactccagaatagtccctcctaacacctgaagcagagttctgaccacgaagctgccatgtgtgtctccacagtagacaagaaaatcatcacacacctcagcggctagtcccaggaccagctcctccagggtctccgtgggaccatcctttccatcctcctcctcctcctcctcctcctctgcagcactccccagcaatcgagggagctgtagcaaagcactttgtaatacatggaccccgcatcggtgacaggccacagtgcgcaagttagagcgcagagcagcccacacgcgacaaagcggtttcaagggactgaatcccaacagttcctgcagcatctcactgccagtcctgttcgtggacaaagctagggcctgagtctctacttccttcattatattgtgcaccatcagatctgaaaagggaagaaagacacactttgaagagacttagtagagaatacagttatgtaccctcgcttaaccaagggtcgtgggtcggaggccgaggaagaggacatgggaaatgaaactaagtccccacgccctgccgaccctagaaagtttccttgcctgccctggatttgatgctcttggtctaaaccccgaagttgctgcctacctcgttcttccccagtctcgggagcctctttcaatgctgacagcgcccggcggaaatatcccagagcttccgggctcaggtgcgggtgcgaatctggagccggctccgagcgcccatccggaggcggccagggttgccgcttacggcctggtaaggggcgccccgaccccttggccccgcgcccccgtttgccaccagctgggaaccggcgccccaccttgtgtggagagcgcggaccctgccccatgtgtgcttcgcgacctgtccggctgcaaaagcttccttaactgcggacggaccttcgacgtcgccaagcgtgcgccttatccagacaaagtttagaaacgcgggcgcgctcctgacgcagctactacgtcatagttccgcgccgccccagccgggcggggtgggtgtgtcacccagatcgctccgcccccatccgcaggttctaactttggcctgggactctgcccctctacctcagcacagaatcgccccgggtcctactacagaatcaatccttgaacactgcctccacgtcgccggctcaatctgggcgagaacccagacttccaccgcagccccgcaatctgcagacctcagcggcagcgcaggtggcag

SEQ ID NO: 12102 - DNA, 2300 bp, Homo sapien
ttgaccgggaagaattagcttgacctgtcctaatctgaacagggcttagcaagccaaagattagtgtgtgcggaggcccagaggtagggatgtacagttgtgtttggggaaggctattagaatggacgcaggaggagaattttttttaagcatgacttaatatacaaatggacttaagcaaaagtaacatacacactggactcaagcaaaagttcaggaaactatacccttactacatgcagcccactctgttatttttttttccttttcaaaactattctgctctatttcatttaaaaaaaatgctagttgagaccactaacttgatttcatggtacagtcttgagctgtgatccacattttgaaaaactaggaaataaagttagcgagtttaaatgaggctttattttggaatggcttgaatacctggctgaggaggttgaactgtcttctgtggaccatggggaagctggttgaagtttcttagaaaaattaagacagaaatgtagtctcagttcagtcatccagaagagacatttagttgtactacatctgttctgcatctccaagcggaatccttgttcatctgtgaaatttttctctcctggatggcagtttgtgatctccccactgcacatgttcttaatcttccttcagaagcacagaagaccccagctcaggaatgtaagccagctgattttgaagtccctgaaacctttttgaatcgccttcaggacctgagctcctcctttctgaaggacattgcaggtaaggagggaagtaggaggatggtctcgtatctacttgtctggaggtcatcttaccaccaagcaaggcccttacctcaggttattcctcttcttttcaaacctggtctggtttgacgttcagagcactttgtatagtccctttgtgtccatagtgccctgtatcttgttgcctaaagtttgaggttacgcaggttgtctggattttgggaaagccgctttatttctgccctctctccacagtgtttatcactgataagatctccagcttctgtcttcaagtggctttacaggttttacaccgcaaacttccccagttttgcgctcatctctgcaatgctgtgattggctacctgagtactcgcggttcctcagtagatggcaggtatggtcagggcctcaggatcgacccaagttggcggggctgtgtgaaatgaatgaggtgatgtagtgcaactgtattttgcatgaaatggagttaagactgcctgatgcccttcttgtccctagtcccctactgctatttctccgagatcagacgagttccagactcctggagcaggtcctgctggtgttggagcccccaagactccagagcctctttgaggagcacttgcaggggcagctgcagaccctggctgcacatcccattgccaacttccctttgcagcgcttactggatgcagtcactacccctgagctggtgagttggaaacctgagctggatctgtttctgctaattcttgatcactggaccttattttatggtctgtctgcctctatatacctttgacattgtgctggccattgcccttgaaaagctattctttgaggttttccagagcttaggataaaggtgcccaccttctagtgaggatttgttttgacttctctcaggtatgaggaccagcaagaaactggctttattcaggtttacagcttgaggttccatggcccacccagactctggtacttggctataagcccacatgagtgctagagctgttgccatagcttctcttttcctttgctgcttaggactaaggtgggcttccctgtggtctcatgcattgggtgttagagtggaagtgcagtttaattttagtctccccttgctcctagtgctcccttacacatagggaagagccacttaaagttccttcctgtgaggtggcacctctaagactgcccccttatcctgggccttatctagccaaacaaaagtcctgatactggcaatgctttttatgttttatctagcatttttagttgttttcgttgggaagatttctctgaataatgtggtccgccattaccagaatgccagagttacattccatgtttcccatcagctgtcccctgtgtttgaggagctgagccctgtcttggaagctgtattggcccagggccacccaggggtagtcattgccctggtgggggcctgtcgcagagttggggcctaccaagccaaggtcctacagctcttgttggaggtgagtggatattacccacaatctgtttatgccctcagtt

SEQ ID NO: 12103 - DNA, 2300 bp, Homo sapien
gctccttcccatcaccaacgcacccaggcgtccaggcatgtgagagcctgccttgccaggaaacagcacaagctgaagtggggcagtaagattccctggtggtggaaggaaataggaggactctgctgaatcctggtcctgcttctgttctcatccctcccccagctctggccccaatcctcccagcccaccttctgcagtgtgtatgttgcctggtctctctggcctgcagaggtgacccaaacaactcagtcccccacctgccttatccttgcctgtttccagtctcctggtccggctgagcccctggcctcctacctcctcccacctcttgcctcaggccctgccccagtcactccaccctcagggctctcaccgggctgtcaatgacagcttttccatgtaaggcatggtgctaggttccaggaggaacaggggatgcatggaggcataatggttagggagtcatgacacacaaccatgaagaggccccattaccaggctgcaccaggatacaagacaagaaaggaaaggatgagtagggacatactaagaagcagccctctcctcttggaaaagtcaagcaaaacttggaaatgaagagatttgaggggggcctggcagatggatagagctgggggaagggaaaagaaaggcctctgctcaagtaacagccagaacttgaggttgcttggggagggcaccaggagcactgtcttagtttgggttcttccaaagcagagcttgagctaagggcttgggtacaggtgatcctgtattcttgagctaagggcttgggtacaggtgatcctgtatttgggaggttaactcaggaagtgagggcataaggtaaaacaagagagaggaaagccattaagagtatgttaagtcccttcagtaggccttgggaacctctgagaaaagtatagattgcccaagacaaaagactggcagggtgatcagtccaaagcatttattaggagaatgtacttaatgagtgggctacagcgtatcctcacaacagacagtgagagagagttgttctacctgggtatatccaaaacaagggggtcagggtatggagtttacgagggttcaaggtatttggttcagggccagggccagtttttttcagtgttttgggcaacaacctgaataccttttcaaggctctggcttgggctcaagcctgcaggggaaatgcaactggccaggtcacagggcaatcaagttactctgtgtttctttgtcaggacacagaaaaaaagtggggaagctgggggaccctacaaggatccttggcaggaaagcagggattgtgttcatttgagggtttcactgtcagtgagagtctcagcttccatgcaactgtccatcacggctgcaactgaaatcagagctgggacacagcgcaccagaagctaaagtcttgatgccatcaaaggacatccctgccccattcacatctctgtcacgtccactaatcggcaaaaggagaaaagtgagagaagatgacctaagtgtgactgcagcaggcagctctggaaaatgaagccagagcagtgagccagcccctcctccgaccaaggaggaaggaaagagcaggtaagcaggaaggccagtgtcccagacaggaccctaatgatcctgaatccatgtatcaggatccatcctctccttacacccttcctggacacagtctcacctctcattttccaaagccctgccatgctgccatcccacttccccacactctgccccgggttcccttttcctaaagctgcagcttatggcttctccagtaggtggcagcacacacagagccactcataaactgcagcttctcagagcctgagagccagaaaccgtccccagaaattccctccatagaaataaaaaaacaccagaagtcacatttcatccttttacatggttcccatctaccctcacaacacatgtcatcaccaaagacacacatacaagctccaatggcttttgccaggcaattcttcctccaggaccccatctggcccctccctcatccctccccttggactttgcccttcttactggccaggcaggggggccagagtccaggcttgactcattcccaccttgtcctgggctgagatcccaggtttgtaacagaaaacaccactaaagccccagcacaggagagaaccacccagcccagaagttccagggaaggaactctccggtccaccatggagtacctctcagctctgaaccccagtgacttactcaggtgactgctaaccctccgctctaccctccaccttt

SEQ ID NO: 12104 - DNA, 2300 bp, Homo sapien
ggaagaattgcctggcaaaagccattggagcttgtatgtgtgtctttggtgatgacatgtgttgtgagggtagatgggaaccatgtaaaaggatgaaatgtgacttctggtgtttttttatttctatggagggaatttctggggacggtttctggctctcaggctctgagaagctgcagtttatgagtggctctgtgtgtgctgccacctactggagaagccataagctgcagctttaggaaaagggaacccggggcagagtgtggggaagtgggatggcagcatggcagggctttggaaaatgagaggtgagactgtgtccaggaagggtgtaaggagaggatggatcctgatacatggattcaggatcattagggtcctgtctgggacactggccttcctgcttacctgctctttccttcctccttggtcggaggaggggctggctcactgctctggcttcattttccagagctgcctgctgcagtcacacttaggtcatcttctctcacttttctccttttgccgattagtggacgtgacagagatgtgaatggggcagggatgtcctttgatggcatcaagactttagcttctggtgcgctgtgtcccagctctgatttcagttgcagccgtgatggacagttgcatggaagctgagactctcactgacagtgaaaccctcaaatgaacacaatccctgctttcctgccaaggatccttgtagggtcccccagcttccccactttttttctgtgtcctgacaaagaaacacagagtaacttgattgccctgtgacctggccagttgcatttcccctgcaggcttgagcccaagccagagccttgaaaaggtattcaggttgttgcccaaaacactgaaaaaaactggccctggccctgaaccaaataccttgaaccctcgtaaactccataccctgacccccttgttttggatatacccaggtagaacaactctctctcactgtctgttgtgaggatacgctgtagcccactcattaagtacattctcctaataaatgctttggactgatcaccctgccagtcttttgtcttgggcaatctatacttttctcagaggttcccaaggcctactgaagggacttaacatactcttaatggctttcctctctcttgttttaccttatgccctcacttcctgagttaacctcccaaatacaggatcacctgtacccaagcccttagctcaagaatacaggatcacctgtacccaagcccttagctcaagctctgctttggaagaacccaaactaagacagtgctcctggtgccctccccaagcaacctcaagttctggctgttacttgagcagaggcctttcttttcccttcccccagctctatccatctgccaggcccccctcaaatctcttcatttccaagttttgcttgacttttccaagaggagagggctgcttcttagtatgtccctactcatcctttcctttcttgtcttgtatcctggtgcagcctggtaatggggcctcttcatggttgtgtgtcatgactccctaaccattatgcctccatgcatcccctgttcctcctggaacctagcaccatgccttacatggaaaagctgtcattgacagcccggtgagagccctgagggtggagtgactggggcagggcctgaggcaagaggtgggaggaggtaggaggccaggggctcagccggaccaggagactggaaacaggcaaggataaggcaggtgggggactgagttgtttgggtcacctctgcaggccagagagaccaggcaacatacacactgcagaaggtgggctgggaggattggggccagagctgggggagggatgagaacagaagcaggaccaggattcagcagagtcctcctatttccttccaccaccagggaatcttactgccccacttcagcttgtgctgtttcctggcaaggcaggctctcacatgcctggacgcctgggtgcgttggtgatgggaaggagcagggtgagggaggggccccaggagaggcccaggatgagcctcatcttgtccctccccattcttgtcttaccctctgcaaatgtgataggcacaggacaggagtaggcacctcgcctactgctgcttaacctttcagcttctccaggcccccaatcctgcttgctcccagcttggtaagtagatctgtgcacgtccctttacaccccaccatccagttttgcccagatgtgctagaatggggctggacaaagaaggaggggccagactagaggagtggtggtagagata

SEQ ID NO: 12105 - DNA, 2300 bp, Homo sapien
agcctggagactctgaccgctttcgtgcttcctttcgggctgatgctcggctgctacagcgtgacgctggcacggctgcggggcgcccgctggggctccgggcggcacggggcgcgggtgggccggctggtgagcgccatcgtgcttgccttcggcttgctctgggccccctaccacgcagtcaaccttctgcaggcggtcgcagcgctggctccaccggaaggggccttggcgaagctgggcggagccggccaggcggcgcgagcgggaactacggccttggccttcttcagttctagcgtcaacccggtgctctacgtcttcaccgctggagatctgctgccccgggcaggtccccgtttcctcacgcggctcttcgaaggctctggggaggcccgagggggcggccgctctagggaagggaccatggagctccgaactacccctcagctgaaagtggtggggcagggccgcggcaatggagacccggggggtgggatggagaaggacggtccggaatgggacctttgacagcagaccctacaacctgctgcccttccctgtccctttccaccccccacccaccctccagaggtcagtgttctgggacatttggggacccttctttgactagagtttggatctggctgggtaggattactatacacttggggcaggcccaggctcctccaaactgagggattatgagggtggtgatggtccctgttaaggactattgtgtgcttgcaagttggcatgtacccatgtgccagcattgcttacttgttgccaatagctgttattgtgaaatacactgggaagccattagatgatgacttaagtgtgcttcccctggtggttcttcatgcctgagttgtactgaagccacctagttccctgctgggtcaagccaggctgggcagtgccagccttcagtggcatcttgacctgccctcctcagcccaggtgccctggttccacaggccaacccatagaaccactctggaaataaaggagaaaatggaaggagaggtatgggagcttggatgaggggtaggaatgggatccattctctgaggcttataaaagcctctgaggaggaaatggctctgaaggggaaaatgaatctgtggggtttgaaaaggaagttttcctgcctgtcttgtatttggtccagtgagtatgagacaggcacacaaggagtggacagtggtgtaggggccctgggagtctgagacttaccttgccccctgaccatctgatcctccctgcaaaggccacctgacgtgaaaaggagccaggagcaagcactcagtcagggaagtttggaggttggccattggggtatgaggaatggcaggaatatttagaggacaggaataatttttcagagaagtgccacatattctttttctctttgccaagtctgggctccttctaagatgctgctagctattcctagcccgttccccaatacttctctgcccccaccttttggaatccttatctaggtctaaaaacggttctagatcctgacccctttgattgggggatgtagaatgggattcttttcaggggacatccacaagtacacatctgtggtcactaaggtgaccagctcatcccagttggcctggaactttcccagtttaagcactgaaaactccttgtcccagccctgccggtttcccaacaaactgagatggttggccgctcaagtggctaccctgaccatcaccccaggctctactttagcgactgctcacacctccctgcttcccagacagaagtcaaaacagcaaaagaaacccagtccccagggtcatgctagggctaccaaaactgggatgaactagcacctgtgaactagaacagcagggagtatgcttagagtgcctggtcctgggtgtggggaagaaaggccatcaaggtagatgcgggtggggaacagcttgagagaggaggcaaggacaacccagtttctgtctgaaggggcctctggttgaccctggagtttctgtccccaaacacaggcctcacgggattctttctgtcctcatgcactgggcagaggttccttaacttcctttgttgcacattgccattctctcacatcccgtgcggtcaggaagcccttcctgaactctgacttcagttcttgctgcggtttctgcccatttttttcatatcctctgacagctgcgaggtcatctctgctctggcttttctccaagcagaacaagtgggggctctggaaaggttaagggacctcagtggccaccattatactttgcatcttt

SEQ ID NO: 12106 - DNA, 2300 bp, Homo sapien
tgggccttcctgcttccctttcaactctcacttctcaggaaagatgcaaagtataatggtggccactgaggtcccttaacctttccagagcccccacttgttctgcttggagaaaagccagagcagagatgacctcgcagctgtcagaggatatgaaaaaaatgggcagaaaccgcagcaagaactgaagtcagagttcaggaagggcttcctgaccgcacgggatgtgagagaatggcaatgtgcaacaaaggaagttaaggaacctctgcccagtgcatgaggacagaaagaatcccgtgaggcctgtgtttggggacagaaactccagggtcaaccagaggccccttcagacagaaactgggttgtccttgcctcctctctcaagctgttccccacccgcatctaccttgatggcctttcttccccacacccaggaccaggcactctaagcatactccctgctgttctagttcacaggtgctagttcatcccagttttggtagccctagcatgaccctggggactgggtttcttttgctgttttgacttctgtctgggaagcagggaggtgtgagcagtcgctaaagtagagcctggggtgatggtcagggtagccacttgagcggccaaccatctcagtttgttgggaaaccggcagggctgggacaaggagttttcagtgcttaaactgggaaagttccaggccaactgggatgagctggtcaccttagtgaccacagatgtgtacttgtggatgtcccctgaaaagaatcccattctacatcccccaatcaaaggggtcaggatctagaaccgtttttagacctagataaggattccaaaaggtgggggcagagaagtattggggaacgggctaggaatagctagcagcatcttagaaggagcccagacttggcaaagagaaaaagaatatgtggcacttctctgaaaaattattcctgtcctctaaatattcctgccattcctcataccccaatggccaacctccaaacttccctgactgagtgcttgctcctggctccttttcacgtcaggtggcctttgcagggaggatcagatggtcagggggcaaggtaagtctcagactcccagggcccctacaccactgtccactccttgtgtgcctgtctcatactcactggaccaaatacaagacaggcaggaaaacttccttttcaaaccccacagattcattttccccttcagagccatttcctcctcagaggcttttataagcctcagagaatggatcccattcctacccctcatccaagctcccatacctctccttccattttctcctttatttccagagtggttctatgggttggcctgtggaaccagggcacctgggctgaggagggcaggtcaagatgccactgaaggctggcactgcccagcctggcttgacccagcagggaactaggtggcttcagtacaactcaggcatgaagaaccaccaggggaagcacacttaagtcatcatctaatggcttcccagtgtatttcacaataacagctattggcaacaagtaagcaatgctggcacatgggtacatgccaacttgcaagcacacaatagtccttaacagggaccatcaccaccctcataatccctcagtttggaggagcctgggcctgccccaagtgtatagtaatcctacccagccagatccaaactctagtcaaagaagggtccccaaatgtcccagaacactgacctctggagggtgggtggggggtggaaagggacagggaagggcagcaggttgtagggtctgctgtcaaaggtcccattccggaccgtccttctccatcccaccccccgggtctccattgccgcggccctgccccaccactttcagctgaggggtagttcggagctccatggtcccttccctagagcggccgccccctcgggcctccccagagccttcgaagagccgcgtgaggaaacggggacctgcccggggcagcagatctccagcggtgaagacgtagagcaccgggttgacgctagaactgaagaaggccaaggccgtagttcccgctcgcgccgcctggccggctccgcccagcttcgccaaggccccttccggtggagccagcgctgcgaccgcctgcagaaggttgactgcgtggtagggggcccagagcaagccgaaggcaagcacgatggcgctcaccagccggcccacccgcgccccgtgccgcccggagccccagcgggcgccccgcagccgtgccagcgtcacgctgtagcagccgagcatcag

SEQ ID NO: 12107 - DNA, 2300 bp, Homo sapien
agagaagtgccacatattctttttctctttgccaagtctgggctccttctaagatgctgctagctattcctagcccgttccccaatacttctctgcccccaccttttggaatccttatctaggtctaaaaacggttctagatcctgacccctttgattgggggatgtagaatgggattcttttcaggggacatccacaagtacacatctgtggtcactaaggtgaccagctcatcccagttggcctggaactttcccagtttaagcactgaaaactccttgtcccagccctgccggtttcccaacaaactgagatggttggccgctcaagtggctaccctgaccatcaccccaggctctactttagcgactgctcacacctccctgcttcccagacagaagtcaaaacagcaaaagaaacccagtccccagggtcatgctagggctaccaaaactgggatgaactagcacctgtgaactagaacagcagggagtatgcttagagtgcctggtcctgggtgtggggaagaaaggccatcaaggtagatgcgggtggggaacagcttgagagaggaggcaaggacaacccagtttctgtctgaaggggcctctggttgaccctggagtttctgtccccaaacacaggcctcacgggattctttctgtcctcatgcactgggcagaggttccttaacttcctttgttgcacattgccattctctcacatcccgtgcggtcaggaagcccttcctgaactctgacttcagttcttgctgcggtttctgcccatttttttcatatcctctgacagctgcgaggtcatctctgctctggcttttctccaagcagaacaagtgggggctctggaaaggttaagggacctcagtggccaccattatactttgcatctttcctgagaagtgagagttgaaagggaagcaggaaggcccatggtcagattgaaggaaggactttttagtttcttttttttttttttttttttttgagatggagtctcgctctgtcattcaggctggagtgcagtggtgcgatctcagctcactgcagcctccacttcctgggttcacatgattctcctgcctcagcctcccaagtagctgagactacaggcacatgccactacacccagctatcttttgtatttttagtagagacggggtttcaccatgttggccaggctggtctcaaactgctaacatcaagtgatctgctcccctcagcctcccaaagtgctgggattaccggtatgaaccaccacaacctgccaggaatttttagtttttagcttttgcaggagacttcaaggaaaggagacattcctctgtccaggaaacgggtaaggggaccatttctgcattgctggtttcccctcttggcagggtgggcatgaggcatcactgttcctgctccctcactcctgctcctcatgctcagcctgccagctcggcctcaactttgtgtgtctaaagtggaactgaatagtaggctgtgagaagataggaaagaggtagtgccaatctccttgcccagatcataaatccagactcagcagggtaaccacatgggcaagcacaaggtaggtgcttggggaaaggggaagtaattggcattctgtgtgataccaaggagaccatttggattttggcttctaccaaagagaatggagaattggttgacctaaatggaaccagtccctttaagtaaggggaggaaagggggtgctggaagatggccctcttcccaccacctagatcatagcttgaactgaagccaaggacagagtgctgcccccttcggcatttactgatgtgccctctttaaatcatgatgttatctaacccaaacccagacccaggacctagtcacagctccaacctacacttcctattaatcttaaaacaaagcaaaacaaaacaaaaagatatcagcattgtagcctccaatctgagcccatttcccttctctggctaccatacctccttctcctatatgataccattcactactttgttcaattatccagtctagacctgcatcttgaggccacacccagccttctcactccccacacccctctttcctctctcactgctccttcctggtctcttctcatctggccccacctctaaggagtcctcctgccttctgggttgccctggaaaacagactatcccccctcctagtgaagggagtgggtaggggtttcagccccaccctcaggaagatgcgtcttccctgtcctctgctctgtggtacttcctctctggctgatttagcaaa

SEQ ID NO: 12108 - DNA, 2300 bp, Homo sapien
caggtagctgggattacaggcgcctgccaccatgcctggctaattttttttatattttttttttttagtagagacagggtttcaccatgttggtcaggctgatctcgatctcctgatctcaggtgatccacccaccttggcctcccaaaatgctgagattacaggcgcaccgcacccggcctaaaagtaattacttttaatggcaaaaaaaaaaaaaaaaaagaaatgcaattaattttgcaccaacctaataactaatgcctgatgatctgaagtagaacagtttcatcccaaaaccatcccccaccacagcctgggtgcgtggaaaacttgtcttccatgaaacccatccttgggtccaaaaaggttggggactgctggtctagaggatacagtccacccctctctctagacctgcactatccaatatggtagccattagccatatgaaattttaatgttaattaattaaaataaaatattcagttcctcagttgcaccagccacatttccagggctcaacagccactcgtagctagtggccaccctattggacactgcacatagggaatgtttccattgcaaaaatttctattggatgctgctgctctagatcctcaaaaatcttgctagcgccaaaccatcagaaattcacccacatatttgtaccatcttatttgtatcatctgctggccctctgctgtggaaatgctcttggctcatattgagggatgttaaaagaaacagctcaggagctctttcacagccttatgcccccaccgcctgctccctgctctcaagatcagtagttcttttctggtttcttctcttacagacacaaggaatcttgtaatcgatccttttctctcttcactttggctgctagaaagctgagagccaaaatctaagactaaataggatttcatggcactcattttgtgaaccaccctcagatctgattccatctttattatcttacccttattttccctttgcctcatagtccctattgttgcttacttcatctttcattttgtacctatcttaactgacttaaacacttaaacacattttacccttggttttgtagccggcttaattgacttaaacacctttcagcaataagataggatatagaaataattcacattgacaggatcccagttctaggagtgactcccttcgtgttgctgtgaggtgatcctaacgccaaacctctgtctcttctagaattacaatgagatctaagctttgactcctaagtcacttccctggggtagcctggccctactcctctccctccttcccaattcttcttaaacagggagaccaggagtgtggacatggggaggagggccccacgcagacctctagaagggagaggaacatgacacacacccctcactccagtctcctgttcccccaggatctctaccaccagtcctatgaatgcgtttgtgtcctcttcgcctcagtcccagacttcaaggagttctactctgaatccaacatcaatcatgagggcctagagtgtctgaggctgctcaatgagataattgctgattttgatgaggtgaaaattccaagagtctcccagaccctatgtcctagattctagaattttccaccagtacctccttccactttgcttttctggccatgaagtcaatcctcccctccacagtactccctcacctcctctgatcccccagatctacccactccagcaacactgcccaccaccaaccctctccttcctgacactatctccactcccacagcctgatcctttaactccaaaggcttggggctgggcttctgggagaggtgatggagagagtaagagagactggggacaggactcttctctatatacagctgctctccaagcccaagttcagtggggtggagaagatcaagaccatcggcagcacctacatggcagccacaggcttaaatgccacctctggacaggatgcacaacaggtacggcaacccttccttacctaccatcctcctctgggctctcattgatgggcttattagtgggacttattcctgtgccctcactggcccaccctggtgggcgggcccattgccaggatgctgaacggagctgcagccaccttggcactatggtggaatttgccgtggccctggggtctaagctggacgtcatcaacaagcattcattcaacaacttccgcctgcgagtgggtgagagacttcccctgctgcagcagtctggtacctcctcaccttcctgagcttgccccactccaagtcctttgttagctgct

SEQ ID NO: 12109 - DNA, 2300 bp, Homo sapien
gctaagtagctggtgttgtttcttgacaccttttgctaccgctggaccatgatccgcttggtgacgggcgtcttcccagatgctggcgtcaccgctagaccaaggagccctctggtggccctgtccaggcataacagaaggctcgcactcctgtcttctggtcacttctcactatgtcccctcagctcctatctctgtatggcctggtttttcctaggctatgattattgagtgaggattatcataatattggaataaaaagtaattgctacccactaatgattaatgatactcatatataatcatatctaagatctatatctggtataacaattcttgttttatattttattatactggaactgctcgtgtcctctgtctcttgcctcggtgcctgggtggcttgccacccacacaccatgtccataactccccagcctctactcaggagagtgccttcccctgacaccacaaaggcagttggaccccccacttcctcctgtctctgattctagggctgtgcacccatagcaccaggaaatgtctctgtttaactcaattcctgaaactgcatgctctcttcttcaaccccccaacactggggagtgggggaaggacactggcagcagtggttgcaggaagtacttaattccaagtgttaacatgaggtaggggagaggtcagagggttaagctggcaggaggaagaggaaggaagaagctgaggttcagctgactgttgcaggatgagacctccagcatgggtggagtggtgtgtggggactgctacaagcccagggactgtgagatggtgttaggtacaattacatagcaggaatgcctgccggggcccatgctagacctcctgccgctttccactggtgtgcaggctagggagtattagggtggaagagcaggaccctttgttcaagggtgtctcctgaggcaggaccttcactagcacagaaatccacttagcccctgaagttccaggggctcagtcaaatattagaaatcttgccaggcacggtggctcacacctgtaatcccagtactttgggaggatgaggcagatggatagcttgaggtcagtagtttgagaccagcccggccaacatggcgaaaccccatctctactaaaaatacaaaaatcagccaggcgtggtggtgcgtgcctgcaatcccagctactcaggaggctgaggcaagagaattgcttgaacctggaaggcggaggttgcagtgagctgagattgcaccaatgcactccagcctgggcaacaagagcgaaactccgttgcaaaaaaaaaaaaaaaaatccagccaggtacggtggctcatgcctataatcccagcactttgagaagccgaggcaggcggatcacctaaggtcagcagtttgagaccagcctgaccaacatggtgaaaccccatctctactaaaaatgcaaaaattagctgggcgtggtggcacatgcctgtaatcccagccacctggaaggctgaggcaggaaaatcggttgaacctgggaggtggaagttgtggtgagccgagatcatgccattgcactccagcctggtgacagagcaagattcagtcacacacacacacacacacacacacacacacacacacacacacaaagatcctgggagtctagagagtcagggggaaactttaaggagattcaaacctccccttcaagggcaggtgggatttgggagacagagaggtcattagaggcaaaagaaagagcccagtgaaatgcccaaggtcaaagacatgtatagagcatgcagtgtggctcatggtctacctcactgcagggaaaacacccaccatgcccacctccccctgtgctctcccaacaggagaagaccctggcttccttcagcacccagtggagcctggatcggtgaggaggcctcaaagtctttgccagtggggctgtctggatgaccccctccatcctccctgggggtctgctcctgctttgcccagacgctctgagggtctctgtggtgatggacttggctctcactgtgcaggagccgtaccccccggggactagatgatgaactggacaccggggatgccaagttcttccaggtcattgagcagctcaactcgcagaagtacggagaacaaagagggctgggggggccgcaggccctgaggtcatatggtggagaagggatggtgctccctgaggggctggagggaagactcgcctgaccaccccctcttgccctcactctgccctcttcctgcccttctgtgccctctgttctctggtgctt

SEQ ID NO: 12110 - DNA, 2300 bp, Homo sapien
tcggcttcccgcgccccgcccccaggtgtcctattttctcttcgtcatcttcacggcgtatgccatgctgcccttgggcatgcgggacgccgccgtcgcgggcctcgcctcctcactctcgcatctgctggtcctcgggctgtatcttgggccacagccggactcacggcctgcactgctgccgcaggtgagcacgcaagtagcacaggctgcgctcaggacggctctgccacgtgctagtaggctccttttagggggttgttgagctgtgactccaagtcaaggtgcaacgctgggcgcaggatacccaaccgtgctttcgcagagctggtacaacagtgtgatgcaatgcctgctgttaccagaagagggatccaggccacacggaagggagtcgtgtcgtggtttaccccggggacaacagatgtggttaatgaaaccttgacagagaatgaaaaaaaaaaaaaaaaagttttgtgcgatgggagtgggtagcgacagtggagtggtattccaagcacaagaaacctacctgcaaacgtttccagacctaagaggtcgtgttggtgaagcagccgagagtctggaggagggagcatctgggaagggaaacgtccctagggatgccacagtgtggcaccacttgtcccacaatagttaggtccctcactgtaaagcccagtcttccccagccagtctttgagaccaactccaactacacacgacaagcacccgggtcccgcgccctctgaggctggccttcacccacagttggcagcaaacgcagtgctgttcctgtgcgggaacgtggcaggagtgtaccacaaggcgctgatggagcgcgccctgcgggccacgttccgggaggcactcagctccctgcactcacgccggcggctggacaccgagaagaagcaccaggtcagccgggcctaggaaggtcagagcagcgctccgagggaggagttgcttagattacataacggggctcctccacaagttgagtgactctgggcaggtttcttgacctgtttcctcttttgtataaaatgtgggtattgcccatcttagaaggttgtgaggctcaaacaaaccaaagcttataaaaagcactttagagcattatgatattaagtgaactcccattcaggtgttgatactgggagtttagtcactaaaggtgatcagtgtaggatggagtgctggggccctgctgtgtgcagcgggaggacctgggggagcaccctggggagcacctaggatgggcagtgtgggctcctgagtgatttgggggacagggcctcctggctttagggtgcagaagagttggtgttcatggtgacctcttccaggaacaccttctcttgtccatccttcctgcctacctggcccgagagatgaaggcagagatcatggcacggctgcaggcaggacaggggtcacggccagagagcactaacaatttccacagcctctatgtcaagaggcaccagggagtcaggtatgaggaagaatggctggaggggaggggcctgtgggctaagaccctggccctgctgacacagtctgccctatgcagcgtgctgtatgctgacatcgtgggcttcacgcggctggccagcgagtgttcccctaaggagctggtgctcatgctcaatgagctctttggcaagttcgaccagattgccaaggtcagagaagacttccctccccacccagggaccctcaaacatcccatcctgggtagccccttccaagggaaactcccaccttataagatcccaggcccacttcagtgcatgcaggcccccagatattccagtggaaggaggaaaccctctcaaacattcccagtcatgaagctgctcaccacacacctcaaacctacagagatccctcaatatcgccacagatgtcccaagtacaatgccccaaacatgctcagagcccccacatatgtgtctctggacactacaaccaaatctatagagacgttctgatattctaaccttaggaggcccttccaagagaaatttctgccctatgcaacctcagcccagcaacctgcttagactccagggatgcctccaagcaaccaattcttggattccccccaacctctcaatcctgagaccactaccacgtactcaactctgggtacccccttcaacatgccaaaagtggaaagagccacagccatccagcccttggggaaactcttctgagaaagagatctgtatgaaagacagttagccccatatcaagtgaaaggagtccctagatctgatctagacactacc

SEQ ID NO: 12111 - DNA, 2300 bp, Homo sapien
agactccagagacctcaactttcagaaaccagatgcccagccctacctcaactggaacaccaagtcctggaccccgagggaatcaggtgagacattgacaggattaggggatgcactaagagtcctataaatgctgtccccttgccagcgaaaacttggggctgagaggagtgcagtgggagtgccaggctccagggcagaactggatgctctgtgctgtttgcagggggctgagagacaaggcatgaactggtcctgcaggaccccggagccaaatccagtaacaggtacccattctctacctctttcttttccctgttcaattcttccaccagactcctcctccagacctatatctagattcagggtactttgtggaggggaggggagaagatgatctaactcaaccttctcatttcataaatgggaaaaccgacaccccctgagaaaggagccctctgaggtcacacaacaaagcttggatttgtccctgaatcttctaactttccacaacaccagctctgtgagccccctaagttccattgtttcagcagtccagaggacctcccagcaaaaaagatcagggtctcaaatgtcaattgccactctctagagcttctgctaacacaattctggagaggagctctgaggggaggagcacagggcacaccttgacacagccactgacaagtagagacttcatactccccacccacccccaacttggcctttctgacagctaaaccctcctgccaccatcactatttctcttaaagggcgaccgctcgttaacatatacaactgctctggggtgcaagttggagacaacaactacttgactatgcaacagacaactgccttgcccacatggggcttggcaccttcgggcaaggggaggggcttgcagcaccccccaccagtaggttcgcaagaaggccctaaagatcctgaagcctggagcaggccacagggttggtataatcatagcgggaaataaagcaccttccaagcttgcctccaagagttacgagttaaggaagagtgccaccccttgaggcccctgacttccttctagggcagtctggcctgcccacaaactgactttgtgacctgtcccccaggagtcaataaacatgatggaatgctagtcagtctgagctcagccaggggcagggagggactgggatgggggtgggagctgccagtgagggatagggaggcaccacagctctgctatggcaggaagtggggatgctgggggctgggagtgggcaatggcctggcacacaaggtcagggcacagccggctacaacaggaaggaatcctagaggcctggttccccagaccactctctaatctcagggcagtgcttcctctaaagcctaggatggcgaccccaccctaaccctaaactctggggatagaggctgtggtcccttttcttccgggctctcaagactcacttgcagggctctggcgagggatgagttgatgtgaaagatcacagacctggccccgcacggtgcccccaggctcttagagatcatgacgccacatacctgcctccaccacacactcaggttgcttcctggacattgcttcccttttgattcccagttgctgttcgggagtggaaagctatggctcctaaagctatacacaggcgcaacccctcccacggagcatgaacagttcaaacccggtggtagtggttgccagccaagcggagaggtcaagagaatgagcgcccccaactctgacctagatccccaccaggacccacattcttccctacattctcgccaggcttcagccccccgccctcggtctccccactaccaaacgttcacctccatttggacacatcccattgggtccaccccagcccaccccttcgcatctctcccagggtccacattgcccttccctgaaggggctgaagcggggaggcgatggtgttaggagagacaaaaccaagtgcgggaggagaccaggggagtccggctttggcacaggaaggggccgggctgtcccgtcggggaagtgggagggggccgcggcgccgggagggaagcgcctgtcgcccgggactctgagccagagcgcagcggcgagcgtgactccgccatcaggtccccggctccctccccggacctagcccactccgctgcgccagcgccgcgggcagtgagttcggggatcaggggaacccggggctccctcgcaccaaccccaaatcctgccctcctggcgatgaggcttttctagggcacctctacaatccgggtttgagggagga

SEQ ID NO: 12112 - DNA, 2300 bp, Homo sapien
tgaacccgggaggcggaggttgcagtgagccaagaccacaccactgcactccagcctgggcaacagagcaagactccatctcaaaaaaaaatttcatttaatttaaaaaaagaaatacccaagtaggctccaaaagcatgggacatctgtggtcagaggcatcagtcctcagaaaagaccagagctcagaattccaagaatcagcctctgcctaggtccacccccatacccccttgctggaagctgagggtcctgttaggcacttagtctaaggttcttctccctgctcttccttcttttaaagaggctgtttattttgagtcaaaaagtagtataggccctgataccacacccaactttgtgcttcacagtggtttatccctcattctcagggtctcgtcacaatctgaagaaacccagttataacacctttccaaatcctttctgcctgttcccttcaagtggagatactgagcctgggttattctctctaaaaagaatcacaaagggagtggctgccccttttgatggctctcagcttctgactctaggcttttctgaggacctgctacacttcttgccttcttggattctgtgtgataccaccatatctctatactaaagcctacttcagatggatttcatgaactgtgcaggtgagagccctcagtccctacaggaacccaatcacctctttcctcctactgagtatggagctccatctaggatgatcagtgccttaagaaaggctcgatattttgggttgttcatttattcattcaattcaacaaatatttattgggtatctgccatgtattggcttttaaggagactacggttgaacaattccctaaatagttccaaaatagcatgaactgaccctgctagaagccatggtgtggctctccaagagttgttttagaaaaaactacagatcacttctgcctcaaccagcagagcccatggaccactgaacaaaatggaaagcaagtaccaaggtgagcacctttagtgagagccaacgcacaacccacaggattgagtatccctgtgaaggattgagtgcctagggcaggccctatcgggttcccacaacctccagtcatggtcagacctcagaaaggtaaaatatggacaccttttttctgccctaaatctttaagactctccatgcttctgggttatcaaaagactgtgtccagagcatgtgcttgtcaggaacattaattagggtatttgcatgcaagagttgtcatgcaagggagagggcaggaaagctctgaggtgtttccactgtagtgtacaccacaatgtcaccaaccctctggatgggctgataaatctagccttaccacaatgccctgggagtgggcttggggcctgccacctccaggagctcctgttcaaagggcatataagtccctatcaatgccaaagacttgcctcgcaagagcagctatagggactgggcaggaatacagatagggatccttcactacattgttggatgcttcacacctttcccagccacctgcacgaccagctgagtggtacagccctgaagcctatgtgaaaacaggataacttgatggttcagagccattatttccatatgggcttaggcaaggtacttaaactctcagtgtctcagtttcctcacctatagaaaggtaataaaagcagtacctatccccttagggttcgtgtgagaattaaataagctaatatatatacctggtgcatgataagttttatatacgtgttggctatgatcttagggcagctgtgagagagctgagccctagaaccataaaaccctcctaagcaccatctccactcatggcctggcaggtcgtggagcaggaaatcctgtgggaaaagggaaggctttgactgtaggagtgggttgattgtgggttcctggaaggtgaggactccttccctaacatcctcaatgcccagcaacacctaatctggctgcggcaggtgctcaggaaacgctagtcaaggagaaaggcactagctttcgctctgccccctgccccaccccaggggcgggactgtagaggcgcctataagggaagttgttcagtcaactcggaaaaagggtaacaacccggaaagtagactcaccgtcttggtctagagactgacccctgcacagacagaccccttcccctctctgcgaaaggaccaagccccagaagtcactccatctcctacggctcgcaatttccagaggccccctggcaccttccagcctgatgtcgtgcgtcaagttatggtgagtagggagtggc

SEQ ID NO: 12113 - DNA, 2300 bp, Homo sapien
cgagacagattggagggttttcagagtcaaggggatgcccccccgccccccgcctcagagaagcttggcactctgaacaatctcaaccactctcccctctgctcctcccttccctaccccccaacacccatgaaggggaaattgagtcatgggaggagaggccagagtcatcaggggaatgagggccgacgccagccctcagggccttccagatgctaggaggaggagggttctccaggaaaacaaacaggggtgagaggggaaggcggttggctgggcaggagctgagccagacacatggagaaacgctgcccaggatcaaaggaaatatgacatttgaaaagaatgtgtgcgtctgcatgtgctgtgcctgcggggagtggggccggggaggggcagagtctgggggaacaggggctgggcctcggggtctctatccctgcttttctcgcctccgcttcccacctcccttgccctcttaggtacaggctggttgatgggtcgaggtgttcctcgtcctccctccccgtgggtttctccttcctttatttccgagatgaagctggaagggaaatgtaacctgaggagaccaaccaaaggaaaaaaaagaaaaaaaaaagaaaaaaaaaaaaaagaaagaagaaaatcaaaccaggccgcttccccgctcggcctcggaacattcttctctccccgccggcctgggctcttctccccgcccctcctgtgttgcggccctgggctcggagccggggcagctccgcacgtcactggggtccccggggactgggggggtggtcccctgggcgggcccgagggaggaccgaggggagggagggaagccgcctcggccgctgcggagctccggcccgtcgggccagccctcccttctttccccagtcccgtagagcctgtttctcattagagtaacgggcgcggtccccgcccggcttctgagtgtttgtaaacgtctgacctggggccgtcgcttaaccgtttagttgctgggatggggcggcgttgggggtgcggccctgaaccggagggatttagagactggagacgcggcctctaagagaggttgaaactgtgtgtgtgtgggagaaaatgataaccaccctcccatctctcctacccgccagcctcgccagtatctcccaccgagtcacgaatctcccatctaactccctctcacacaacccaggcctctccaagcctgactttcccggaaactccagtccaggtcttccttcctcctccagcccaggtgacaggtgtccagcctgttgggggcgggggggccaaggagggggaagaggaggggaacccacagggtccggaggtttcaggcccctagtaaacctggcaaggatttttagaagagccggagtgggatgctatcgggtcagagattcattccagactacagttctagggaggaggctgccaacttcccgtggaggctaattcacggcccctctgggtggctgggacaagggcagcggcaaagcctggcctggatctacgcccatcaagggctgtgggcctagggacagttctcaaagcctctttggctcggactgctcccagaggcatccaggctggctaagcgttcttcatctttgggggtcctggaggaatggctgatggaggcgctgattcggcagcgcaaagacttccagaaggcccgggcagagtagccccaggcaagggaggcggaagaatagccttttcctcttccgagcaactcggtgccactctgcccccaggaccctcctggcctcaggcttggagggaaaggggaggagaagtggttctgccttgctaggtgctatctacacagtcttcagaatttaaaaaagggtcttccgtgggctctctaccctgggggcccaggatgtggcccctttaaggctctcggacccagaaccttgaactgagactaggggaggtgggggctgggctctctgcgggaaatgattgtcacaacggcggaccaataggcaacattagtatcactcttgaaggaccgttttccaattcagtttttttttttttgagggggagggactgaagagaggacagagggagggagggtgggggaggacgaggggcgcgtggttttcccatctcatccctggaggaggggctggagcatccccggcagccaatcagggacaggctgggggggggaccgctttgaagaagtttgggggaaaaaagtttggaaaagtttctataataacgagggggcttctggagggaggcggcagcgacggaggagggggcttctcagagaa

SEQ ID NO: 12114 - DNA, 2300 bp, Homo sapien
catcaagggctgtgggcctagggacagttctcaaagcctctttggctcggactgctcccagaggcatccaggctggctaagcgttcttcatctttgggggtcctggaggaatggctgatggaggcgctgattcggcagcgcaaagacttccagaaggcccgggcagagtagccccaggcaagggaggcggaagaatagccttttcctcttccgagcaactcggtgccactctgcccccaggaccctcctggcctcaggcttggagggaaaggggaggagaagtggttctgccttgctaggtgctatctacacagtcttcagaatttaaaaaagggtcttccgtgggctctctaccctgggggcccaggatgtggcccctttaaggctctcggacccagaaccttgaactgagactaggggaggtgggggctgggctctctgcgggaaatgattgtcacaacggcggaccaataggcaacattagtatcactcttgaaggaccgttttccaattcagtttttttttttttgagggggagggactgaagagaggacagagggagggagggtgggggaggacgaggggcgcgtggttttcccatctcatccctggaggaggggctggagcatccccggcagccaatcagggacaggctgggggggggaccgctttgaagaagtttgggggaaaaaagtttggaaaagtttctataataacgagggggcttctggagggaggcggcagcgacggaggagggggcttctcagagaaagggagggagggagccacccgggtgaagatacagcagcctcctgaactcccccctcccacccaggccgggacctgggggctcctgccggatccatgggggcggccagctgcgaggatgaggagctggaatttaagctggtgttcggggaggaaaaggaggcccccccgctgggcgcggggggattgggggaaggttagtgctgggctgggaaggggtcttggggtcagtgagaggagggccggggatcctgagtctggggaatttaaggcagcgagcctagggtggggggtgagggagtcagaggtcgaagggagtcggggggactcgttggcctgcggaagtgaggctgggggcccgggcaccactttctcctttttaggtcgtgactggggtgggggtgggggtgctgttggctgtgcgccgcctcccggctgggccgcctgtcactgaactggggggcgggcgggaactacggccccaacagcaccaggcgccgccaggggaaggggaggtttggcgctggagctggcccctggcggaccgagctctggcccggccgactggacgcccggggctgggggcgctgtcaggcctcgctggggcgcccctccccctcccccgtctggccgcaatgagaggcagatggcggggaccgagccgggggcggcggccgccgctcgcacgaatccgcgctgcccgctgccccccttcccccggctgggcccagcacgcatcaccccctcggctgcacctccgcccctagatggcgaggagagagggaggagccacctcccctcgtcaccacagccctgacgcccccctcccctctggccacggttgcgatggcaactggggctcctgccagcgccgtttgggggtttgggaaccgctgctaattgggttcatgtgtgagtcgcccccagtccagcccagtgcctcaagaaacacgcctccaggcccagccccagctccagcccctctggacccacctctctcaccttaagacccactggatcgggtaccctcggtcctaggatccaggggccagtgggcaaaggcctggcatgcctgcttcaatctcctccatcttcccaggtccaactctgcttttgtcttgtggctcagaaggtctctttgctgaggggcagggagcatagaaggacttgcggcctggccactcaaggaacatagccatctcacctgcttctctctttccccctctccctctgctcctcttcccattttgacagaactggactcagaggatgccccgccatgctgccgtctggccttgggagagccccctccctatggcgctgcacctatcggtattccccgacctccaccccctcggcctggcatgcattcgccaccgccgcgaccagccccctcacctggcacctgggagagccagcccgccaggtcggtgaggctgggaggaccaggagggggtgctgggggtgctgggggtggccgtgttctcgagtgtcccagcatccgcatcacctccatctctcccacgccggag

SEQ ID NO: 12115 - DNA, 2300 bp, Homo sapien
gccatctcagtgcccatattcttgctctccctctagttgaaatatccccatcagcagagaggccccatggagtcattctccatcacggtaccttgtcttatttccaggagagtagttccccttctctgaaatcatactctttctttcttcttcctcctgtattccatgggggcagggagatctccatcttactcaatgccatactcttagggcgtggctcatagtagacactcagtgaatacgtgttaaatttgttgaataagcgaatgaatttggtcctatgaatgaatttagatgaggaagcccatggagttcaagggacttagggacctgcctgagtccacattaactcatgtaactcatccagaactgagcatagctgggattaaaaccaggctagctaacaaaatctctacctccaggagaggcaggagctggggaatgggttagtaggaagggtgaggagaggatttctaggaagatgtggtgacacattggccagaactgaggtgggggagaagagacaagctcttgaaatggggaattaacatatattgggtatctactctgtgctaagcactgtacctggcgctttacatgtagtctgatttctaccctccgctgtatgtattattatcccaattttcatgagctaaagaaatagggacacaatagtttaaataaattgtctgcttttatccatttatacataacttgattcctaagattgacctcttctgaccctcaacatggcctctttgaacatagaattaaacccaggagttctccatgaagatgatcaccatgcctggggttcatggtctgatagaggagggcagtaagagttaagtattcattcagggaaggagtggggagcagggttatgtggctctcaccttgttttgtaagagaaactgaagcacaataaggcaggagactcttttgctaaaaggagagcagtcagaggtggaaagaaggcctgagatggagattcagcccaaaggccttctgcttcaaggtactagagaggggcaggacaggaggaccaggcagggtggagcagaaggctttggagccagaagtaacacagatcattttttccttttctggattccaatctagggagaagaatcaggtgtgcaggatgaagtagggtgtggtgggctgagtccagtccagaccaggagtagcgtgagcccctccctgcccccaattgggccccttccttgcagtggggtgctcctggtcccttgcctgcacacaaacacataacgaccctgcagaccagatgttccagggcaggcctaatttaaagtctgatgccttttgacctcataggtatacttgtgtctatcagactgtggctcttcgttttagtctgcaaaataagatcattgaggccgagacataggccctgccctccacagggccaggttctattcaggcccaaggctgtataaggtgttctttgtgctggggatgtgagcagagcctgggtgttgaaggtggtcccctagcccagggttagtcccagaccactgatgccaattggctgactggtcaggggttgcaggagacctcggaggttacattactgcccggaccctctatctccttcccctcacagcataactcaaacgtgctaaaaagggctttcataaacaactcaagtctgaaaactctggcagctctcccgcccctccagccctggggggcttcaggagggtctgggctgcccgccagctccaagctgtccctagacttcagtggggggtggggagtcagtgctgttaccctttccttcctgcttggtctccagcccagagtttccttaggccccggcctccctgggctccccaccctactctaccttaaccctttcctcccagggaaggagtggccgaggtccccgttctcttgggacgcctgggagaggctgttgggggtaggggggaggtgggggtaaaggggagagatccttgttccaaatctcaaaaaagggtgccggaaaccaatcctcccctccttcctcttccccgtccttccactagcaagaggggaacgtggaaggaaactaactttgacccctggattctggctctgggcccaaaacttgggtggaaggcagaggcctccgggaccctccccgccccctcctcccccccgccggctcccccgccctctcctccgcgcccctttaagctatccagcagacggagacagagttgatccaggaggggctggcagagtgctggagggggaaggctgggggcggagggaagggcggcaggagcccgacc

SEQ ID NO: 12116 - DNA, 2300 bp, Homo sapien
taccatgttcagtctagacaatacaccctccttccttcctcaccagccacagactccaggcccttcccacccttctgcctgtggctgagcctcccaccctagcccatacggtgctggttcagcttctgacggtgctggctgagatccgtgatgctggctttcctcacaggaagaagcctgcagggtacgctgaggcttgtccatctgggctcctgtgggggcctgtcaggctcacctgcgccacctgtccctgatcagcattgagcaggaagctggggtgggggaaccggaggagcagaggccgcaaagtagtgcagatcttccttcttgccaaaccttgccctgatcctagggctgcaggcaggaacagatgcagcaggtggctgggagggtaactgggggtgggtgggtggaaaggcctggtctggagatgccacagctctactcttctcttaaacttgggtgtttggcacagggtcccatgcaaagaggtgggataggagccagagggagtctctctcctgcctctgctgtttctggggcaagagagggcagaagaaagttgtcaggggctggattcttgtgcttgaaagacttgggtcctcagagagggaagatgaggaagccagagaaacttgagtatttccaaccacccagtagattcccccgacgcaggcgcagagacactcggtccccagggtccaagggcagtagcacagagctggtggctgcctcccgggtcacgtcaggatcattggcaaaggctgagatgacaggccacgtgttcagcatcaggctcacctggggaggggagcccagttagcccccattccccagcccttagctcaggaccccccactttcccaggagcttcctcttgggaagctgggttttaatgggctctcccgggagggctgaggggcggccagcattggactctgcacatcctccacactcaatgcaaggcaggcccattcctcccctggtcctggcctccaggacacaggtcaatggagagtccacccggaggtcagctgggctccccttcttccccctccccaccctcctgagccggggatgggggccagtgctgaggtcacctggacagtttggcggttgtacaccttcaccacatggaaccggaagctgtagacaccccggacaggggctacgaaggagccagaggcccggtcaaagccaccgccctcgttcaccaggacctgggggaagcagagcctgctgagtggggctcaggaaatgcccatggctcaggggtaccatggggactaggggcaggggcagtgagtaatgaatagaaggagtggcaagtaggagtgaataggagtgaacagattcaaaagaaatggtgagaaggggcaaggagagggctgcgtatgggtggagggaggggaaaccgtcggtggggtggtggggcaataggccagattagtgaaagatgtaggaagctgttttcttaaagcctcagagacagcaaagtgggcttggacagttgcttccaggtccttgcagggtctttccaggtcccctggacaggggtagggggattacctggtcgaagtagatggccccactggtgccattgccggtttcccctgctggctcatggtggtggcttcggaccgcagcaaatgccactcgcccagggggtgcctctcccagggctgctcccccgggcccccctgcagcagctcggccaggctcacagaccaccaggcactccccctccagcaggacgggctctgacccctcctgggcccacccggcccccagggccagaagcaccagaaccaagggcagcccgggactgtgtaggggacctggtagccagtgtggcttggctcccaacatggctgaggggctctgcaacccacaagtgccccggtcttctgcccctcttctgtttccgctcctctccctggattctcaccgccggcaccctgatcgtctgccctctctaggctcgctgaaccccctctccatacctgtgtcccagctctgtcctgcctcccactcttactcctgctgtcactgcagttccctcctccttggcagagcatgcagtgacagcagttgggctttgggagagaaaggagggatgaagccgcctgcccactggacgggagggctgcagccagagcttcagggcagccctgctggatgggacagcactgagggctggacctggggggatggagaacatggtatgtgtgtgtgacgggtgtgacagaatgtgtgagtgtgtgcatatgccagaggcagcccctcaaccccttcctcct

SEQ ID NO: 12117 - DNA, 2300 bp, Homo sapien
cgcagagacactcggtccccagggtccaagggcagtagcacagagctggtggctgcctcccgggtcacgtcaggatcattggcaaaggctgagatgacaggccacgtgttcagcatcaggctcacctggggaggggagcccagttagcccccattccccagcccttagctcaggaccccccactttcccaggagcttcctcttgggaagctgggttttaatgggctctcccgggagggctgaggggcggccagcattggactctgcacatcctccacactcaatgcaaggcaggcccattcctcccctggtcctggcctccaggacacaggtcaatggagagtccacccggaggtcagctgggctccccttcttccccctccccaccctcctgagccggggatgggggccagtgctgaggtcacctggacagtttggcggttgtacaccttcaccacatggaaccggaagctgtagacaccccggacaggggctacgaaggagccagaggcccggtcaaagccaccgccctcgttcaccaggacctgggggaagcagagcctgctgagtggggctcaggaaatgcccatggctcaggggtaccatggggactaggggcaggggcagtgagtaatgaatagaaggagtggcaagtaggagtgaataggagtgaacagattcaaaagaaatggtgagaaggggcaaggagagggctgcgtatgggtggagggaggggaaaccgtcggtggggtggtggggcaataggccagattagtgaaagatgtaggaagctgttttcttaaagcctcagagacagcaaagtgggcttggacagttgcttccaggtccttgcagggtctttccaggtcccctggacaggggtagggggattacctggtcgaagtagatggccccactggtgccattgccggtttcccctgctggctcatggtggtggcttcggaccgcagcaaatgccactcgcccagggggtgcctctcccagggctgctcccccgggcccccctgcagcagctcggccaggctcacagaccaccaggcactccccctccagcaggacgggctctgacccctcctgggcccacccggcccccagggccagaagcaccagaaccaagggcagcccgggactgtgtaggggacctggtagccagtgtggcttggctcccaacatggctgaggggctctgcaacccacaagtgccccggtcttctgcccctcttctgtttccgctcctctccctggattctcaccgccggcaccctgatcgtctgccctctctaggctcgctgaaccccctctccatacctgtgtcccagctctgtcctgcctcccactcttactcctgctgtcactgcagttccctcctccttggcagagcatgcagtgacagcagttgggctttgggagagaaaggagggatgaagccgcctgcccactggacgggagggctgcagccagagcttcagggcagccctgctggatgggacagcactgagggctggacctggggggatggagaacatggtatgtgtgtgtgacgggtgtgacagaatgtgtgagtgtgtgcatatgccagaggcagcccctcaaccccttcctcctactcttcctctcttcaaaatcccccacaaatcaacagcccttcttcgtggcatctttccgtttgttggaagaaaggggtactccaccacgggtaccctccgcctcccgcctcccgcctaccccctccgccacgattgctttggtggaaagtgcttgggcctagagcaccagtgggccagtcacgctgcctctttggtcggccacatctttattcgcgggaaacaactttcaacgcatggttcccctttccgagaagtaactgcgcagaatgcgcgaggaccctgagggccgggagacagacgggagggctggtgagaagcgcaaggggcgagccctggagccgccgaggggactaggccgagcgggcccgtcggggcctctgggcgcggcggcggggttgggaggagggcgcgcagccgggaggagctgggctgactccgccccaggccaggaagtgactcaagaaacagtttgcgtgcgatgtggacaagagaggtccccgctgggtgaggaacccgggaaggcccgcccagattcgggccccctgcccttgtcccctgggctgggggcgcgggcaaagcgggggcctggcgggcgctgagaggacctgaagccggcgcgggcggcggaggcggtaggcgcgcccctccaccgcgcccgggagcggggagcgggg

SEQ ID NO: 12118 - DNA, 2300 bp, Homo sapien
tgatcatcagtgagcctggcgccctgggcaccagatgggctgacgtgctccaggccaggcagtcaaggaagaagccctgggctcccagaaagatgcagtgcagtttgggcgggtagtggatttcatcctgcagttctgggctgcagaggcccttcaggtactcctggttgggaggaagggaaggtcaggaaaagtaaactaactggcccagatcacccctcctggctccttgctcgctcctgagctccaggatgtctggagtatccacatgatgttattcccattttagagataaggaaactgagactcccatcacaaagctggtacatgattgagccatcctggaaccccagcctaatcccaaaggaagcaatgtggcccagcctcccaccccacagtgcattccttggtggggccaacttgttcagccagatatctctattctcccaaagagcacagaatgatttttgccagcctgggccatcacagaagaaattaagctgaaactgaaaacaaatatagagttggaaagtccctcaaaactcaggggcactgaggttgccagtgagacaaccaagaagtggagatcctccccaggcccctcctcttccctgctctcctcggccctgctctcctccgccctgggggaaagcgtccttggtgcctggagggatgggggagagaaggcgttcaccttggctctgctggcgttttccttggggccctccagctgcagccagatgtgggggttgtccggacagtccttcggaaggacgctcacccccacgctgaagatgcgctccacatggggctgctgttcccgaaccttgttctcagcctccgcagacaccgcaaagcgatctggggacgcggggcgggccccccaggtaggcatggctgctgcccccagccctggaaggggagaaggcagctcagagcctcattgtaccctccatccaaatcctggttcctgggactacaccagctatcaacaggtcgcacctagttaaggctctggtaaacagccccaggaggtgacaagcatctgagtccactggaggtagggagggtgtatgtcacgcaggcctctccggagaggaagtcccggtaaacaaggctgtctatcgagagtgggcgtctgggctttggaaaaggatgaccacagtccggagcaagaagggtgggggggctccagctcggcctggaggccagaaggagtctcctggggcactctgaagcttcttaaggacgaatcctcagcaggggattgaactaggctgtcctctgggggccctggtctgccatttccaaggttcaagccactcccacccctcccccagccgtccgctgcccctctccgtcgggccaggagcaccgcccagggcccaggggccgggccgggccgggcccgcccaccgcggactggggcagccaccccgggccgggcctactccgcaccgcggcccccgctccccgctcccgggcgcggtggaggggcgcgcctaccgcctccgccgcccgcgccggcttcaggtcctctcagcgcccgccaggcccccgctttgcccgcgcccccagcccaggggacaagggcagggggcccgaatctgggcgggccttcccgggttcctcacccagcggggacctctcttgtccacatcgcacgcaaactgtttcttgagtcacttcctggcctggggcggagtcagcccagctcctcccggctgcgcgccctcctcccaaccccgccgccgcgcccagaggccccgacgggcccgctcggcctagtcccctcggcggctccagggctcgccccttgcgcttctcaccagccctcccgtctgtctcccggccctcagggtcctcgcgcattctgcgcagttacttctcggaaaggggaaccatgcgttgaaagttgtttcccgcgaataaagatgtggccgaccaaagaggcagcgtgactggcccactggtgctctaggcccaagcactttccaccaaagcaatcgtggcggagggggtaggcgggaggcgggaggcggagggtacccgtggtggagtacccctttcttccaacaaacggaaagatgccacgaagaagggctgttgatttgtgggggattttgaagagaggaagagtaggaggaaggggttgaggggctgcctctggcatatgcacacactcacacattctgtcacacccgtcacacacacataccatgttctccatccccccaggtccagccctcagtgctgtcccatccagcagggctgccctgaagctctggctgcagccctcc

SEQ ID NO: 12119 - DNA, 2300 bp, Homo sapien
gaagtgactcaagaaacagtttgcgtgcgatgtggacaagagaggtccccgctgggtgaggaacccgggaaggcccgcccagattcgggccccctgcccttgtcccctgggctgggggcgcgggcaaagcgggggcctggcgggcgctgagaggacctgaagccggcgcgggcggcggaggcggtaggcgcgcccctccaccgcgcccgggagcggggagcgggggccgcggtgcggagtaggcccggcccggggtggctgccccagtccgcggtgggcgggcccggcccggcccggcccctgggccctgggcggtgctcctggcccgacggagaggggcagcggacggctgggggaggggtgggagtggcttgaaccttggaaatggcagaccagggcccccagaggacagcctagttcaatcccctgctgaggattcgtccttaagaagcttcagagtgccccaggagactccttctggcctccaggccgagctggagcccccccacccttcttgctccggactgtggtcatccttttccaaagcccagacgcccactctcgatagacagccttgtttaccgggacttcctctccggagaggcctgcgtgacatacaccctccctacctccagtggactcagatgcttgtcacctcctggggctgtttaccagagccttaactaggtgcgacctgttgatagctggtgtagtcccaggaaccaggatttggatggagggtacaatgaggctctgagctgccttctccccttccagggctgggggcagcagccatgcctacctggggggcccgccccgcgtccccagatcgctttgcggtgtctgcggaggctgagaacaaggttcgggaacagcagccccatgtggagcgcatcttcagcgtgggggtgagcgtccttccgaaggactgtccggacaacccccacatctggctgcagctggagggccccaaggaaaacgccagcagagccaaggtgaacgccttctctcccccatccctccaggcaccaaggacgctttcccccagggcggaggagagcagggccgaggagagcagggaagaggaggggcctggggaggatctccacttcttggttgtctcactggcaacctcagtgcccctgagttttgagggactttccaactctatatttgttttcagtttcagcttaatttcttctgtgatggcccaggctggcaaaaatcattctgtgctctttgggagaatagagatatctggctgaacaagttggccccaccaaggaatgcactgtggggtgggaggctgggccacattgcttcctttgggattaggctggggttccaggatggctcaatcatgtaccagctttgtgatgggagtctcagtttccttatctctaaaatgggaataacatcatgtggatactccagacatcctggagctcaggagcgagcaaggagccaggaggggtgatctgggccagttagtttacttttcctgaccttcccttcctcccaaccaggagtacctgaagggcctctgcagcccagaactgcaggatgaaatccactacccgcccaaactgcactgcatctttctgggagcccagggcttcttccttgactgcctggcctggagcacgtcagcccatctggtgcccagggcgccaggctcactgatgatcagtggcctgactgaagcctttgtcatggctcagagccgggtagaagagctggcagagcggctgagctgggacttcacgccaggaccatcttccggagcctctcagtgtactggagtgctgagagacttctctgccctgctgcagtccccgggggatgcccatagagaggctctgttgcagttgcccctggctgtccaggaggagctgctgagtctggtgcaggaggcgtctagtgggcaggggccaggagcactggcttcttgggaggggcggagctcagccttgctgggtgctcagtgccaaggagtgagagctccccctagtgacggcagggagtccctggacactggatctatgggacccggagattgcaggggagcaaggggagacacttacgctgtggagaaggagggagggaaacagggtggtcccagggagatggattgggggtggaaggagttgcctggggaagaggcgtgggagagagaagtggccctcaggccacagtcagtgggtggaggggcaagggagtcagcacccctgaaagggaaggccctggggaaggaggagatagctctgggaggaggagggttctgtgtccaccgtgagcct

SEQ ID NO: 12120 - DNA, 2300 bp, Homo sapien
tcccctcctgggctgtcttcatcatactccgcagtcagactgggctggtagtaagctgccggtggaacacaatcatttgccctgggtgtccttggtcctgcctggctctctgtagtggaggctccccttggcctcaccttctctggcccttaggatctccccatttggagacagagccatttggatattttccccttgaacttctccatgacctgaagcgttccttccctggaggaactctggttgcagggctaaacttagaggctgctagagtgtagtggttaagaacaggaacttgggtaccaggcgcctgaattttaatcagctccctcatttattaactctctgacttgatgcaagttacttaacctctctgtatagaattttcacatctttaaaatgggaataatagtacctacctcatagggttgttgtaaggaataaatgataataagcataaaacacttcaaatagtggctggtgtgtataattgtttgcaattacttggtcccaaaggtgaccaggaactctgttcctaaagaactatggtgtgagaagtaagggactttgggataggtggacttttccctggcattgagtgatgccactccccactgttttttcagggtctcaatttcttagtgaaagtacacaaaggttaggagaaacatgcatggatcaagggcctaggaagtcattttgcctggaaaagaccagtgctctggtgtgtgcatagctacagaggtctgagttaccccgttcccctggcgaatataaggggctggtgatttggggggcgtacctacacctgtgactaagacccaggccttggggggttgtggggctttggtgatggctttagccagcaattgggtggtctctaggcggctgccgattacctctttttggaaggtttcattccatctgcaggagaaacatgggaaataaaaagccactaaatacataagtgcacatatccctctctctgtcttttcctgggagctatttcataccaatttcttgtaaagccctgaatttcggcttaagagaaacagtcaacgtctcctgtagagggaaagggcattcatttcctgggcatcctgagttatacgtgaggacttaagccaattggctgactgggtggaggagcaggtgggggtggaggagtggagcagaatgagtagtctgggatatcggtttagttcggaatctgggagctccattacccatagctcacaggttctcatcagtggggcactgtcctccctgtgctctagtgggtatcagctttagggcccgggctgaccttcggagagggttgaggatgttctctccggccaggttgacggcggcatcgcagctcggcagccccgatgcagcgagctcatcctgtcggagaaagcacacagtgcccctgccccgccctgcgccgcccaactctgccctcccacccgcttccagaggatggacttacccacgtgatccggccgggcccgggctttcgggagaccaacgtcacttcgtggcctctggcattcagcagctgggttagggctgtcccaatgaagcctgtcccgccacctgatcggaaaatacaaattgtttatattcccgtggagttggggtgggggcgccttccgtccccgctgtggcaccctcttccggcgccatcccatctgacaccaggcttctccccacttatccccctcctcgcgatgcagaggtgacacaggtcacagggattagggagattcggcttctcgggctaggaggccaaggccaggttgcctgtgcactagacagtgccctcccggaagcggattcccagtcctcaatctccgactaagcccgcccagcactctccctttctgccctccctcacccacaagcacacgcatagcgactaggacctaacgcgcctgcgtaaagtttagagtttacctcacctcagacgcgactacgacctctctgcgcatgcccctttcgggaagcgcgttccaatcgaggtcgcaatcctgtgcgtgacccttctcggcgacccggaaaaacttgtaaatataggctgggtgtttcaatagcaagcgaggtgggagggattagaccgatggacccggaaagggcggaggagggaaggctttagtgtagaaaaccaaccaaaccaaacccaaaccaacaaaacccttcacctaaaacccgaagctacccagacctcagaattttggatgtctattaagttggcgggtcagtaatgcaagagaacccttccaccggtaatctggatttctttccactcggccagt

SEQ ID NO: 12121 - DNA, 2300 bp, Homo sapien
cactgtaacttttcagtcagaattgtgtaaactgacccaactgagatgtctatggtgttggctattgtttctgctgttgtcagttctcttcaattagggcacaaacaagatgaatttttttcctcacaaagtgatgtggatagtctgccactatctgtatcttcaacatcatctcctcccctttttgttgagacaggttctcactctgttacccaggctgcagcacggtggtgcaatcatagctcactgcaaccttgaactgctgggctcaagcaatcctcctgcctcagcctcccaagacgctggaactacaggtgtgcaccaccacacttggctaatttttaaatttttagtgagatgaggtctcgctatgttgcccaggctggtctcaaactcctgggcttgagagaggctcgtgcataatcctcccaaagtgctgggattacaggcatgagccaccatgcttgtccatctcctcgtttcttaaaatgagttatgcatttgtagactgatgatttatttggggcattgtcctcataaacttttcataaggcatcaatttcatcattcttcaccagaaactccatgtttgttcttgcttcaattttagcagaattcaggttgctttgataggggctcttttcaaactgtctagccttcttagtgcgtcagatcctgttcagacatgttatataacaagttagtacaagtttattttggtgtaaaaaaaatttggggccgggcgcggtggctcacgcctgtaatcccagcactttgggaggccgaggcgggcggatcacgaggtcaggagatcgagaccatcccggctaaaacggtgaaaccccgtctctactaaaaatacaaaaaattagccggacgtagtggcaggcgcctgtagtcccagctacttgggaggctgaggcaggagaatggcgtgaacccgggaggcggagcttgcagtgagccgagatcccgccactgcactccagcctgggcgacagagcgagactccgtctcaaaaaaaaaaaaaaaaaaaaaaaaaaaaaaaaaaaaaattggaaacctatgtattttttagcataatacacattttccatgaacttttcaaagacccctcttagataaatctgggagagattcagtatttaaaatcaacagggtttcagacgtccaagaagagatgtgtagtgaaaagtttttataggggttaggagctcagaggagagatccgagttgcataggagatttgggatgtcttctgttaaagcctggtaactgaattcaaggcatagatgcctagggtaaagtgcagattggaaagagaaggtcctaggatccagctctgaggaataccaatattttaagaacttagcagaggtggagcaagcatcagagactgaaaaaaggtacgagaaagccgagaagagaatgtctttcactgaagccaaacattttcaaagggaggaaggaatcagcaggtgcccattgatactgagaggtcaagaaaactaactgaaaactagggattagatttggtgacacatgggaaacttatgttcttggagagtgaggaaatgaatgataaaggcacaaaccctataggagtgaagtaagaagtagaaaatggaaaccacacttgtgggaagtttggctatgaaggcaaaaaaaaaaaagaatattagctggaggaaaaacaggtctggagaaggcttattttaatatagggggatctttggaatgtttaaatgttgatagaaaggctccagcggaaagagagagaagaaaaaactggccgagtggaaagaaatccagattaccggtggaagggttctcttgcattactgacccgccaacttaatagacatccaaaattctgaggtctgggtagcttcgggttttaggtgaagggttttgttggtttgggtttggtttggttggttttctacactaaagccttccctcctccgccctttccgggtccatcggtctaatccctcccacctcgcttgctattgaaacacccagcctatatttacaagtttttccgggtcgccgagaagggtcacgcacaggattgcgacctcgattggaacgcgcttcccgaaaggggcatgcgcagagaggtcgtagtcgcgtctgaggtgaggtaaactctaaactttacgcaggcgcgttaggtcctagtcgctatgcgtgtgcttgtgggtgagggagggcagaaagggagagtgctgggcgggcttagtcggagattgaggactgggaatccgcttccgggagggcactgtctagtgcacagg

SEQ ID NO: 12122 - DNA, 2300 bp, Homo sapien
tcccaacttgataactgtaccctaaaccataaagttcactaccaacatgctatatataaaataaccaaagggggaagaagaaagagaaaaaggaaatctcttaaaatacacaggtatacatatgacaaagcaaagaaggaaatgtgagcagatagcgcagtcctcgtttctgaaattggtcccctgactggggctatacctattccatttcctcaccctcagccaggcaggtggagcaaaacttaagtcttggtggatctgaatcttgatgctgtggagctgtcttactagccccagactacctgcctctcaatttctaattatatcagtgaaagcaaacagctttgatttgtttaagcctctgattttttggtctaactgatgtaagaccacaagacaagagttctccagctccggattctcttctgttctgttaatggtgaaatgcccagagaagagttgccaactttggcaaataaaaaatacaggattccagttaaattcaaattttagataaacaacaattttttagtattagtgtgtcccattcaatatttggacatacttaactaaaaaatgatttgttgttcatctgaaatacaaatttaactgggcattctgaatattctctggcaacccccgagagagtgaagaaagtggtacaaggacacttaagaagaccagatttgaaaagacattacggatgtgtttaaatgtcttattctagagagagttagagctgtaggtagaacttgggaaattaagttaaaagcaacagaggacctggccaatatatactaaggagtggatcactctggtcacaagcccaacctgagaccaagggcatagtgagatgatttgggaaaggcacttatacactactcatccccgtctttgaactaaatgccttataaatctccaagagaaatgacagtccaccatgtggactgctttctgtaagtccagggaaaataaaagctatgtgcttgaaacccacttctgatattataaggtgtgtgatctttgtcatgttaatgggtctgagtatcaattctacaattgtaaagtgacagtaatggtgtgtccccaggttgttgtggaaagcttgattcttaatgcaacagtaggaaaccccaacctctctggagcaaacacccttctacatctttacttcccctgcacattggcaggactctattcctctatttctctctagtgctagagcagaaagggaccttgatttgatatcaggaaaatctatttctgaaccataagctatgatagctgatttaaaaaattgactatcatgacatgataatgatcataatggtaatacatattgatagggttgccgtgaaagtaataatatatctaagagttgtgacaatatatgatacacctagactctcagaaaatgctaattccaatcccaattgctctttgcataaagttctgtcctagggtctgttcttttcccacatctaccctccttggatctctcttctgtcaaaaacatgtggttcagaggaggagagagatccaggtcaatgtttttcaaattacaaggaattatcatttaaatggggttgttgctcaagttttgacgtgtagtggaatggagtggagtggagtggaatggaaactaacagaaaacactgcacatggttaagataaagattgtttcctgaaacctttaatttgtgcttacatactcacacatacatatgtgcatgcactgggactctgcaatatgcatttctgactatggaacatagccataaaagtctttgcactgaacgttcagtgggcctttcacaagctgccctaattgggaaagaaaaacatggtccctccatttcctgcccccaactccagaaaagtcaccatagttgagggtacatctgagaagccagcacttgggagttcagggctcaagttcctttctagaaaaacactgggtgattctaggggaacttctgatcagaaacagccaattcagagtgagagaagaaaacgtgaccatgcagttcctgtggttaccagccttgcccctctcttgccttctgggagttataaaacccaagactggaaaggaaaaccagcatttgctcaggcagcctctctgggaagatgctgcttcttcctctccccctgctgctctttctcttgtgctccagagctgaagctggtgagtatcagggttcttccctctgaaatctgcagtatcagctcctgaaacaaagatgtttagtctgaaaatagctgactcctaaacagggttccaagatctctcttcaaga

SEQ ID NO: 12123 - DNA, 2300 bp, Homo sapien
ttcttcttcacgttacttttcagatgcataaagacgttttatagagcctgtacaagagaagaggttaagctctgtgcagctctaaaaataagtgaaaaaattatatatttatgtataaggaaaggaaccctaattttcatgagattttcaagagggcctattatactccataaagactgggaattgtatctcacaccaatcagaatggctattactaaacagccaaaaaataacagatgctggcaaagttgcagacaaaagagaacacttatacactgttggtgggagcagttcaaccattgtggaaagcagtatggtgattcttcaaagagctaaaagcagaactaccattcgatccagcaatcccatcactggatatttacccagaggaatataaatcattctaccataaagacacatgcacgcaaatgttcacggcagcactattcacaaaagcaaagacacggaatcaatctaactgcccgtcaatagaccagataaggaaaatgtggtacatatacattgtggtacatatacatatgcagtcataaaaaagaatggactcatgacctttgcagggacatgggtggagcaggaggctattagcaaactaatgcaggaaaccaaataatacatgttagttagcaaactaatgcaggaaaccaaataatacatgttctcacttataagtgggagctaaatgataagaactgtgaacacaaagaagaaaacaacagacagtggggtaagaggagggagaggagcagaaaagataactattgagtgctgggcttaatatctgggtgataaatatgtacaacaaatccccgtaacatgtgtttacctatgtaacaaaccttcacatgtacccccaaacctaaaataaaagttaaaaataaatacctaagtaaaagattttcaaaataaaagacagaaaaaaagagattgggaattgtattagtcttcaattctgctatttctgcaaaaattatactggattataacggttttctgtgcatacacagaatcttctaaatattttaagtgtttttaataatccattgtgttactctgcagtaatttgctgttcttttctcccattgttgagtatgcggctctaattcttttataggtagcacagcaatgaatgtacctccttctcagaagcttttgctcctgggattaggttgatgggcctctaatgtcaccagtgaaatgggatattagatattttccagctaggatacgacagctcccaataaaaccaaattactaagccttttctgcaagcaaggagccgtctggaacataaggactttaaccttgggtaggagacaggcaagcagaagtcttcaattgtgtcacaattttcactgaggactcaagtgacctaagaaagtaattgtgattgtcagagccttgttcttccttttctttctccagccgcacgcttcacctactcaggagagtgcctacgcaatctgacttgacagcttctagaaagaaattagagcaacaggggtctcagcagggtggtcttgggccaaacactgaaagcaggcaggcttaccctttcctcttctgcccccttcaactttttcctgatgttcttacccacatccctcaccacaccacaccctttcattcatccttgtcccagacttattaagtatatacagataagcaatccagggaacttgcattcattaggagaaacccagaaattcaaaagcaataatgatctaatcccagaggagtagaaaacaggaagtgggcagctgccagctttcttgctttgctggagtattctggaatttgatgggttgagggttctggacacaatgccccaagccccttccttgttgtgctgggttcctatttctgctctcggcactgacttagcagctgctcaagagctcactatgttggcttggattacacggtctcacccacatctccggcagtttgtgggcaaacttcctgagcagccttgggtgatgaaacctttcatggtagcaggagaatgggactgtgaattctcaatcccctgtccccaccccttccttcctctctcagggccttaaagtctaggaggaggaagcacagcagcaactgactgggcagcctttcaggaaagatgcagccactcctgcttctgctggcctttctcctacccactggggctgaggcaggtgagtgaccatccccaccctcagaggcctgacctcatcccatagattcttgagccaaattgccttggtatatcctaattctgtactgttgagcaagttatttgaatt

SEQ ID NO: 12124 - DNA, 2300 bp, Homo sapien
attgttatttgtgaatttgatcctgtcatgatattagctggtcgttttgctcgttagttgatgcagttccttcctagcctcgatggtctttacaatttggcatgtttttgcagtgactggtactggttgttcctttccatgtttagtgcttccttcaggagctcttttaaggcaggcctggtggtgacaaaatctctcagcatttgtttatctgtaaagtattttatttctccttcacttatgatgcttagtttggctggatatgaaattctgggttgaaaattcttttctttaagaatgttgaatattggcccccactgtcttctggcttgtagagtttctgccgagatcaactgtttgtctcatgggcttccctttgtgggtaacccgacctttctctctggctgttcttgacattttttccttcatttcaactttggtggatctgacaattatgtgtcttggagttgctcttctcatttagtatctttgtgacgttctctgtatttcctgaatttgaatgttggcctgccttgctagattgggaaagttctcctggataatatcctgcagagtgttttccaacttggttccattctccccgtcactttcaggtacaccaatccgtcgtagattggtcttttcacatagtcccatatttcttggaggctttttttatttccttttattcttttttctctaaacttctcttctcgcttcatttcatttatttgatcttccatcaatgataccctttcttccagttgatcgaatcggctactgaggcttgtgcattcatcatgtagttctcgtgctgtggttttcagctccatcaggtcctttaaggacttctctgcattggttattctagttagccattcgtctaatcttttttcaaggtttttaacttctttgccataggtttgaacttcctcctttagcttggagtagtttgatcatctgaagccttcttctctcaactcatcaaactcattttccatccagctttgttccattgctggtgaggagctgtgttcctttggaggaggagaggcactcttatttttagaattttcagtttttctgctctgttttttccccatctttgtggttttatctaccttttgtctttgatgatggtgatgtacagatggggttttggtgtggatgtcctttttctttgttggttttcctcctaacagtcaggaccctcagctgcaggtctgttggagtttgctagaggtccaatccagaccctgtttgccttggtatcagcagcagaggctgcagaacggcggatattggtgaacagcaaatgttgctgcctgatcgcccctccggaagttttgtctcagaggagtacctgactgtgtgaggtgtcagtctgcccctactagggggtgcctcccagttaggctactcaggggtcagggacccacttgaggaggtagtctgtctgttctcagatctccagctgcgtcctgggataaccactactctcttcaaagctgtcagacagggacatttaagtctgcagagttttctgctgccttttgtttggctatgccctgcccccagaggtggagtctacagaggcaggtaggcctccttgagctgcggtggggtccatccagatcgagcttcctggctgctttgtttacctactcaagcctcagcaatggcggtcgcccctcccctagccttgctgctgccttgcagtttgatctcagactgctgtgctagtaatgagtgaggctccatgggcataggaccctccaagccaggcacaggatataatctcctggtgtgccatttgctaagaccattggaaaagtgcagtattagggtgggagtgacccgattttccaggtgccgtctgtcacccctttccttggctaggaaaaggaattccctgagcccttgcatttcctgggtgaggcgatgccttgccctgcttcagctcatgctcggtgcactgcacccactgtcctgcacccactgtccgacactccccagtgagatgaacctggtacctcagttgggaatgcagaaatcacctgtcttctgcattgctcacactgggagctgtagactggagctgttcctattcggccatcttggctccacctccgcaagcaatccagctttgttctttttgctcaggattgctttggctattcaggatctttaatggttccatataaattttaggatttttttctatacctgtgaagaatgtcattgacattttgataggaattgcatggaattcatatatagggatcgcttcgggtaatatg

SEQ ID NO: 12125 - DNA, 2300 bp, Homo sapien
acagagttctatatcacctccaaaagatcacactagctccccagcaatggatccaaaccaagaagaaatctctgaattgccagataaacaatccagaagatcattaagctactcaaggagataccagagaaaggtgaaaaaacaactttaaaaattaaaaaatatatatatacataaatataggatatgggtgaaaaattccccagagaaatagatatcataaagaaaaaataatcacaacttctggaaatgaaagccatgcttagagaaatacaaaatccactggaaagtttcaacactagactagaacaagcggaagaaaaaacttcagagcgcaaagacaatgctttcaaattaacccaatcaaacaaagactaagaaaaaataatttttaaaaaatgaacaaagcctccaagaaatgtgggattatgttaaacagtcaaacctaagaataattggtgttcctgaggaagaagagaaatctaaaagcttgaaaaccttatttgaggaaataattgaagaaaactcccctgtccttgctagatacctagacatccaaatacaagaagctcaaagaacacctggaaaattcatcacaaaaaagtctatcacctaaagtcctatcccagttctgttaaagtaatagcaggaatagcaccttataaatacctagaaaaatagtagaaggaaacatgcttaagcattaataatgatctccggtggtagaatttttggtaagtttaattttatcatttacatgttcctacttaactatacatatatatttatatatattcatatacataaatatacaaacatatgtatatatacacatttttgtttatggacagcctatgactgtgagccaagggacatcagagacatggctctctggaaactgagagaatacttagtggacagttttttgtttgtttgtttgtttgtttttgagatggagtctcgctctgtcacccaggctggagtgcagtggcgcgatctcagctcactgcaagctccacctgggttgacgccattctcctgcctccgcctcccaagtagctggaactacaggagcccgccaccacgcccggctaattttttgtatttttagtagagatggggtttcaccatgttaaccaggatggtctcgatctcctgacctcgtgatccacccgtcttggcctcccaaagtgctaggattacaggcatgagccaccgcgcccggccttagtgaacaattattatcaggatgatcagcatccatttttccatcacctggcaacaacaactagcatttctcaagggaaatcccctcctcattcataagcaccatagatggagtggaacagtccccacctcagcttaaggagggctaaataaccaaagcataaagcaatcagtccactacacttcagtggacccaatgatgactcattttggttcaataaatatcaagtccagaacttttgtgcagaactgtggaataaaaaaagttatctttgtcacagaatatttatatttaaagaggggattctaaatatcccaaaaatatgaatctgagatagtggtaagataggaatgggttgccatttgcagtatttgttgggtgtgtgcaactctgcatactgctaaggcaagtccagcctccgtctcacaccaacaggcagatttccccaccacggcccttaccatcttgtgctctaaccccagattttcagtctactcttgctaaccatcaattcttcaagggcaagagccatgtctctcatatccctggatctggcttgctaaataattattcatgattttatctgagtagaaaaagagccaagaactgagaaaaggagacattcttggttctcagtcactgaggagcttctgcagtaccagcctttctgctagctgcagccacagcttcaacagctccacctccttgttctttattcttgctttcaccttgttactcagcagcaggggtgtaaatgtgacagtgccatgtcaacttaaaccaaaccagataattttaataaaccaccttctataatgacacccatcaaaaccagaaggggacaagtctaggaggtctctgagtttactgtacccatccctccttcatctccctccagcatttgtttctggaaggagtcaacaccaacagctctgacctgggcagccttcctgagaaaatgcagccattcctcctcctgttggcctttcttctgacccctggggctgggacaggtaagtgactatccctattccagaggcctgaacccatcttataagataccctgtaccca

SEQ ID NO: 12126 - DNA, 2300 bp, Homo sapien
gtggttccttaaaaaattaaaaataggattattgtataactcagaaattccaaaagtatatatatttggtatatatccaaaagaactgaaaacatattgttcatgcagaaatttgtacacaaatgcttattattgctgcattagctacaatagccaaaagatgaaaacaacccaaatgtccattgacagatgaacaaataacttgtggtataaacatacaatgggaatattatttttccattaaaaagaacgaatactggcatgtgctacagcttgtatgaatctcagaaacattattacaagtgaatgtagccagccacaacaggtcatgtattgtgtgattccgtttatatgaaatatccagaggtggtggttgcagattttgaatgtgctaaatgtcactgaattgaatactttaaaatggttaattgtatgttatgtgaattttacctcaattttttaaatgggtcataaacttatgtttagcataatccccttttaattttaaaaaatgcagatattacatgagaaaaaatgtgctagagcatatttcaagacattaaagatggttatcagtgaatgatgagaaattaggtaatgtttattattttcgctttgctaaaattatttaaaaattacttgcatattaaattttttaatgcctaggaaagaaagactatagttgtattgactaagatttctacgagcatggggaaaatgcttaatttgtagggttaatcaaggataaaataaattgcattgtatgtacaatgtgatcccaagtatttaaaacacactgcttatggtaacagtcagtctgtgggagacaggttaaaaagtgatattttcccttcctactttccaaattttcttaacaaacatatattatgactataatcagaaaaaattatttttaaaacgtctactatggggcaagctaggttcaaaaaatagaagtttgataaatgtagttggcttgctattgacaaggaagacgtttacactggaattctatattttgagatataccattcctcatagaaaaatttcctcacagaaaatataaaggtggaaacaaatcacaagaatcgaaccatgtagagagacttagttgtcttttaacagaattgggcacgggctgttcagaaacaacaatctttcacatccattataatgatagcattagtgtagtttgtttagcaaatgtttactgtgagcctgttatgtgctgagcctgctatgtaagaagtgtggctctctggacaggagacagaatactaaacaacacaactactgatctttggctgcctggcatgcttcctcacttcatatggtatcagcaatttagcaccacaaacgtcctttagagaaccagccctttctcattcttggttctagtggcttgagtagactgaccccagcctacccaaagtggatttgactcctagcaattcattaatctagcccaataaaatgtcaagtacaggacttttattgaaagcattcagaaaagaggtggactctcacactaaacatttgtaactaaataagggatgttagaaattctctagaaaggaagctatgataataaatgggttgctagatgggtctagtagatggtggccatgctttgttactgccttgtgtattgtgctaccatagccctccccaaactgtactctggctcctggcatttccgtctcttcaaccagatggtcagctctctaagtgaaggagacacatctccaacatgcttggttctagcacaacagaagggctcaaacacatacctgctaaagaaactatcctgatggatttagcagcatggccatgaggcattggcggttctatcactgggaactcaggtttctggtgctccagtacctctactggctgataccacatcctacaattcacttcataggcttgggttcctgctctgggctgaataggtggtccactctgagtcatcagctgtgggtgatgatgtggtcactgcatgattctcacacaagcacccagaggacgtcatcaggcagaggcagtgggggtgggcagcatttacagaaaatctgtgatgagacaccacaaaaccagaggggaacatgaagtcactgagcctgctccacctctttcctctcccaagagctaaaagagagcaaggaggaaacaacagcagctccaaccagggcagccttcctgagaagatgcaaccaatcctgcttctgctggccttcctcctgctgcccagggcagatgcaggtgagtgaccgtctccaccctcgggggcccaaccccat

SEQ ID NO: 12127 - DNA, 2300 bp, Homo sapien
tgactggcaatagaagctagtacagtagtatcttacttcacaaaattattgagttacccaaaagctgattccaaagttttgtaaatatcatcccaacacattagaaaggcttgctaaattaaagaagcttgctacttagagcttttgtcaagcaaaaaggcccttatttcaattcaaattttacatagatgacttgtaggtaagaactctcaacattttcaaagcccttagacatacatttctttggattctcacaaaaacgccatgagaattgttttcccttccacagatgaggaaagtgaagcttagaggttgagccacttgcccatggaagcctggtagggaaatggctgaggttaagaccaggaccccggcacactactcattggcactaaggtagccccatgacatgtctctacagagataggcagagcaaaagaaacttactttttcaggcaattttctctgattttcataaaactgtagctaccaaatggggatacctagggtatcagttttatgatatcctaggtatccccgtttctcccattcttcccctccaaaccatcttcctgggtctgctgccctgtccatcttcacagaattcagttcggattgtctcctcccccagcatctctgctatctccacgtagtctacaaactaagtgcaggagccacagactgacagtcaggacttctgcctgagcccccatccacagctcaaaccctctttcctatttcactatgctaatgcttaccccttgcactccaaacaagcaggtctgtgtaccaccatctaacaccccaacagggccaggctagggtgaggtgagtcacagcacttaaaggttcaccaaagaattcagtaatcaaggttaatattttaatggaatatttaaaaaaatcaaaattaatatcaaaaatgcatgatgaaaaataacaaaattttaaataaagacagggtaagtttaggggtttttcctattgcttcaggctcaaaagtgccttccggggcactgttatcggccctgcagtgactccccacacagatacttttactaatgatgtttcccaaaagttagttcttacaaccgctttctacattagtaacgtctttcttcttgaacgctccagcatttaagtgtagcgctctactgtcaggaaaacccatttcccctagtaactagtagtacttcgaagatattctgaatcatcttggatcctttccagcactttcccaaaccacagtgagcactcagcaccacttcgctaaaagagtgcagaatcacaatgctcaaatcactgtctggggggttcagcagggaggggacgcagatatgttttgtttagtccagggtgttttgagaaaattgaatttgttatcaagattttacaaatcaggatattgtacatgaatatactccgtcatttctggaaaaatcagaaaatctagcaacactaggtctaattcttgcccgatagcaagggaccctgagagcagataagcggccctgccttcggagctctctccagttcgccttcccccagttacagtgcctgtcaggccccattagatctttgagtttgctatcgtaagaataaaggaaggagcgcacaggataaaaacccatcggctgggtctattcgttttttcctagagaaaaaaaaaaatgtttcctggttgtcctttcgaatatagtctcacagagaagctcacagaagcagcccacctttctagcccacaaacttcccacaagccgtgaaagtcgcaccggctcttgcacccagatcggtttctcccgggtctttggctcagggcccccgcccctacattggcctttcccttcctctgccacctccgcgctccgaggcctggggcgggtcgcgggtcccggcccccagcccccagcccctagccgctgctctttgccccgggccagggcgctcgggctcgcccacggcggcactgagcatgctcagaggcggccgcgcgggcaggtttgcttcgcaggcgctcgcactcggcggcgggcgggcgcgcggctgcagctggagctccagcgcccggagttggagttgccgggagtttccccccaacccctcccttttcgcgcgcggcagcaggagccggcgcgggagccgcgagcggcggcgagccagcacccgggccggctaagccttgtccggagcccggagccccgcgcggggcagccccccggggaggagcctcgtgctctgggacgcgtgccgcgcactggcacggcaggggcgcgagccaggctgcacggtaggaccggggc

SEQ ID NO: 12128 - DNA, 2300 bp, Homo sapien
atgcttagtatgaaagccatctttttggctgaattgttgtagtggaaagtatagggaaggaataacttcattctacaaatctagtgaatatgtttatacctttgtacagcttagaatacattgccacagtctctctcgtttgactcccaataatggtggaaattggttggagtctcagtctctgttttgagtgggagggaatccggagctctaatgtattacaatacttaagacagcagcctttgcagtcacgaagacctgagtttgaaattactacaatgtttataactgcgtaactttgggtaaatttctaatatctttaaacctaaactacctcataaaatggggacagtaataactacacgacatactgcatgtaattgacacagcatgcaaagtggattgtttgccacgtggtaagtaagcccttaataaatggcaagacgttaagggatttgcccaagatacacttgtaaaacagcctacaaggaccagaaaccaaggaagatttcagactccgaatcccatgcttttctactaccctgcttcctagaacactgagttaattaaactactaatttgatgaacgaccttgagcaaaatacttcactgagtcagtttactcatctgtaaaatgagggacttgatttagataatgcctaacgtcctttcagagtctattccagctacattagatgttttatccggtgttgcagggttgacgttcaggtccgtgatatgtccaagatctgtataatcataagccgtgcacatggcaatgaattttattccgacactcgtatttcgttcaatatttagttctgtgtgcacactcagctgttgcctgtctttagtctgcctaccagcgccttgtgaagggaagacccacacctagctttatttatttatatcctggcttgttcccgaaaggatttaaggcggcgagtgacactctaagtcccctaacggtgtcacacagtgcgattaagaaatcctctttggatgaaatcataccgtagaaaatcgccgatgagtgagatgctaactaattaatgtcttttacccaactcttaaaaataaaaactaatgcacctagcaagaagtcctggaagcatacagtgctggctctccctccagctctgacgctgtcccacccgttgtcaacggtcactcgaatgcccttcttagactagccaaaattgtcgccgctccagtaccagctggaccaagatcccaccccaccccttcgctgcccctcatcacccaagtttcctgattgggaaggggcccgaagaacctttctcacatttctattttattggctggcacggctgtcagtaatctctccttcccgccttctagcctagcgcgtttcgtggaccccttggtttctgcgacaagccgcttacgtttgcctgagccgtgttgccggggaccagcgacctttcacccctcccttcccacaggagcgccccggcccccgcccccgccccaaccgccggcgcgcgtcctcaccgcgcacgcgctcccctcgcgcgcgcacacgctcgcgcacacacgctccctcgcccccgcccgcggagttccccctcacccctcagccgccccgccggctgaagcatcggcgctgggaggcggcggcgctgctgagaggcagggacccgagcgcgaagtgtgtgggagtctacgaactcaacccctctctaccctcccctcacagccacccccctccctccccgccagccccccccaacaagcgggagaaataatgagcgagaccgggcggcagcagcagcagcgccgagcagcccaggcaacggcagaaccgctccggcagcggcggcggcggcagcaccagcagcgggagcgagcgcaacgctagcgcggcgcggggaccgccgcgctccttcccggctcctgccctcctctgccgctcgctcctctctcggcatccacctccttcccctcctcctgctcattcactctttccctcactctcccctcctcctcggcttctccccgcgccccgccagccctcgcgctctcccactccctctgcctgtcctccccggtcccctcctcccgctcattcactcgcccctctcccttctccactctctccccctgtctcctttcttcttcttctttcaccctccgtctctcacaccccctccattcccctgtctcctttctgacactgcactgcagctgctcctcagccctgccccctccccagtgagaacaaaccagcaacattgctttttttcctaaagagatttatattgatccgattaaaaaaa

SEQ ID NO: 12129 - DNA, 2300 bp, Homo sapien
agagaatttttgaaaataagcaaaagaaaaatcttttggatctgctcttgtctgtatgtctgttatatctatatgtttgtatgtgtcatgtggaagtgatatttcactaccaaactatatgaaagggctctaatcaatttgtttaaagaaaagaaagtgcctatcagtctgatataagctagctcagatcctttttaattcacatgaccttggtaatctttggtaagcttaatttggtaaatttagtcccaaaattatctctagtagtttaaaatcttaaagtcatattatgctacattacacaacctcaatttttttcactgggaatttgggttactaagagttaaaataatagacagtaaaaggtgtttttggtgaagtttgtaaaaacacaatgatgtggttttgctaaggaaaatgtaatttttttttctagtttggagaccatttcagagttgctttaaaataaagaaaaagaaagtataaataaaactaaatgggtaaagagaaaaataaaaaggcgggtgatgagaaagcttgattattgagtggccacgtgtttacccatcttaaagagctgcagctgggctgcattcaattactaaaggtaaaagctatggtggaattcagagacgaatcatactcatagtcccagggcattagttcacggaactaattaattacagaaatgcaaattagtaagaaaaaacaaaatatttaatctcttggttatcgttatctgcaatagctaaatgaaagtaaaagagtgctgggtttggccttaaggctgggccaagctcagatgtgggtctgtctcaggtcaggccactagcctgaaagctacacacaaaaggaaaaattaagccagggcaacaaaacttacctcttagacctgtggttaccaatgagttagtcaatgcaggagaagggcaagaccaagtaactattaaaaccagagtgtaagggaattgttccattttgtagattgatataatcagtttcctgagaaatctttactatagtgaattgtaaaaataactactttaaggacacaatctttaattttaaatgctacagaatgaaagtgcttgtttaagttaatgcaagacccatagcttactattaaacaattactgatgaatatatgtaatccaaatgcacaggaggttattcctgagagaacgaccagtccagtgacccagataaatgccactgtaaggtctatttaccctaagaaggaagctgcctaactctccctataaatgccaagtagagcaccccagacgaagcagttaatatgcttcatatgaaagccctgtgggactggctttattatgacccaccctgttcattctctaacattaaaaggccccacacccattttctgcatttaccccaaattggggaaatttaagaaatatcaaaaggcaaaggttataataataagctaatattgcatgaagcaaggctaaggcaaattatgataaagattgacaaaagagaccaagttccctggctcaacccactgctggggatccagatcctctttcaagggaaaaggtaaaatggactgggggtagaaaaaaaaaaggtcctgggaccaaagcataaaaatgtataagttaatagagttatgaaatttgagatgtttaaacagatttcatgtaagttagttgtgactccttcacataaatggctacgaaaataggtattgtatctgacgggggatgattcccctaggtagtaccataaaaccgaaggcatgtaaatgtatcctatgagaactgttcattggactgtggaggaaaagttaaatattaaatttgaactcaattgaacatggacacaaacactggtcaccaagtcacggaaaaggttgtgtgagccccttgaggcatttatccagcactgtttcggacaaatctctatttcaatctattcctatatgttagttattgaaaaacaatagacaatcacaaaaacaagttgacatttttgtgttccttaagcccagtcatgaagggccctcgtgactgggcctcatgccaaacaacttgttacaaaaagagctagggtcccagactgcgccgaagcttcatgagaccgatcctcgtctgtggacagaggagtagctgactctgaagcccaggctgttgctatccagtctggtggtgaatcctccacagtctggtgagtgtaaaaaccttttcccttctccccttcccattgtgatttgcttattatgtcaatctgcttattatatcatttccttattattatataatttgcttattacatct

SEQ ID NO: 12130 - DNA, 2300 bp, Homo sapien
gaggcaggcacaactatggaatgctagaaaagcaagagaatctttctaaactttgctttacttagtcttttaaatgtgatctaaggctctgtggaaagaatctcatggacaggttgacccttgctccccatcttctctggttagcaaaatgtgttgtttctattcttgtgttttcctcatgtgaaataataacatcaataaaactagacagactcttaacatgcataactgtacatggtgtattcagattacaagaccttttaattataaattttctattgaaacactctaaacaggagtgcgggtgataggtgatgtatacatatatataaatgccgtccttccagttacttggaatttaggttccttcgcaagcaaagtgttcctccctgtctatttaaaactgacaaagacatttgtctttactcgtgtggagatgcctgataacttatttctaactatcatacgctccacagtcatgacattttaagaaaatagatcaaatctatcctggattttttttcaagttccttttgattgctgctgggaggagaatagagagatagtagagaatagcattaacttgcaaagtaaaataaattattttgagataactattctatattagaatacaaaatagcctcctagttacaataacaaattcagcagggcatggttgtaattctccaggcttactagttttgctaccatggtgtgttttctctggtatactccagatgatttaaatagtgagactgatacagaaacctctgcaatgcatgtattaaatgcatacatatatgaattataagacagctttttcactggttaccgactggacactaaggacagagtttttgaatttgaatctgaacattactatttgctcactctgtaaccatgaacatgataattcatccgtctgtgcctcacttttctcagttgaaaatattaataaaatatatatagagagaatatagagtatatatatagagagagatattccatacatattttatatgtatttacatatatatacacacatacatatatagatttatggaatctatatatacacatatatatagatatatacagattccatacatctctatatatatgcataaatatttacacacatatatccatttatctatctataaaacaagaattagtatatgtaaaatcctttgatgagtgtctagtacagattaagaattaagaatcaaatgaatgttacctgatatcatatgggtatatacatatatataaatatttgtatatacatttatgtatatatacacacatatataatataactgtatataataaaactttgaatttggcaaagtgaggtagaagccccaagttaaatttcattaagattaaaactgtagcatatccttctatttaacttcacacttcagcttctttaaaatttttatttccaagaaagtgtacaaatatctgcatatcataagcaaataaaatatttacataaaagatggctatagccacagtgagtaaatgcttcaggctccatatgccttagaactaaagtgactgtataacttatcatccagaccacgacagtttaagaataaaatgtgtgtgcttttaataatcactccaggataccaagtgtgaattgagatttttccaggaaaaccaggaagatttgtcaccctactcaaaaccctagaaaatacagtaaataagaacatattttacatgtcccaaggacaaacgcatgaggaaagtggcgtcatcttttctttgtggtgaaatagtatcatctatgctctccgcaaagcccaggttgaatttgtaactcaggtagaattgttgattttgtattttagggtttttttattatacataatgcgctgcacctcatagttaaaaacaattgttctaagcttccacatgctgctaagatacagctaccgggatttagtgcgaatcacgttgttcgaggcgttagttcagctgtctgttgaatcccctgaaactaatgctcagtctatattaatgtctcagtcccgagaaacctcagcctattctctcctataattaatcttgcaggtggtgccttgacattattggttcaccaacagagcagaactgcctcagccatcaataataattcaacgcatcaggatgaggcctacgcatgggccacagaggtagccaaatatgcagaatctcctgcattcctctccagtagaagggaaactgcaattgaaactagttgttttggtggctcgataatttgtaatagaggggtcttggtgttacta

SEQ ID NO: 12131 - DNA, 2300 bp, Homo sapien
tagacaaaagtttaacatctttaatcataaatgaactcttcagaaatcaatacgaagagactaacattacaagggaagtgaaaataaaaggaacagagaaaaatggaatagcataaataagttataaggctatatgaagatgatatagtttccattaatagctaagaaagcaatttcattataaattacattattgatctttacaaatattgatgtctgatgtttgtatactttatggtctacatgaatgtctcctcatggatgtatcagtcatgctaaggaaaatagtcttatgtcaagatgagcagagagaaagccacaatatgagacttctacaaaaatggaagaagaacatagtgtatttttaaaaagccacaaaaaggataccttaagaaataacttaccttagaaaacaaaaggaaaaatattctactgatttactctatgagagaaattttagaattcatggcccttatgaaattatgaattaaaacaaataatagtaaaacaaaaggaaattaaagggaagttgctagaattgaaaagagaaaataaaacttctccaagagtattctattgtggtttatgtctgacatggctatgtgtttcctgtatacctcttccaggaagattttgatgctcaatcctgctttctctcgcttcttctcttttatgtgtcctctgcctggttcatacatctcaacacttacaaactagaaaaagtgacttaacttctttctgatttcctcatttatatattgaagacaaaaattatacttaccttacagtgttgtggtgatgattaagtgacttattttcaaaattttgagaactccagtttgttttaattccttccatttttatatcagtttgtacctttttctcgatatactttcattttcctgagtagatcctatggaccaacctttctgtaagttttatcattataattatgtatcaatatctcatacatgaatgaaatcaaatatatgttttactatgactttggatatctgatgtctgctggaaaatagcattaatgttattgtgctattctgtgctatattttatgtctatattctgctgattcttattacactgcttcaataaactcctaaatactctagttgtccacctatatcaacattatttttaacacttcagcttgagcgatatattttaaaaaattagatcacctccccaccaccaataataattatttctcattagtttcagaataaaatttaagcttgtgatgatggccccaaatatctcgttttttccagcaccttaattgttactctcccacttaatctctatattctagctacactagcctcatggtgaatcttctcttctcttctcttctcttcttctctttctttctttctttcttcctttctttcttttcttctttcttttttttagttaactttcaagttcaggggtacaagtgcaggtttgttacaaaagtaaacttgtgtcatggggttgtgttgtacagattatttcatcacccaggtattaagcctagtatccattagttatttttcccaatcctctccctcctcccacccttcaccctccaaaaggccccagtgtgtgttgtttctcttgtgtatccatgcattctcatcatttagctcccactaataagtgagaacatgtggtatttggttttctgttactgtgttagtttgctaaggataacggcctccagctccatccatgtccctgtaaaggacatgagctcattcttcttcatggctacataggattccataggtagaacttgtgaatgtgaaataatccttcccatttctgagtctttgactcaacccctcactgtgtggaatttactttctttcttcctacctctgcttagtcaattccaactaatcctcttcgtatattggctaaaaggatttagtgagaagatgataattatggcatagagacagctaagattcagtgaaagataattagtatctctgaaggaaataggaaaagatggtacagaataaaagactttcaaaaatgtaaacattcctgaaatcataggattcttgacactttagataaaataattcaatatataagaaaaaattacagagtatattgattaaaatatattctaacaaaatactgatgtatagggatttaaaaaatcctataaaatgtcatcttgtctgtaaaattagcctgacaggaaatttaaaaaagacgttatctacgtatttttgaggaaaatgatattcttcatgttttaagagtaaaatataagaaatacattctcaaaa

SEQ ID NO: 12132 - DNA, 2300 bp, Homo sapien
actatctttgctgttttacagcttttactgttgatagctttgatactggaaaatctgaggtgatttggaactgaagcagacgcccagcatactgcagcagatctatggaaaagtgaccagactattacataagtacccttcccatatctcctcactgggcaagtcccccagggctagatctccagccatggcctgcaggggctattgagccagtagcagctctgtagctccctggacagagctcccagtgtgagaggagcattgccatctttcctgtctcacagcacttgctcttgctatctccaggaatgagagactctgtaggaccaggggctagttcagaccctcagcacagagcaaccacctcagaaaactaaccagactgttgttctccatgcagatggtggtcctcacttctcctcactggacagagccaccttacctgggactccagcacaaccactctgcctcctcctgatcaccacaatcagaagcagcccaacatttctccaaggaagaaatcccaagatcaacccacaactcctcctccactacggtacagctctaacatctctcaggctgggaaaggaacaaaaggcctagtcactatgctggtacctccagcatactgcatccattatatggaaaggagtccagcccatcttccctgcgaaccctcaatcccttcaccaggcagggcccctggctcatgaacacagaacaatcaccccacccatggctgagcatacccactgatagtggtccagtgtttccctggggagaggctcccggaagcatttgacagcccttctgccacagccacagcaacagttctattcctgctgcccttggtctggggaagaaacgaagagcttaaaggctgcacaccacagccaccatgtggagagatgaatctctcctccctgtgagcctttgaatctctgctccacaaaagtggaaccccaagatgacaccagcagaacagctgccctaccacactagctgaacactcccagtaacaatggctctgcagtccttggaggtggagaactgaggggcaactgaaagcctctctgccactgcctctgctgtggaactgccctttcctccctcggactaatgaaggaccaaagaccccagcgtcttatccacacctccaaaaaagctgcagttgacacaaggaggggaggccagtctttctcctatgggtcccacccaccactcatacttgtcaccaatgagagaaacctcatcatggactctcagaataggccctccattgtgggctaattgcactgagccagcagtccccagcatttatggcaccaggaaccacttccctccatgacaattttgccatggaccagtttggagggagatggtttcgggatgaaactgttccacctcagatcatcaggcattggttagattctcacaggagcatgcaacctagatccctcacatgcaccattcacaatagggttcacactcttatgataatctaatgccactgttgattggagaggaagcagagctcacccacttctctcctactgttgtgcagcctgatttctaacagaccatagtctagtaccagttcatggcttgggagttgaggacccctgcactgagcaattgctgacctgcatctctctggtgtggagcccccaggaagcaagcaaaagaccctcagccataaccactactaaggtacctttctttgctgcctccaagttggggggaaaacataagtacataccccagagttgtggtggacagcccaggagtgtcaagccataatctacaaccaacactcaaaggggagaggagcccacactttcagagcactgaaagaaagcctggctgcaaccttgaggaaatataggggagtcacaggactgagcaagagcctagcaactgatcatgcctaagcgtcacctactggatcacatcccaaagctttaacaccaaaaatacctcaataacagactcccctgtgaaaccaaagaaaataagtcagctacaaataaggactctgcacaaagccttggccctgtgaaaacatccaagaagaagtctacttcctgtactcaatttacgttgtaaataaaggaacacggctccggccgggctgcggggctccgctcagtccgggagcgcccccgggccgcggcgctcctacctctgctttcccaccgcccgcagctgaagcacatcccgcagcccggcgcggactccgatcgccgcagttgccctcgggcgccatgtcgcagaacggagcgcccgggatgcaggaggag

SEQ ID NO: 12133 - DNA, 2300 bp, Homo sapien
ctcagatttgacctaagaaacaccttaaaacattaaaaattcatcagtcagagctggtgttgtattgaaggaaagctcctccagtttgctgctgagctcggatttgaataaaatgtccaatgttaacaaacaatacccacgtttggcactttgtgtattaaattgatcaaacagattttaggaggcacaatgcacaatttgtacagacctgattgagttaatataatatcagcaaattttacatcgaaatgattctgtttcttttctttgtgtttaaaaccagcacagattacaaattttaatgatctgaaaatgtttggtatacaaaatcatgcttatttcagtattagcaaaaacacaagaaatttttcaacacaaacacccagctgtgtctattttaaaagcagttcaatgacagcttgcacttatgagcatgcaatcagctaatttcgttttttttttcttctgtgttaatcaacactttccttcctgcatatcagagtacaaatagtatagttactccacatcagtaaatgtttacgtaacctgtcctttcccaagaatccggttacaccgaatcatttcacgctagaccgactacgaaaacgtaccgggccgtccacctcagagggagccctgtgtgccattataagtggtggtgagaaggggggctgtaagaggagaaattgggaggagtaggtggaggaatggagagacagaggaatggagggtggggggaaggggcggggggagctaagggagaaggagggaggagggaggaaggagagttgaggaaaagtaggaagaacgggcctgaagaggggagaagagtgggaggaggaaaagtgagtaggaaggggaaggcccacaaatctctccagccggtaggcaaagcccattagctcacccggccctgcgagaaatccagagcttggaaataaatgtttgggaccatgtcactatcaacactgattgttggaacccttgaatttttccacatgtaaatacagtttgttttaaagtgagaagatatgtagacataggtaaagatacatacatacagtggaaggacatttgaggttagtccaatattcaaagctcctttgtggcattcctaatagatgcatatttaaaattcactagctatttgtaattatctattattctctccagtttcctcccccccccccaaccttttctctctttctctttcttaagactgggggtggggaggatggaataaccccctattatcctgagtattcatcaaccgcattctttatgttacaatttaactttaggatcaagcataagcaccaattttccttccttcgttttcttaaataccaaatctgccagatatcttaatgaaagtttatccaagtgaagaaatgcttacattttataattatttaccttctagaggaaggaaaaggtgcctttcatttatgcttctccacctccctcttctctggggctacatcctccgtaaaatgtggtatgtttcgtgcccatgtgggatgaaacagcctttgatcaatgtgctccccactaaattccaatccctgggaaatgctgggccttagccctgcccctggccacgggatccttttaaagcccccgattcgcaatttccccattcacttcaacctccaaccgaaccttcccagttccaaagcccaagaagctgggactgtgagatccacgttcccaaggctccccggtgctttccagcagcactcagggttggcaagagctggcttcagtatactgttatttcaggaatgaggcccgcacaaaataaaagcatttgagaaacggaaaggaaaaaaaaggagtgaaaataggaaggcttaaaaaaaaaaccggaaagaaatagacgcccacccttattttccctccaatgtcaacaagcaaaacgaaaatatttccagggtgatcgctcgcagctacccgcttccaattcggattagaagctgaggctggagcggcgaggagaaaacgacatcgagtcaccccgcgcgtgagcgacgctctggagcaggagagaaggaaaaggaagagacacacgtatatagcatgtgttacctgatttatttcgagattgtttggtactgttttctctctgggcacctctcatttcggaaggccatcagaggcgcccactactgagcggccccggccgccgcagcagcacccggagccccagtcccggtttccccgcggtgccggagcccggagctcgccgccgcccaggcctcaggaatcgagtaagtaacccctgtttggccccgcgctcc

SEQ ID NO: 12134 - DNA, 2300 bp, Homo sapien
aatgtgttctgcagtattggaataagctggttacttcttacaatgggcccagtgaaaaataatctggccctaagatgttatcagcaaacacttagacagttgctcagggggaggaaaaaaaaaaaaagcctaagggagaagcaagcttactggaatagatttgaaactgaaatgctgaatacttaatattggaaaatagaagggggtggactgtggagtggagagagggaaagagagagagagaggatctttatggtgaaaaaataattaccaccaaaaagaatgcatgagagagagagacataaggtgaatgatagagagagagaaaggcctaagaaaaatatataagggccaggaaaattaaaagagctggaaccaaatatacacaaatggggaatggacaaaaataagccaagacagctagtttaattatctcctttaagcaattagacatgattttattttcttagtataaaaacagtttcaccagaggtccaaattttcttgaaatttaagttcttcagaatgaagcataaaaatatttcacaaaaaattattgtgttaaaagtcaaatttatggctgatattaaaaatagtaataaagtccaagtgaatggttttatgcaaaggaaatccccattacacattttgaaccaaaatagctcaaagagagacatgtgtccaagctgaaaaaaaggtgatgatttattgtttgcttttgccatggattttatttgtggaataagaatgtattatcacaggggaaacatagaattttgcttaccaaacgttaaaaagaaagttgaactcttgtgctaaggtaaaggggtatagatatagaagaaagttttcctgcatgagtattttttttggccacattaaataagtatacttatttgtatttataagtgtttatttgggtgacagataaatagaattttaatggcaaacatcatactttgaagtcaagagtaaaactgatttctttgaattcatagaaacgaagtattggagtgggagttctgcttggacccatgtccaaattacatataatggatatgactagaagtttgttaggtgtactagacacgaaggtggatatatggagagagaactttgtaaaggcttcctgaagcccaatatgaacatctcatttcccttgatctatcttatcatccctcaacttatcttctcaaaaaacacatgacagtctggcatggcatataatacatttttgcatcgaacgggttgtaatgttgtgttatttgttgtctccaactttgaccgttaaaattagtttatgtcagaaatacacttcaaaacttttgaggattattttctttcatattataattgtttttaataagatgaaggttgtcctttgtgaaattttggaactgaaactgatcacaacttaaaacttgaaatcccaaattaaagtttatttccaggtttaaagtattttacttgaatttgtctgttgtaaagttaacaaaaaatattaatatgtaaaacactgagaaaatgatgtaattgaactagaggagttaaagtattatttcaaatatgtttcttcagcctgttacaaaattgggaaccaagtgaacatgaagtctagaactaacaaggtttaatacaaatatccttatggtcatggaagccttcatgtagtttatgtgacttgcataaaatcaaaggcagagaggcaaaaatttagtctcatagtgtattgattttaatatatatttaagttggtgcatatttcacccaaatacgtggataaattcaatatatttagaagtctatagaagtgtagttttttaaaaagtgtattttctacaacattgttgaggaatttgcatgcactgggaaaattttggttttgagaaattaattttatgaacagctaaagtggttggttgtgtttgagactaaaagcctgttggagaattagactaacaaagggtgaaggtgaagatcattagaggttttagaactggctgagatgggttgctggggttgtgtaactgtgcctagagggcggggttcctgtacattcctacttcaccagataacctgcccccaacaccacttcagcttctgccagacagatggaactctccagcatgaaaatctgcgcagccattccaacaagcagggtaggtgaaacttgaattaaaattctcccctctttatttttctacttaagtccagatcctggagatatggaaagaatagaggtcatctagattctctcttttgggcacacacgtctgcattcttcctaagagctacctacc

SEQ ID NO: 12135 - DNA, 2300 bp, Homo sapien
tcaaacgtctttctcatctttatttatgccccctttattcttcttacacacaatcaacttgcatattccaatctccacgtgtgacatatacaggacaaattcatttcctaaagttttactaattattccttcctttacttcttatcaatatcatattctactataagaatgacaggactgcaattattgtgaggtaattatttactgaatgccttcaatatgccagacaccgaatatgggttagtagctgtttctatcaatttacatttcattattttgcccaaccagattgtaagttcccagagggtaggagcaggtcttatttgtatccctctgacacctcttaataatgatgctaataaatatgctttatattgacttgcaactataacatttcaaatcactgtcatgattactagctcactggttatatattttgagtattttacagtcaatgaacgtgggtcattaaatgctctagggaacagactgtggattacacaaccagtgctgagtagatatgcatttaaaacatgatgagcaactgaattcagtctcacaacttcacaactcttaactggttacaaaaaaaattcttttggcatttaaacataaaagttattatagagaacaagaactgccgaatgaggcagaagacaacacggaagtgaattaaactataatacagcagcaggaaaaataaaagaggagtcgtcgtttctgcctcaaattcactacaagaatttaaattcatttcataaggtcttgacctcttatcaaataaagctgttttaaaagaaagcaaaatgctgggcacagtggctcatgcctgcaatctcagcagtttgggaggctgaggcgggaggatcacttgaggtcaggagttcaaaaccagcccggccaaaatggcaaaagcccgtttttaccaaaaacacaaaaatcagccaggcgtggttgtgcacacatataatcccagctactcaggaggctgaggcaggagaatcgcttgaacccgggaggcggaggttggttgcagtatgccaagatggcaccactgcactccagcctgggtgagagttgataaaactcaaaaacctaaaaatcacagcactttacctcatatgtagaaagaagtccaagaaaatattttcagcacaggtgcggtggctcaggcctgtaatcccaaaacgttgggaggtccagtgggcgtatcacccgaggtcaggaattccagaccagcctgggcaacatggtgagaacccctctgacaaaaaattagctgggcatggtggcgggcgcctgtaatcccagctacttgggaggctgaggcaggagaactgcttgagccggataggcagaggttgcagtgagctgagatcacgccactgaattccagcctgggcaacagggcaagaccatgtatcagaaaaaacaaacaaacaaacaaaaaacaacaaaaaaaccctatatatatatttttccaacaatttgtggtgattttcccccacacctgttttggggagtccctaaataaataacacttaagtgcctgtaaaaaccatgtatttatcaacttttcaactaaattcagccaaaaacagaagtcacctgatttgaagatacccattaaccctaggcatgatatgcctaaagacagaatatcatttatccagtaattctttcaacatgtattgcgtgcctactaagtgcagacactggcctaggccctggaggcctaaatctcagttactggtatgaatttgtacagggaattcagaaaggggtaagtgatctgaaaagccaaaaaagatttgtcttcaatgagccttttgtctccacctctagctttctcgaccctcaaatttaaggaagtgaaaaaaactaaaggacattcaatttttaaagagaaattaaagaaacaagtttaggatcccagcagccacctggaagatagagaaaacagctcccaacgctatccatcatccatgtgactgggcggaagtgcaggagagcaagggggccggaaatgcagggcccggcgcgggggaggggaagagtcacggcccgcgagggttggagaccggaagtgcaggttctcccgtgcgcgggagaatgtcgctgggcagggcgtgactctaaactcaagccgcacgaggcttctcagaggttcctctcaccacaaagccccatcacagtacagaaggctttttgcaaaacagtgatttctcagcttttccgaagaggttcctaaatgtggctgtaaccctgacgtgaggtttgtagtgaagggtccgcgctct

SEQ ID NO: 12136 - DNA, 2300 bp, Homo sapien
gcttggctaacttttttttttatttttggtagagatggagcctctctatgttacccagactggccttgaacttctgaacttaagtcatcctcccacctcagcctccccaaatgctgggattacaggcatgagacactgcaccaggccagttagaaggttaaaatctaaagcaaataacactagtatgatatatttaatgtattttataatttaaatcaacagacttgttcagccaaaactaatttttattttctaactttagaatatcacagtgcatataaaggttaagaaaaatatgtgtacatataattctaatggattcactaatatttttctccttttcttgtattgcaactttcatttatcgatactagaacaatactagagctcctatttataataaatgaaagcattttggaattttaaaagcactgaatatagaatacagaatatagaaaaaatgaattttatgggtcataaattattctcctgtatttatctcataaaattacctctacttttctggtttatattctcttctcatccaagtctgtcttcatttaaaaacagaacaatggctgggcacagtagctcacacctataatcccagctcacacctataatccctctcaaagtggaaggatcagttgaggctaaaagttagagacaagcctagaggtaactcacaactcacaataggaaagatacagaatcaacctaaatggtgaaaaatggtagactggataaagaacatgtggtacataaagaccatggaatactatacagccataaaaaagggaaatcatgtctttgcagcaacatggatagagctggaggccattttcctaggcaaactaacacaggaacaggaaacaaaatactgcatgttctcacttataagtgagaactaaatagtgagtacatgtggacacaaagaaggaaacaatagatactaggtcctacttgagggaggagtatgggaagagggtgaggtttgaaaaactacctgttgagtactaatgcttattatctggataatgaaaccaagtgtataccaaacccctacaacactcaattcaactatataacaaaccctatgtaacatgtatctctgaacctaaaagaaaatattttaaaaaggtgtgaaatattcacatagtatttttggtactcaaattcaagggaagaaaagagatccccctctagaacctccagaaagccacacagccctgccaaccctttgcttttagtccagtaagacccgtgtttgttttctaatccccagactgtaaggtaataaatctgtattgtttaataaaaaattaagtcggttggtagtgtgcacctgtagtctcagctacttgggtggctgaggcaggaggatcacttgagcctgggaattcaaggctgcagtgagctatgatcacacaactgcactccagcctgtgcaacagagtgagaccctgtctcttggaaaaaaaaaaaccataaacgataacaacaaaatgtggtcttgatttatctaggctgcgtctcatagctatagtcaaatctctcccacacttcaaatttgtgctctgctcctctttcatttcttgtttataaatttccctcttgtcattggtttctacacctttcttaaagaaaatacatggcaatacatggcttttttttttttttttttttttggccatactcttgatttctaaggctcacttgttcctttttaaatctctcttctcacttcatccctgtacttacaagatccaatttttccttccttgctagctcctctatcttcctaaacgtttccctccatttatctaaaggatttacgcacatttgaagctcatttccagagcgaggtcatccattttgagagagtcacctgtcatctcttaggccattgcttaatacagctcttgaagtccagccttccacaggcacttcagtctcacatttccatccttaggacatctccactttgctgtactgccctcacccgaaaccaatcagcctaaagccaaacacgtaaccctaatgtttttccccacaagatactctctccctttgtgtattttgctatcattctttcaatttcttaggcaagaactcttccttcaattaatgaaaatattaagtcattcgacagtacctgtgaagcccttcattcctttatacaaagtgatttgctgagcctttgggccgtataaacatgaataaaaccctttaagatgttcatactctatttgggcagtcagatacaagtagttagaagtcagaatcgctgtggaagcaca

SEQ ID NO: 12137 - DNA, 2300 bp, Homo sapien
ggtaaaaacaaagacaagtaggcaccccataaggacacaaagggctttgctgtgtttaaaacatgattctgagaaccagtgtgtcaaatagtgtcacaaacattacttccaaatgcatttctcatttaaagtttacctgaaggcattttacacaaggttacgaaagcttatgactcccatcccagtagctttaaaaagtatcttgtggctccaatattttctcacttaataaatatctgatttgatcataattttacaagcattcttgacaaagtctaattttaaaaatgtgtacttataaaatagattttaagcattttacaaaaaaattttaattcaccatttaatttcaacattttatgtaacgtatcaaataattcaaataatttagtggttatttaatttggttacataaagcattattttattgctttaatttggttttattgcttttattgcttttaagcttttattgctttaagttggtttaaaaacacaaaaatccgtgttaaattatacttacataagctaaattagatttatatagaaaccatacatttatatacatatatgcataatttacaatgttgtttcttaaacttatttttaaatgtctatcttataaacatcatgactctcagcagctatgcttaaaagcaagagtaattgctgtaacttgtaaaatcactaattgcaaaaattcaaactcaaagaacttctgagctgagaagatgacataggattattttaaaacacagactttgacttaagcacttatcagtaagaatatcataatttcaattaatagaacttcatggaataatatatgatcatgcatacatattctgaataggtatgaagttataatatgttcttctagttattggtgaaatttagtacctgccttctccaactaggttcacttagtgatgtactgaaaacacaagaaacccctaaaagagagccttataaaagagtatgggattttcctaattattaaaataattcatttcatttatactcctggtttacactgtaaaaaaattttggtgatataaagatcgtgatcacaataaaatattttccaaacaagtaatttatacaacttcttatagatgtcttcagaatttgttaccactctccactccaagagggatctattcaacctaaatgtttaagtattttcaaaatttttttctctctaattgatttttacagtaacaggattataaagcatcattgtaatatccatcgggagatagagggggtaaatatgggaaatttaaatcctcaaactattagcgtatttcagaatgtgtttttattttaaataattcacataattaccacaatttttattttgtttcgaatgtttggaaaatccaaatttaactttcttaaggaagaatattaaccatatccataagatatatatatatttatttgcatattttatatataatatatataaaatatatactatataatatatataatatataaaaatatatatcttatggatatagttaatattcttccatatatatatatatatatatattctagagctaatggaaatatttaaagtgttaagtcctatttttctcacaggacttatcaatcagtttttgacaataagctggcatgtatgccagtatgccaagcaataaagactttcatggtttcacaagagcaaatttcaagtttcctcccaaaataaatattcagccatgccacaaattcctctaataatcttcagagaacattttgtatctctctggtttccaaattttgacaagcgatgttttgcaacattaacacattagttcgtgctgctctggccctgtgaccacgataaaacctcacatattttatcatttcactaagctcagagataaaagcaaactcaaaactgttggatatttgatgagacactgaccaatctacagcacaagccctgaagaaacactgtcattaacaccctggctgcattctccctcctagcgccctgtcttggattgacattgctatcacatcaccccacagatttctcatgtaaatggggaagtgggtaaacaggaagccataccagaaggggctcatcaggggcacttgtagagagttcagcagatgatgtgcggatggtgctgaccccagtgagggaaacgtttgagagccttctccgcctcacaccgctgcaattgttgggtattttaaatgcacatctcttatggtaattcagaccacaccctggaaagggaaaataaaaattatttttattgaaccataaattaaaaagt

SEQ ID NO: 12138 - DNA, 2300 bp, Homo sapien
tttagggcaaggaccacctgtcttcacagctgtgcaactggtgccagtacagtgcctggaacagagaagtcctcaacatgcagttgtgatatctataaaacatgaatgtcttcagcgctcttgaatctcaagtgaaactagctttttgtaagtctcttgtaaactgaccagcaagcttttttttgataatagaaaactgtggaatattaactttattctgatttcaaagaaaatgaagtatagtttcggacatttaaaagaaaaaaacctccttcagaattcagaaaggcatttcatcaagaaaaattccaccattttcctagattagctgagtctagaacattaggaaaattacctacctgtatcagggatgaagaggaccacctcataagtaactatgcagggaaaatgtaaacacaggtagaccttatcaaaccatcacattcagagaataaattcaagtctcttcaatgcagttgtgcagccttgcagtgtttggggctccattactgaccctgggaacacggttctaaaggaagctaccttgcaatatcttgggccacaaccagaagttaagacaataaataaataaataaataaataaataaataaataaataaaacagaacaaaataagctatacaaaatacaaaatgtttgtttaggtatgtttgtgtgtacttacgcagaggaaggggaaagtctagggaagtggcgaagagagaggcaaagctgactacattatctgcgtggcccattgcaaaatacaaatgtgagactccttgattaaaaattatgaagaagaacaaaacagcgacagtagactattgtcccagaatattaaaccaaacacgggtcttatgagctgtggcctatacaactgcatagtcgcacacccatgaagcccaccctggttggaggggagaattataattcatctccagcgaatgtaaagcaatccccaccctgccaaaacaacagtaaaaataaacggcgatccaaattagggcaggttgtgcccaatcctgatggctgtgcttgtgatgacggtggcggtgctgaggtggacttgggggcactgctcctatataacagactttagattgatagaggagaaggaaaatagtttctgaagctccaaagtagaaacttcaggcgcaaagaataaggtaaaggaaaggagaccgcatcagacctccctcctgcccttgggcagtcaatgccttttctttccaaagcgaccctctccttagatcactgtgtatatccggtgccttaggagctggggtggagtacgtaggtttggctgtaagggcgcgtcagagcgacaaaaagggtagagacaagtttaaacccctttctgtggagtggcttcctaccctctttggccacaaaccccagggctcccagaggggcctggatgtaagtgggttccagatgacccatcctcccttgaccctccgaaggtaagacccaaggggaaccgctgtgatcagcattcttgaattcctcaaaagtcacctcacttgtagaagtgcgtagtcctccagcatttggaagaggtggcagggaccttggggcccgggaagttcgcgaccccaggaagcgggtctgaggcggtgcaccccatccactccgtccgcagtcggggcggggcagcgggacccgagaggacgggaatccctgcagggagggaagggccgcgcctgccgaggcggctccgagccccgccactcggtcctatcccggctcgcggaggctcaggccccgggaactgcgggcggagggggcggcgaccgggcaccctgcggccactgcggccgctgctcctgcgactcccgcgcccgccgggtggtggctccccagtgcccgcccccagctccccttccccgcccctcacgcccccttcccgccccggcccccgcccggcgctcgggccgcgccgacccgtcgccccgtccttccgagcgcgccaggcggcagattcttggcggcggcggcgcctccccagtgccggcggccccgagccggctgccgcgttccgggcctcagagtcctcccgcctcggccattttccctcctccccatctcctccccttagtcccctcccctcccgatcctcatccccttgccctcccccagcccagggacttttccggaaagtttttattttccgtctgggctctcggagaaagaagctcctggctcagcggctgcaaaactttcctgctgccgcgccgccagcccccgccctccgctgcccggccctgcgccccgccgagcgatgagcgcccctccggt

SEQ ID NO: 12139 - DNA, 2300 bp, Homo sapien
aggggtcattttcaacattgcaagttgataaatttgatttaatgcattaaattgtcttgcatcgtgttcttagaacaggaaaagtgtactgtattaagcaagagtctttgggggaaaataaagcccatgatactcagctaggagtatgaaagataaatagctagataataatcaaacaagtagtttttgttaaaaaagagaatagacttcatacgtagagggtatgggtggcaaggacttgttgagcattaaggaggaatgaaggcatacagaataagagcgttcatttggagtttggaaaggatggtcacagaaacaggatcagagtgactgtctgtgtgtgtttgtgtgtgtgtgtattttccaaaaaaaacaagtttaactttccctgtgatcttattctgaaggacaatgtttttctgaccgtgtcttgccctaaggtattattttggagaaaccaaacaacctcccgggaagagtgcaatgttgtgagaagcagagggagccgataccagccacctgagtcagaaggaggcagcccagaaaggtagcactccaggaggtgaggcagctatcatgtgataatcatatccttggagaatcacagatccagagcagtacctcttgctcacaatgccctagggtgtgattatcttatgataaccatcttaaagatgtcttttttgctcaattaacacatacttccatgaaaattagctatcaagatgagttacaaaatacagatatttaacatgacaggttaaaatagtgcagatgtcttcatccaattattgcaatttgtactctggacaaggaaaactacttggatgagtgattcaacttgctaacatttatatgttttgtaattgtatattattacaagatttcttcatattgagcaaactctgtatttttgccgacagagctgtcttcttgaaatgcagactcgggcaggtttatgagtgtcttcgtctcccatcagtttgtttcgtttggacctgcctttttacaaaacttccccaggggtcccaatacgttttctcatccattctgtggcatgcaatgagaaggagccaggccatttgctttttgagtgtttgctggcagagagtaaagcgcacttgtcatgagtgcacatgggctgggaatatttcttgagaataaatggggcagaaaaataaggaaaagtttgtgcactgcagaagaagtcggtgtattggtgtgaattcctcctggctcctggcagagcactgtaatacctctatggaccatgcattccctagctgaaagtgggtggattcatgcagctcatctctaatattctttccagctttaaaattctgtgcttctggatggccaggcgcgatggctcacgcctgtaatcccagcactttgggaggccggggcgggcggatcaccaggtcaggagatagagatcatcctggctaacacagtgaaaccccgtctctactaaaaatacaaaaaataaatgagccgggcatcgtggcgggcgcctgtagtcccagctactcgggaggctgaggcgggagaacggcctgaacccgggaggcggagcttgcagtgagccgagatcccgccactgcactccagcgagactccgtctcaaaacaaaacaaaacaaaacaaaacaaaaacaaacaaacaaacaaaaaattctgtgcttctgaagtaaaattacatacaacctcatggtagctgaggatgttaaatggctaggcacttcctaagctatgtgtctagggcagtgctcaagacaaccccctgccccataacaaagaattatccagctcacaatgtcaagtgcttagaatgagaaatcttggtggagagaaaatttcttaacatctgtaatccttggtttcctcctccgtaataccagcctaactgagtgatatggtttggctctgtgtccctaccgaaatctcatgtccacttgtaatccccatgtgttggaggaggggcatggtgggaggtgattgaatcacggtagtggatttcccctctgctgttctcgtgatagtgcgtgagttctcacgagatctggttgtttgaaagtgtgtagcacctcccccttcgctcgctcgctctctcctgctccaccatgataagatgtgcttgcttccccttcactttccgacttgatcgtaagtttcccagccaggcttcctgtacagcttgtggaactgtgagtcaattaaaactcttttctttgtgaattacccagtctcaggtagttccttatagcagtgtgagaaggaactaatgcactgagtttctgt

SEQ ID NO: 12140 - DNA, 2300 bp, Homo sapien
tatatatatataatcttttgggtggcttttccagggcatttttaacttttgtatacaggtcaacttgagaatttaattcctgtgaaggataagaatggtgggaaggtgccaagaattatgaaagacataggaaaatatataacatagtttctgccttcaagaaacttcaaggagcaatatatttaacggggtcatattagatatgtaaacataaaataatacactatatcatgaatgacaaaatgtgtggtcaaatcattatatgtaattgtagaaagaactgttgaatgaatgaatggacatagactatccaaacattagaaatttatacgctcattaaacctgattttgtatctagaatgtattcaatttctagcaatcttccttaaagaacaaaattgcaaaattaaaaaaaaagtttattatcttaaaaattcaactggtgataaagtgaaaggtaaaagttctccatctcttcctactcttatttaccagcccgctcccagagatgtttacagcttaggtatccatcccaaaactttgtataccatatacacacacatactttcaaacaaggatactacagtccttcttaaactttttcagtatttcatttcagtacccgctgatctacttcattacttttagtgcccgcagcgtcagtatatcagatgctaaagtatcataacttacatgtatttaaccccttccttatttgtagacacagattattttctatcttccactgttaaaaacagtacatcagttaatagctttacacaccccctgtgtcagattacctgtagcataggttctcagaaatctagtaaacctttcaaactgtattttttttttttttttttttttttttttgagacagagcctcgctctgtcgcccaggctggagtgcagtggcgcaatttctgctcactgcaagctccgtctcccgggttcacaccattctcctgcctcagcctcccgagtagctgggactacaggcgcctgccatcacgcccagctaattttttgtacatttagtagagacggggtttcaccatgttagccaggatggtctcgatctcctgacctcgtgatccacccgcctcggcctaccaaagtgctgggattacaggcgtgagccaccgcgcccggccctcaaactgtatttttgacaaaggctaaaggtatgctgtcatggtttggtttgtactgatccgtttaggtaattcaatgttattagatgtgaggatgatctggtggcaacatcaatcacagccataaaggtcagagttatttagcgcccctcaccccctagcatttccagtccttcctttagtttctggaagctcccagatgtctcttcagaagcttaagacgttttggatcaaagacatactgtggtcctcgataaaggaaaagatactgttgtttcaataatctcacgggacaatacttaataatctcgtaaagtgagcccttatctgaggggggaaataaaatttattgccttctaacaccatcaaatagtttatttgagaccaggaattggtccgaccacttattttcaacttttggctgaatacgggtgaacttggctttttgttttccctaaacccaggacagaaataaattaaaagccctgactgtgccgggataggactgagaggcccaggaaaggctgcactaagtacttggagggtttgtttttttccttcttgctgctgctgctgtttcctcgaggatgaagggaaagataaaaccctcctgcctccgttcgtgctttcattcgccccattcctcgaaggtgacgaaacttcagcacatctctgtccattttggaaaaaagaggatcccctcaagagcaaataggcggaaacaatgaccccgcgcccggagtttttctgagctcctaaatagggagagagacccgacaaaacaaacaagcgaaggcgacacagccaggttagcaccgagcagcagcgcaggagcgccagaagggcgggagcacacgggcccttccccacagccagcgcctccgcgggtcccacccctcgagggcggggccgaccgctctttccgggtttgcgagcggaagtggacgaatttgaatcctgtgggccgttgaatgtggctgctcgcggtcggcgtgccccgacgtacagcgggccgggaaaagtggcactgaggctctggaacttctgcccagctctccttggtgagtaaatggggaacgggaagacgcagaacgttccagagagagaagcaggaccgtggggtgggagagggtgtcaggaggccgg

SEQ ID NO: 12141 - DNA, 2300 bp, Homo sapien
aagagtttttagagccttgctttacccaatagggaagaagtagaaaattagtcgctaagcatgatgaaatactttcttgttaaaaataatttcaggctgggcatggtgactcatacctgtaatcccaacagtttgggaggctaaggtgggaggatcatttgaaccctggagttcgaaaccagtctgggcaatattacgaaactctgtctcaacaaaaatattttgagaaaatagccaggtatggtggtgtgcacctgtagtcctagctaggcaagaggctgaggtgggaggatcatttgagcccaggagttcaagctgcaatgagctatgatcatgccactatactctcacctgagtgacacagcaagaccttgtctctaaaaagtttcaagtttaaaaccttagaagatagtaaagagaatttttgtgaaaacatttgataactggatttgcagacaggtagaatattaagtactctttcaaaatgtgaagaatatctgttttactatgccacttgtgttagctctactgaaaaatctgttacaaatattgttataacacttttagtatcaaaatagatgttcacattattttaaaataattttaatattgagatttccaaagacgctacaccagggaagcttgactccttgctcctgctttaacatgcagtcatatttagaagaatagcatcagcattcccctgatccaggcaggagcaaggaatcaacctgctataaaaaaggtatgtttctgaagaattatcttacttccaaaggactttcgcttttattcaacatgagttaatgaagagaggatcataagaaaaaagaaaaagcaaaacctggcctacactagggcactgtaacgtcttggggtgggacagattcatacttggtatggaaaatgatccatgggcattgcccaaaacaagattatttttgagaacattaattccagttacagatggagaaactgagggaaggagtgattgagctggtttatatcgtcacttggattgttaaaacagattgctgggcttcatgccgacaggttctgattctatagatgcgctgtagggctcagtaatttgcatttctaacaagttctggggtaatgctgctgctgctgctgctgctggtctgggagcacactttgtgacttactgatctagactaaaaggtactattttaggaattgtgaattctgtttataatattagctctactgttaattatgactttatgatttaaaatatattgtgtaatctctcaaagacattttcttatatagtaaggagagattacatttgctttttttaaaaaaggacatagtaaatgtgaagtaaactacaattaagaaagttaattatagccattagccaggaaggtgagagtttgagcttgcttcattcattcattcattcattcattcattcattcatttatgagacggagtttcgctcttgttgcccaggctggagtgcaatggcgtgatcttggctcaacgcaacctctgcttcccgggttcaagtgattctcctgcctcagcctcctgagtagctgggattacaggcatacgccacgacgcccagcttattttgtattttcagtagagacagggtttctccctgtgggtcacactggtctcgaactcatgacctcaggtgatccgcctgcctctgcctcccaaagtgctgggattacaggtgtgagccaccgcgcctggcctgagattctgattcttaaaccggaattcactggttggtcaaatttgagataattatctatcaactttcttgtacatgattctaatttggtaaaagattggggtgaggaatcaagaatttaaaactaagattatcaaataactgtttttggttctagtagcagccattgttacaattttgggtgggaattggggaagaatatcctattaatctttttttcccctcgtcttgttttattggctatataactgctgtttcacataaagtactttaaagtacttatctctatatttaaattcatgttttataggcaaggcagcaaatttagaagaaatgtatcaacactattaatagagttaggattccaaattaaaaaaaaaactaaaagattgtatatcaacaaagccaatatctggaatagtgccttagatgcattcagaaatcgaaactttaatccttcatatgcaattgaagtagcatatgttattgaaaatgataattttggaagtgagcatcctggatcaaagcaagaatttctgagtctcttaatgcaacatcttgagaactcatc

SEQ ID NO: 12142 - DNA, 2300 bp, Homo sapien
ttaattcttcgtttttctttttgtgccctctttactaaaaaaaaagtatatttaagcttcattgtctctacttcgtatttcctatttatttcttgtaatcaggcttctgtccctaccaccagtctcaagttagctagttcatagtttatatccagggagctaaatatccatgtccaaaggccttttctaatttttcatctgctgtgacttctgcaattaccacttagaatttctctgcaatattttatttaatattgtacttcctcctacttctgatgattctctcttctttaatgcttcttacttcttcttacccctgaaacttagcatttttcagtgttgtcttaacagtcatcattctttattatttggagagcttcttctctcctgtaatctttctgaatgatttacagacctgtatttttgagcccccggacttttatatacagataagacctgggtcttgctagcacattgagtctaacatgtttaagataaaaatagtatttttcccagaattttttgtttgattgttttttgtggggcttttttgtgtttttacctgtttgccttttctttccaagagacttcttacttccaagctgtcttggagagtcattttcatactcctccattttccagttatatgtcaagtcacctgcctctaagactgacttattgtcaacctttccttcctgtttctagtgtgcctattttaccaaactcaaattttccctaggcttagacaattagaatgttgttctaatattcttatttgggatgattcttccaaaagtacagttttgaccatattgctttcttcctcaggaatcccccagtggcttctcattgcctgttgaacgaagttgaagctcttcattagggcatttaagaccttcacctctcttcatggctttatctactccagtttctgtactttttatccagtgtttgttcatttatttaagaaatactatgtattctgtactgttttgttactaaagatagagtagtgaagcaaagtatctgccttcttggaatttacattaagagagaacacagaagataaacaacaaatgtaatatgccatcacgtagtaaaatgtattataatgctaaataaaacagaatatggccgggcgcagtgggtcacgcctgtaatcccaacactttgggagaacaggtgggtggatcaccggggtcagcagttcgagaccagcctggccaacatggtgaaaccccatctttactaaaaatacaaaaaaattagccaggtgtggtggcgcgcgcctatagtcccagctgcttgaaaggctcgcttgagcccgggaggcagaggtggcagtgagccgggatcatgccactgcactccagcatgggcaacagagtgagactccatcccaaataaataaatgtatacataaatacatacatgcatacatacaacagaataaaaggagatggataagggttggagtatatacaagttaggttttaggctaaacttctgtatctcatagacccagaaagacagtggctcaaacaaggcagatgtttactgttctgtaaaatccattgtctagattttagggtaagagttggcaaaaaatggcctgtaagtcacgttctggcttgttgcctgtttggtaaatagttacattggaatgcagccatgcccatttgctactgatctgactgctttcacgctacagtggcagagttgagtagctgcaacagataccatatagtttgaaaagcataaaatgctatctggccctttatacagatggccctctgttttcgagatagagttgtgatttacaaaaccgtctaaggacttgagttccttcctctcattatcgtgtaacacttagcattattgtttgcatccacatggttgaagcttgctcttaaaggagaaaagtggaagttgagagcagggaagtttgacatgttgtttttacttacatcccattgaacagtcatgtagccccacctagctgcagcaaaagtttggctatgtgcccagctgaaactcagggttgagggtttgcagggatgaggcaacatatacccaattattactccgacagggtgtaaagatagtattttgagcagaatagtcatgaaaaacttaggagatttcagcagagattttgaatgaatgaaaagaagtcatgtaaatctctaagaatgttttaggaaaaggaaattgcaagtaaattttctgttaatggattgtttcctatttttaactttctccatctgtacctttaagagctaacctgtatgaaagtgtct

SEQ ID NO: 12143 - DNA, 2300 bp, Homo sapien
tgaggtgtatttttctataaatttattgcccacattctgtgcacttggtcaggagtttttatcatttcatatatatgcagtgtacatcaattttaaaattgtcttcgtggttttaacatgactcatagtcttgggagagaatctgtgatggaactgaagtggctcaatgatggatttgcatttgaaagtggaagtacccaaatgagcaaaattgggctctcagacattttatatttcatagagactgtagaatgcagtagaactttcccatagggcagaaataatttgtttagttggaacacacctagatcattgaagattccttcaaaatattagtaatagtactgaagacacacatgtattccagttaatttcttaatgaatgtgccaattagctataaaaatgagattacataatttttttttcttttttgagacagaatctcactcagtcacccaggctggagtgcagtggcgcgatctctgctcactgcatcctccgcctcccaggttcaagcagttcttcctgcctcagcctccccagtagctgggattaaaggcgcccaccaccacacccggctaattttgtatttttagtagagaccgggtttcaccatgttggccaggctggtctcgaactactgacgtcaggtgatctgcccacctctacctcccaaagtgctgggattacaggcgtgagccaccgcacccggcagagattatgtaataagataacctgttttaaatgtcacaaaaataaatttttattaatgaaaaaagccagtgtttcacactataaaacaatatataatcgttaggctaaccatttcatttatataattgtgaaagttaagcttttgaggtacagagtgatttcatttcagaatttggtgcaacttcataatgaagcgtcatcaatgaactcgggaaatgaggtgtcattgtgtatccattttggtcatacagtaaaatctatggattaagttagaaatcatctatcccatatattttgcggtcacgtggcttcaagtgtacattaaaccgccagcacaagaccagcctggccaacatggtgaatccccgtctctacaaaaaaaaaaaaaaaaaatttagccgggcgtggtgacccctgcctatagtcccaactagtgggcagtctgaggtggaaggatagtttgggaggatcgcttgagtccgggaggtcgagactacagtgagccgagattctgccactgcactccagcctgagcgacagacagtgagatactatctcaaaaacaaaacaacaacaaaaaccagcacatcagcctggcctgatggtgtgcccctgtagtccctagctacttgggagactgaagcaggaggatcgtttgaccgtcagaatttgaggctgcagtgatccctgattgcgcgctccagcctaggcaacacaccccactactgcttgacttccttcccacggcaaggtgattttgcaattactacaaggaaagaggagaaatgctaatttctcattttgtacctccctggatcccgtgtccatgccggcagaacgccaccataaagctacacctttttttttaaagagatgcgactgagaaatatgccagatcagagtaatgctccaatgctttccgtttctctggagaaaggagcaaagggaagactcctgctgcactgagaaacgagagctaacgttaaaatgttgcctgtgtttcaggagcttcatttacttcagtcctgtggtccttatactcctagagcattatcaccctttaagtgctctgtaagtcaccaaaccaacagttcagtaattaggttcttagcactacacgctcctaccctaacagctcaatttaatgttgctaccatttgagagagtgtggcttgattcggtaggataaaaactcttagtattcgcctaacattacgggccactgaattaacctgcaccgggtctcccagttctaccgagagtggaggtcttcctggaggaggtggggtccggaactcaggcacaccctttggccccgcccttccgggctttgcttccggggcggtaagggcagccacgtcatccccccgctccgctccccagccgggcagtggctcgtgggagccaagatggcggcggcggcggcagcgacagcagcagcagcagccagtattcgggaaaggcagacaggtactgacttattctcttctccttgaagcttcgtgactgccccgacgacatccttctcctctggtgcgtgcagctcagagaccgatctccaggagtttaatccagtccctagaac

SEQ ID NO: 12144 - DNA, 2300 bp, Homo sapien
tctctgtacttgaagcttccattaatgtatgggagtatgtgaatattgtattgtatgggagtggtagatgtgtagatggttttggtgtgttatttggttgtaaaaaccagacaaaaacatacgaaagagttgtctctgaaaaaccagacaaaaacatacgaaagagttgtctctgggctctttaatttttgaacaattttgctggaaagaaatttttctcatgttacttaatgacctatttggcagacttgtcttcagatatagcagaactataaaacacaaagtaaaatttaattgtatccttaggaaaatctcattttagactaaataaagatttatcatggaatattggtatgaatattcagacttccaattattttcacaaatataataaaaataatatgacccttatggtttatcattatatataaccttttctaaattttcctccattgtatagatctaagagtacaatgcaggaagataaacacagaattcagtgtaaatagagaaattgatataaagctctcaattttcgtaaaattttacaaaacaatttacaatgttcttttgttccagaattttttaattatttattcttgttatgttgcaaagtacttcattatcttttgttggtattacttggaattcctaactatagttttctcttttggataaagcattttaaaatctttatttaaagcacatttaaatctgcacccagttactctttagagaaactggtttagactcactcttaagtgaacagactcaattttatttgaaacaaaacttaaaaggtaaaattttggccgggcgcggtggctcacgcctgtaatcccagcactttgggaggccgaggcaggtggatcatgaggtcaggagatcgagaccatcctggctaacaaggtgaaaccccgtctctactaaaaatacaaaaaaaaaaaaattagccgggcgcagtggcgggcgcctgtagtcccagctactcgggaggctgaggcaggagaacggcgtgaacccgggaagcggagcttgcagtgagccgagattgcgccactgcagtccgcagtccggcctgggcgacagagcgagactccgtctcaaaaaaaaaaaaaaaaggtaaaattttgagccacctttaaaaaaaaaaattctgaatagtattcagaagtatattcagacagcttgaacatttgatgcttgtatttatatttgaaagtacctagccaacacaaatgaaatagctttaattttaattttacttgcctgagacaatcttaaaaggttttcactttaccagtctagggaaggcagcagtatccttagtgacagtccattttaataacaataaaatgttttatgatctaagaaaatggaaaatccttatataatagtaatgtgttatcaaaatggaaaatccttatataatagtaatgtgttatttatagatttttatctgatctataaacaatcagattgaatgtttttgttgtatgaagtctctgaaatacataaagtacaatagatacaagactgttctcttcagaacatcctgtacaattcacaaaggaaataccagttgaaaatgaacagaataacacttcattaggaatgcactttgaatagccataattttctaaattttctaaatttgacttatgttcaaaataataaaacttgtcagactgaaatgtaacagtacttcttatgccacagcctataaacaagtcaggagacaaccttttgccagcacctgtgttgtacatttcgtgttcaaagtggaatctgttctgtaagatgatgcagtgcaacattgaaaacttggaacttatcccaggcaaaataaaaatggtcaataaagttgtttgtgtatccatatacccattttcctaagtacaaaaaatacctttttattagaaatgaacgaactcttacatcatttaatctcatacgttttcacgaactttaaaagttactttatttttaaagagaacttttataatccacagagaggaaatgaaaaaaatacagtgggattctggccaggcatggtggctcacgcctgtaatcccagcagtttgggaagctgatcacctaaggtcaggagtttgagaccagcctggccaacatggcgaaaccctgtctctactaaaaatataaaaattagccgggcgtggtggcaagagcctgtattcccagctacttgggaggctgaggcaggaggatcacttgaacccaggaggcagaggctgcagtgagctgagattgcgccactgcactccagcctgggcgacagc

SEQ ID NO: 12145 - DNA, 2300 bp, Homo sapien
cccctccagatctactctccacccttttctgtgcctcaagaagctgactgtatggactaaatcaactgactgtcttagcctctggcttcccactgggtttagccaaagtaaagcacaaacaggatcaaagcagacaaggtgccactggcgaatagctcagccaaaggctgcaacttctatcaggaagtcctctccccataattctcgctcttcaagtgcctgtaatcgtttcttccccttccccttctcctttgggatcagcagtgatgtctccctgctggcctgccccagcctactgtaatatctcttgtgatttctctgaattctatccacacctttgcaaatcatttctttatcaaactctccttaattatccatcaatttcctgcttttgtgaaagtttgtaactacaattacctaatacctacaaggtactctatggatagccccttggacaaaactgtcatcaataaggatgtcttcagagaccctgctgttaaacgcagggctggatgagaggccaaggtcaagtttgaaaagaggtacaagacaggcaagaacaagtggttcttccaggacctagatttttcaaagtgattccacagtgtcctagttctaatatttaaacctacattagaaaatgtttaaaagaaaaaacttcacctatgaaaaaaattggggaacactgaataaaaaaaactatttatatattgtatacttcatttcccaggcatttttgttcacagacttttccctttttataaaaaagcacctaggaactagtgttccgcagaatataattgataaaattctgatttatatcaacagaaagaagagaagaaagacaaatgtaacactacacaatttctaagaatgctcatgttgtttttattttggctttaaagcacagccagccactcacttgaagatagcatggtacatacagtgttgtccttccacagacatgtacataccctctgcacctggcctcggtccactgctaagaccccaggacccctctctctgacctcaaagtcatcatccaggtcactagagatagctcaccacagaaatctgtgaccatagacatacagccttgaactccagcttacatgagccgcactggacaaaggaaaaccaactgaagacaaattaccagagagaaagcatggaagctaccaaattgtcggaaccctttcatttcatgggctgtatctgtattctatctacacctttgcaaatcatttctttatcaaactctccttaaatttcctgcttttgtgaaagtttataactacaatcacctaatttccacaaggtactctgtggatattacacagaaagtactaattttttctttctttttattattttaaagacggggtctcacttcttgtccatgctgaggtgcagtggctatttataggcatgattatagtatactacagcctctaactcctgggctcaagtgatcctctcacctcagcctcccacgtagctgggacgacaggcacatgccactgcacccagtgtgtactaattttcaaattgaagatttcagaaacactgaacttggaaagaccctgagagatgacttttttcactttcaaatcagtgctgagtcatctcagatactcaattatctgttttttaaaaaatttaaacctccaagcagatcacgatgcctttcctcttctttgtgttttctgtttatatccttaatagcacctaccacattgattagtaattgatagtttaatgttctgtctcttcaaacataatgcaagctctttcaggtaagaaaatgaatcattgttgttaaagccttaacacttgacccagtatatatttaataaaaatttttgaacaaacgaaaaacattggccaaatgaataaatgtttcctaataatgttggtaaatgttggtaagttctttcactatcaatcgtatcataaaatttttcttaataccaacttaaatgccattttgtgtatagaaaaatccctaaaagatcctagaggttatccactctgggcagaggtgcatttaaaaactaaagtttttccttctttcctttctgctgtaggccccagtggttactgtcaaaatgggcaagttcctgaaacctcggaaagtggtgtttgtcctggctggatgctactccagacacaaagctgtcatcgtgaagaacattgatgatggcacctcagatcgcccctacagccatgccctggtggctggaattgaccactatccctgcaaagtaagagctgccatgggcaagaagaagatcaccaag

SEQ ID NO: 12146 - DNA, 2300 bp, Homo sapien
atacttatggtgagcatgaactacaaactagctaagaatgagagtctaaaccccactcttccactctccttggttggccttaccaaaaagaaaaaaatagtaaagacagagtaacttctcttaaatgtttcaaaacaaaataattaagatgaatctcagtaaacaaccatgaaattcagtgaggtatttcctttattttttaatggttacagactcagggtctgtcatggaaatagctgcatagttttgactctgccaaatcactcactgaaattacatcacaggagggctgccagtgccctgtgggggctctgaatagcatctacccctttggccatttgggacctgcctgctgagctgtgaagtggcaggttttttccagcgtacagactcttcctaattatatagcatcatgacaatttgtccagcctaattaggggaggttatccaaccctgattgaggacactcaataaacaataatggaaaagacagctttaattgtcctgaggcttgaaatttctcccatggaaaatatcaggggcagtggctagattactggatttctaagaaaagggtaattctctataccagggaagggagtaaatcttgaaagcagccatgaaaataaacatcaaaaacctcccagccctcaaatgttatttggtctctttccctccagaagacattcaggtagtaaagggaatgaaatcaacactccttagttgcctgatacaaatactaagtcattccaatcaggaagatagttgtaattaagactactacactagttgacttccaggtgatggtggtgtatttgtttctcagtataaaatggcatgggaatacttttcaacaataaaaagaaaggaagtactgttctataatgcctcatggatgaacctcaaaaacattctgtgcagtgaaggaagccgcacaatgtataatcccatctataagaaacgaccactaagaaaaatctatagagacaggaaataggttagtgattgcctaggactaggagtgggagaagagactgactgacaatggcgaggagatcattttggggaggatgaacctgttctgaaattggcttgtggtgatggttgtacagctctgaaaatttactaaacatcattgaactgtacactcaaaacggatggattttatggcatgtaaattgtaactaaataaggctatttgaaaaagtttatattgtaccagaaaggttagcgtctgggcctgggtctggttcttccgctgccatgcaggtcgcctgtcactaacactcctcaagaattctgctccttctccatttccatttgtaaaacgttagcaggatggtgcggggagaaggagaacacattatcaaatctgagattctgtgcagtcacaagacaccaagtctgggaatttcgaaaggcaatcaggcataaattcttcctgaggtgagaaagaagcaaaggtaccggctgctggggtcagggctgtctcacacgcgtggctctaggcaggagcacaaattgaaccactggggaaagtaggactccagcagaaacgaaggcgcaaggccgaatccctaaggtccaacgagctagcagtcagttgacagggtttctaacaaaaacgcggcatgcgtttaccaaacctagggtggttttatttcagaagtaggaactctttccacgagagcaccaagttgagaagttcggttctcaggccgcgtggacctgacagctctcagaagctccaggcctcgctgggtggggcgggtagcggccgccgctgcctcagcagccctggtcccggcagagcagggctggcgaggccgctgctgccgccgtcggggccgccggccctccacactcgttgagacgccggcacggggaccttcgtgcccctctagggactggcgccgcgtccaggtggccgagcctgcgctgctggaggaggcgcctccgcgccggcctcaccccggggccggcagggggcgaaggcggagctggaagtcgccgccgggccccgggggaccggctcccgcgcttcctcccgcgccccccgcacagtgctcatgcgcacggcccagcctttatagcggccgcgggggccttgccttccgcactcgggcgcagccgggtggatctcgagcaggtgcggagccccgggcggcgggcgcgggtgcgagggatccctgacgcctctgtccctgtttctttgtcgctcccagcctgtctgtcgtcgttttggcgcccccgcctccccgcggtgcggggttgcacaccgatcctgggcttcgctcgat

SEQ ID NO: 12147 - DNA, 2300 bp, Homo sapien
gtggtggctcacacctgtaatcccaccactttgggaggctgaggcggatggaccacttgaggtcaggagttcgagacctagccaacatggtgaaaccctgtctctactaaaaatacaaaaattagccaggtatggtggtgcatgcctgtaatcccagctacttgggaggctgaggcaggagaatcacttgaatcctggaggtggaggttgcagtgagccgagatcgcgccactgcactccatcctgggctacagagcgagacgccatcaaataaataaataaataaagcagaatctttagatgacttccctgatgagctattttcttgattaatcaaagcaatagatacaacatggcactataagtcagtgggatgccctgaaaaagtgtggatagcatctcagctgctattcttgtgttacaggggagtaatcagcaactcagggggacctgtacgagtctatagcctacctggtcgagaaaactattcctcagtagatgccaatggcatccagtctcaaatgctttctagatggtctgcttctttcacagtaactagtaggtataattattgttctcattctgtaatattctcccaccccccaaacgttttctgctttttttagctcagcctctttaaccttgatggaaaaacctgtgatcaagactaaagctgacctatagaggtaaactgtaggttagactgaggggtcaagtacccactgaagccaaatttgggtgaatagaagacaatcttactgacagatgatggcaatagaaacttgaattatttgcagtcagaatgcccggacacttaccaaggaactgaaaaactactaaatacatttttgatgatcctttgaagatataatggataagcattttggttctctgaaactagcatgcagcaggatgtttgtaactacaatcaccattaccctattacatttgtcattgtagagagctctaaattagattcataatactttggtaaagaaggaaaaggaaaaaaataagcttatttttattttaacagaaggcaaaagtagtacacaggaggccacaggacaagcagtgtccacagcacatccaccaacaggtatgaactatgaaacctatctcctagttgcccggcacagcatttggaagttatgaataaacgtgttgttggtagaagcttttcttaaagaaatttgatattaaagagaaacaaagcaaataccttaagtttactggtatattacatatggaaacattcattatgtgtatattttaaagacagggtctcactctgttgctcaggctggagtacagtggtgcaatcatagctcactgcagccttaacctcctaggctcaagcaatcttctcaccttggcctcctgagtaggtggtactacaggcacatgccaccacacccagccaatttttttgatttttaattttttttatttttatttttttagacaggtctagctatgatgcccaggctggttttgaactcctgacctcaggcagtcctcccacttcagcctcccaaagttcagggattacaggcatgagccactgcacccagcctaataattctctaaaagtcctattttctcccagatttgataaaccacgcctaagaactggtcaaagtaccatgaacttctagttccatttgcttcattaaattcctttaattactgcactgtcatgtgactaaaaggaatgtgtgtctattgtaagaaatagccagggatccccttttgtatgacgatggcagttttaaagtcaaagatattaagaacattaggatttaatgttgagttcctgcctcacctgtgggtttggggtattaaagtcctggattagggcatatcaaatatgtaggcctacatactgatttgtttatttgttgggtcattgctttccctagtccagaaaatcctgaggaaattaatttttttaaaaaagtcctttcaagaatggcactctgttgttatgagcttctccccatgtgggtttcttgctatgtaactgtcttccttttgttaatgccaagtgcatcttttatttcaggtaaacgactaaagaaaacacccgagaagaaaactggcaataaaggtaagaatcaagatctccatttgggaaggtagcattttccctccctcctcttgagactgctaatgaggggactggtttggttgttcgcagattgtaaagcagacattgcatttctgattgatggaagctttaatattgggcagcgccgatttaatttacagaagaattttgttggaaaagtggctctaat

SEQ ID NO: 12148 - DNA, 2300 bp, Homo sapien
acgtatttcctttttactctgtctcctgtaaataacctttatcctgattatgtttacttacataattattgatagtaacctacagttctgatttctgctgtcttgctgctattccctggttacttcaggtgactcaaaacttggtcctttataaaattaaagaaaaaaccactttcttaaaagggctaatgagtggtagctgggttttcattagagcttaattttccaaggggttgtactcctagctgagagtttttggtctacttactggggaaaaatcatactatgctaaacccagtttttatgatgtttaattaaaattatccctgttacatgattcagtcatgtttgaagcattttataaaaggggaggttgtcttctcaaactctattttcaaattcaaatttttatgtagtgaaaaagtcaattccagtttgtttctccctgcatgtagtccttttattcctcttatgcagggtataaaattgtaagactcagaagatttactggagtatattattctaaccagttaacacatttcagggggcttaggtggatgagaggaggagataggacctatctttagaaaagacagacaaggtgggatgatagagcacctctgtcttttgggagaggccttggtaagcgaatcatctaagtcacattaagggagtcctgatgttctcctttcataggaaccaacttcacaagcatttttaagtaaaaaatgatgtcaattacaaaacatttctggtgaagcaagtactcaaaaatatcttatactgtttaatcaggtagtggctgtgtataatgcctaggacagtaggtattcgataaacttgtgtctttttatttttttttttattttggagatagggtcttgctctgtcacccaagctggagtgcagtggtgtgatcatggctcactgtagccttgacctcctcggctcaagcagtcctcccacctcagcctcccaagtagctcagactacagacatgcaccatcccacccggctaatttttttttcttttttgtagagggggttctcactatgttgcccaggctggtcttgaattcttggcctcaagcagtcctcctgcttcagcctcccaaagtgctgggattacaggcatgagccactgtgcttggcctcaataaataattgaatcaaagaaaaaatattcttggtattattacatgatttaaaaaacaattcagattggtctttccacatgaatttttaccatatcctcaggggagacactagcagtaataaaagtaagccagcttacaataactcactagcagttttattgcttaaatattcaaactacaatattttttctgcagttatttgaaatgtctttgtctttaaatgtttataagcagtcagtaaatactttaccaacttaacttttaagtacttaggtgacttagaatataagccaaatatatctatatacatataaaattaaggagagaaatagaaaaatacctggcaatcctgctctcttattcagtgtgatatttttagtcataagttgttatgaaaacacactacaaaagcagtttgatacaggtctcctttctatatccagattttatagtctgcagtaatagctagctattattgattggttttaagaaaatatccacttgggtcaaaatatgtgtacctgaaccatgttaaagagctgtgttcatttaagtttctcttttcattttgcttatataatcaatacagaatggttagagaacgaatgttgcttttggtctaagtatcagattcttttattgagctatggaatttgcatatctgtacatttagtaggcatggttagaactcttaaggttttaatccacattatctcctctttcctgagtttctaagagccatgattatgaagcctcagcagtgtttttaacaaagtacactgtaaattgtaaccagaaggcagcggctttaaaggagtgcttatttgcctaaatggctgttgacatacttaatagttttgtatctgattctagtatgctaaagcatttcagtattatgagaatacaatttacacactggatccccttgtactttttctttcagttgtcaaaatgttaccattattgctgggattctaagaaatctctacaaatgcctctgatgacatcagaaacaattggttctaatcctgtgaactctcttgtgaagaaagcatgagactccttcggtttagaagccatatctttcaggtcatccagaggtgcccaagccacaccaacagagaagatagtgattcctacaat

SEQ ID NO: 12149 - DNA, 2300 bp, Homo sapien
tcaataattaacactttaaaaatctgtgtacatgacagtgcactggagactgtacataataatatgtaagttgtcttatttctagattgtctttcttaaaaataggtttaagtttacagtaaaaatccactgatgcttcactacaccctcccacaaatatgtattcaacacatacattttaaaatacgcatctcacaagcaatctcagtagactgaaggcacctaaagcaaactagaaaccttattaagttaacccaataaaacattttaaatatataactcaaaaaaaaaaaaaccaacgccatcatgaacattttattccaaaagaatcagtatgaaataaaaaagagtctagaaacactgtaggacttcttcaaaacaaggaaacaaacaaaaacttaggatggctaataacagtactgtaccaatagaattgaaagcaagcaagcaagcaaaaggaatctaccttaaaacactgctgctgctgttaaggagacctagaagggaaagcaaatgctagagcaggcaataaaggcttctttaatatatagtataggttttactaatttgggcacaagatatctttcttctcagctgcttacattagtgaagtttatgggtgaaaaatgcaattgctaacttgaagagtgttgaaatccaaacttgcatacaacagtacaaaggtctaagaaaccatagcagggactggtgaagtattatttagtgagcttaggccttactgcatttgtcaatccaaattttaaaaacaaatgccttacttactttactcacacagaaaattaagtttgcagtatgtagtagaaagctgtataccaacagaattctataaattttaagtatgttaaagcagactgtacacaacttaaaccagttttgacttcagcttttttaaagttatgtaattttaaagcccaatattatatcaaaacacaattgtaaagcactgaaatgactaacaagtgttacttttttttaagacttcatacagtgtcaaaatacccaagtattttttacttttgaaaagtttaacttcacccactttgtggagtcatataaaagtttactagttcagaaccaaactaaagagatgcatatttgaggacaccctttctagttaatccaatcctcctcctttcagcactacatttgcctaacgattcaccataggcatatgacatatatgacagcaaatactgcttaccccctaaatacacaacagtctgaagaacaggtgcaatactatttagacacacgctttttccttctaagcctaaatttgccctggaaaggtatttaaaaataaacacaaatacccaagaaagttaaataaccctttcaaaaagatgcagcaattttgagatccaggacatgagctgttaactaccaacagcttccaaatgtgcagcctatcaaaggttcacattatgaggatcgagtcaagctcaactatgaagggttccgagaacatctcactttgcttctcctgcaagagtaagtaacatgatataactacgtttcacttcaagggaatattaaatctcttcagtcgtttcataaatacagcatcgatcgtctggtttggtttttttatagataaagaaacggatgggggaaaggagatctagtggagagtactgtaaaaagaaaaattcagtgctgaaagcgttgatgagtcactaagtaaggaataactacagagaatccaagtgagtaaggcagcatctcaggtgagaaagtacttaaagttgacgatgggaaataaaacttcacaggtcagtcccaagtcactgtgcaccctagcagcccaggaaagaagcgtggctgtcaaggggcaagcgcgtaccaagtctgagggagggggccagatacgccaaatcggaaaggggggtggtccggaaaaggggggtaagatgcctatcctagtccctctcttcgggctcttcatctcaagaggaacaaacaagagcaaactcagtgttgagaggccccaaaccggactctcccacagagaggtgctcggtcccaagccccggaggcccgggaaggccgcctccggaggagcccccgcagacgccatactaaaagccaaaatggctgccccgaggaggcccgcaccgcgtagccagtgaaggttggggagcaagcttatgcgggaaagagggagggggactccaggaaaagccgttgagaggaccatcacaacctgagcagcacaggtaggttccgctcggcctcccaaggcgccggctccggctgagtggagtccccagccccacccc

SEQ ID NO: 12150 - DNA, 2300 bp, Homo sapien
tttaagacttcatacagtgtcaaaatacccaagtattttttacttttgaaaagtttaacttcacccactttgtggagtcatataaaagtttactagttcagaaccaaactaaagagatgcatatttgaggacaccctttctagttaatccaatcctcctcctttcagcactacatttgcctaacgattcaccataggcatatgacatatatgacagcaaatactgcttaccccctaaatacacaacagtctgaagaacaggtgcaatactatttagacacacgctttttccttctaagcctaaatttgccctggaaaggtatttaaaaataaacacaaatacccaagaaagttaaataaccctttcaaaaagatgcagcaattttgagatccaggacatgagctgttaactaccaacagcttccaaatgtgcagcctatcaaaggttcacattatgaggatcgagtcaagctcaactatgaagggttccgagaacatctcactttgcttctcctgcaagagtaagtaacatgatataactacgtttcacttcaagggaatattaaatctcttcagtcgtttcataaatacagcatcgatcgtctggtttggtttttttatagataaagaaacggatgggggaaaggagatctagtggagagtactgtaaaaagaaaaattcagtgctgaaagcgttgatgagtcactaagtaaggaataactacagagaatccaagtgagtaaggcagcatctcaggtgagaaagtacttaaagttgacgatgggaaataaaacttcacaggtcagtcccaagtcactgtgcaccctagcagcccaggaaagaagcgtggctgtcaaggggcaagcgcgtaccaagtctgagggagggggccagatacgccaaatcggaaaggggggtggtccggaaaaggggggtaagatgcctatcctagtccctctcttcgggctcttcatctcaagaggaacaaacaagagcaaactcagtgttgagaggccccaaaccggactctcccacagagaggtgctcggtcccaagccccggaggcccgggaaggccgcctccggaggagcccccgcagacgccatactaaaagccaaaatggctgccccgaggaggcccgcaccgcgtagccagtgaaggttggggagcaagcttatgcgggaaagagggagggggactccaggaaaagccgttgagaggaccatcacaacctgagcagcacaggtaggttccgctcggcctcccaaggcgccggctccggctgagtggagtccccagccccaccccccggccgggaacccagccgccgcagctcccgcacaccgaccccaacgaggtacctgcagttcggcccgttccacctcccagtgcgcccgctccatctcgaaccgagcccactcgtgctggatgtagtgcagtatccccgggatagtgtactgctgcggccgggacagctcggggcctgccgcgggacccgctccctcggaggccggaggacccccgccgcccgccgctccgttccccccgggcgaaaggcccaggttccccccaggtccctgctgctgccggggaggggccgccatccccgggccgccaccaccgcctccggcaagctcgtccattgtgtgtggggccccggccggggcgcagggcgagacgccgacagctgggggaagggccggagagggtggccccgcgctggctgcggggcggaggccggccgggagaggggcggggaaggggtcgttgctgtgtgcctgccgtgggtcagagcagggagctgccggctgccgccattacaatccctcctccatctgcccgtctcactcactcactttaggggaagggggggcctcggcgggaggggtggggggagagttgggaaggggataggcggagggccgtcactagcgcacagcatgctgggtagcgaacgcagcctcacgcttaatcgccaaatagagtccggcctcaccctacgccggcgcactgagaacgcagcccgggtcgccgttagagggcggggaaagagctcgggctccgcccctaggcccgccctcagacccgatccggtgtctggccgcagctaccggacacctgggctccgactctgacttttggaagcgaggcggccttaggcttcctggttatcagtttccttttagcaggccgtccccgggcgctgtttccttcccaggggtctctcacccgtgtcccggctttctgagctggttgttaacctggctggtcgctctggccgaccgcatcccgtctcggat

SEQ ID NO: 12151 - DNA, 2300 bp, Homo sapien
taaatagtactttaataatttgaagaaatatgtaatcttaacactttgtgaagccaaggtgggtggaccacttgagccaggagttggagactagcctgggcatcatgacaaaaccccgtctctacaaaaaatacaaaaattagctgggcttggtggatgcacacctggagtcccagctatcaggaggctaaagtgggaggaccacctcagccagggagctccaggttgcaacaagcagagctcacaccactgcattccagcccaggcaacagagtgagaccctgtctcaaaaaaaaaaaataaataaaataataatttgaagaaatggtccttaacattatagtactgcaatctaagatctcatttcatatagaaataaaacatggcagcatgagtaacaggtccaatctgctttccattaaactgtaataacagtaaagcagatgtgataaaataagatgcattacttaatctcttttgaaattacttcctgattggttggtagtgcatactccatagtacaagttttattggcttttgcagtaaagaaaaaaaattttaaaaagtaacaaattttcaatgcaattttcctgcatcgctattaatataattactgaacctaatttccttatgttgttaattatttttgtcttatttttcaaacaaatgcttcttagctatattaatttttagaaacacactagtgcattaggatattttctaggaaactaagcacataaaagtacccactattgtacttaaaatattagccttgtctcttatgtatatgttacattcctcaaactttttaaattttttgccgacacggagtctcgctttgtcgcccaggctggagtgcagtggtgcgatctcggctctctgcaacctcagcctcctgggctcaagcaattctcgtgcctcagcctccccaggagctgggactacaggtgtgcgccaccatgcccggctaatttttgtatttttagtagaaatggggtttcacaatgttggccaagctggtctcgaactcctggcctcaagtgatcgcccacctcggcttcccaaagtgctgggattacaggcttgagcagccgcgcccggccatattcacttaaacatttaatgacccaggagaacattcatctaggattttaagttgtactcacagtgcttttattttctgtttcgatcaaaatagtctattgatgacaatatttgtgagcccattcatttctaccgtatcaaattgttagtctagccagtctccttcaaacttctctccctctacccatcatcgtcaagatctaaaggaattcactacctcttcttctcccaagaaaaaaaaaatcgctcctccccctctcccaacccccccacaacccattccagaaaaggaaagaagaggggacgcaaagtggaataagttacgacgggcgaccgagcgcatagaaatgggaccaaagcccaggctcaagacagagacgaggaatcagtaaccacagccggaggatcttggctatttgccagcagagaactgactggttctaagaaaccagaggcagagcgagtgacaggaagggaaagagggcccacccttgggactgcctgaaacactcaaagaatgaaaaagaaacgtcaggaatccgagacgggatgcggtcggccagagcgaccagccaggttaacaaccagctcagaaagccgggacacgggtgagagacccctgggaaggaaacagcgcccggggacggcctgctaaaaggaaactgataaccaggaagcctaaggccgcctcgcttccaaaagtcagagtcggagcccaggtgtccggtagctgcggccagacaccggatcgggtctgagggcgggcctaggggcggagcccgagctctttccccgccctctaacggcgacccgggctgcgttctcagtgcgccggcgtagggtgaggccggactctatttggcgattaagcgtgaggctgcgttcgctacccagcatgctgtgcgctagtgacggccctccgcctatccccttcccaactctccccccacccctcccgccgaggcccccccttcccctaaagtgagtgagtgagacgggcagatggaggagggattgtaatggcggcagccggcagctccctgctctgacccacggcaggcacacagcaacgaccccttccccgcccctctcccggccggcctccgccccgcagccagcgcggggccaccctctccggcccttcccccagctgtcggcgtctcgccctgcgccccggccggggccccacacacaat

SEQ ID NO: 12152 - DNA, 2300 bp, Homo sapien
cctttctccattgtagcagctagcaggcgctctctcatgatctcctcggaagaatattcaggcaacttaaggtaatgcacacatgtattgactgatggatagcttgcatcagtagcatcaacctacaacaagaaagcaaacacaacagaagaccatgagtttaaatacttctttctttcaaaagtaaagtaactaaatttcatttggattccccattagccagagagcttgtaccttgcgtacaaccgtgagcctgggatgcaggttagccagtccacctgggggtagagttgaacaaccagtggtaaactgcaagaatgctttcctttcatcagaagacatgccacataaaaccctcacaaacctcaggaaaccagggctaaaagaacaaaaatatagttatattgagttgactgcagatttaaatgaaaatcactaccactattttctaaggcagcaacaagccccctaaaaaacaatatcctcacaccagaacaacaacacatctagagactcttggttaagtatgaaatgggctaatataagctactttaaaaatatcccgggccaggtgtggtggctcatacctgtaatcccagcaccttgggaggctgaggcgggtggatcatctgaggtcaagagttcaacagcagcctgacaaacatggtgaaaccccatctctactaaaaatacaaaattagctgggcgtggtggcgcacgcctgtaatcccagctacttgggaggctaaggcaggagaatcgcttgaacctgggagatagaggtttcagtgagctgagattgtgccattgcattccagcctggacaataagagcgaaactccatctcaaaaataaaaataaaaatccctcaaagactgtcttgaacttacaaattgtaagaactaaaaaatactgacagtgtatggggtccatctattctgcaacaaagtcagcaaatcataaaaacacaggatgcacttgcaaaatcatttcaaatatggataaatataccaaaggggatctgaaataatttttattccagcaaaataattatcttgtgataaatttatgtaatgaaatagtaaatgaacgacatgccacaacatggataaatttcataatcataatattactcaaaccagaccacaaagaaaacagactacatgatttcatatattaaaagttcaaaagcaagcaaaactgatcaacatatggtgattagattaatagaaaagaatatggtgggaagggggatttttgaagttgtttcatattctggataccaattatacaggtgtgttcattttgacaaaatcctctaaactgtatatatgatgtgtgtacttatctgttatattcaataaaaagtttaatataaacgtagtatatagcccaacagcttacaatttaccaaattttaaaaatgaacaattaaaacacaatgaggaaaggaatcaacatcagccatgatgtcagttgtcttttttttttttttttttttgagacagagtttcactcttgttgcccaggctggagtgcaatggcatgatcttggctcactgcaacctccacctcttgggttcaagtgattctcctgtctcagcctcccaagtagctgggattacaggcgtctgccaccacgcccaggtaatttttgtatttttagtagaaacgaggtttcaccgtgttggccaggctggtctcaaactcctgacctcaagtgatccgcccgccttagcctcccaaagtgctgggattacaggtgtgagccaccgcgcccggcctgctgtcagttgtctttttgtatcctcccagccttatcagtggatatgcattctggtaactgtgagacaccactgctttctcacttactttatgatactcactgaattaaagttctttagagaatctgtcatttgatttggggaatataaataattttgttgatcttggaaaatagtatcacatacctgtcacgtgtataacccagcttaggttcagtgtaattgataatatcctctgctgcccaggatggtgactggtttccacaaagaatcatttggacttcttcatggctgaaggaacttaatttctccattggaaaaactttattaaacccatctacatcgtacatgtaacggaaacacaaaaaacaaacatacaactcagtttccaagttacgattccaaaataccaaatttcaaaccaaaatacccattatcagaatcaatctaagtatctatcaagggatgaatgtgtaaagaaaatgtggtatatgtacacaatggaatactatgcaa

SEQ ID NO: 12153 - DNA, 2300 bp, Homo sapien
gactacaggcagccgccaccacgcccggctaattttttgtatatttagtagagacggggtttcactgtgttagccaggatggtctcaatctcctgacctcatgatctgcctgcctcggcctcccaaagtgctgggattacaggcgtgagccaccgtgcccagcccattcttttttatggttgcatagtattccattgtgtacatataccacattttctttacacattcatcccttgatagatacttagattgattctgataatgggtattttggtttgaaatttggtattttggaatcgtaacttggaaactgagttgtatgtttgttttttgtgtttccgttacatgtacgatgtagatgggtttaataaagtttttccaatggagaaattaagttccttcagccatgaagaagtccaaatgattctttgtggaaaccagtcaccatcctgggcagcagaggatattatcaattacactgaacctaagctgggttatacacgtgacaggtatgtgatactattttccaagatcaacaaaattatttatattccccaaatcaaatgacagattctctaaagaactttaattcagtgagtatcataaagtaagtgagaaagcagtggtgtctcacagttaccagaatgcatatccactgataaggctgggaggatacaaaaagacaactgacagcaggccgggcgcggtggctcacacctgtaatcccagcactttgggaggctaaggcgggcggatcacttgaggtcaggagtttgagaccagcctggccaacacggtgaaacctcgtttctactaaaaatacaaaaattacctgggcgtggtggcagacgcctgtaatcccagctacttgggaggctgagacaggagaatcacttgaacccaagaggtggaggttgcagtgagccaagatcatgccattgcactccagcctgggcaacaagagtgaaactctgtctcaaaaaaaaaaaaaaaaaaaagacaactgacatcatggctgatgttgattcctttcctcattgtgttttaattgttcatttttaaaatttggtaaattgtaagctgttgggctatatactacgtttatattaaactttttattgaatataacagataagtacacacatcatatatacagtttagaggattttgtcaaaatgaacacacctgtataattggtatccagaatatgaaacaacttcaaaaatcccccttcccaccatattcttttctattaatctaatcaccatatgttgatcagttttgcttgcttttgaacttttaatatatgaaatcatgtagtctgttttctttgtggtctggtttgagtaatattatgattatgaaatttatccatgttgtggcatgtcgttcatttactatttcattacataaatttatcacaagataattattttgctggaataaaaattatttcagatcccctttggtatatttatccatatttgaaatgattttgcaagtgcatcctgtgtttttatgatttgctgactttgttgcagaatagatggaccccatacactgtcagtattttttagttcttacaatttgtaagttcaagacagtctttgagggatttttatttttatttttgagatggagtttcgctcttattgtccaggctggaatgcaatggcacaatctcagctcactgaaacctctatctcccaggttcaagcgattctcctgccttagcctcccaagtagctgggattacaggcgtgcgccaccacgcccagctaattttgtatttttagtagagatggggtttcaccatgtttgtcaggctgctgttgaactcttgacctcagatgatccacccgcctcagcctcccaaggtgctgggattacaggtatgagccaccacacctggcccgggatatttttaaagtagcttatattagcccatttcatacttaaccaagagtctctagatgtgttgttgttctggtgtgaggatattgttttttagggggcttgttgctgccttagaaaatagtggtagtgattttcatttaaatctgcagtcaactcaatataactatatttttgttcttttagccctggtttcctgaggtttgtgagggttttatgtggcatgtcttctgatgaaaggaaagcattcttgcagtttaccactggttgttcaactctacccccaggtggactggctaacctgcatcccaggctcacggttgtacgcaaggtacaagctctctggctaatggggaatccaaatgaaatttagttactttactttt

SEQ ID NO: 12154 - DNA, 2300 bp, Homo sapien
gtaaacatgaagaggggttttcctgttctgtaggcagaagccttctcctctggcagagcatctttttcataagaggatgtcagtccacctccttaggggttaggtcttgtgccattaatgagcaacaaagaagatctccactcttgaggtggcaaagtgcttgttctgcttgagggcttctacccatttcataacaaagttggactaaaatagtagtactcacaagggattcttttttacttttacattaaactgtgctgtttgatattttgggagcacctggttttgtaatattgtttcacttgaattgtgcttggtattatatcactggtctgtgttgagacatgttatagcaaatggtagtatgacatttaatatatttagtttagaaatgttactgtggacattgttggttttatttcatatacacagtattccctatatgaggaagagtggaaatacgtctcctgtcacaggggtgaatccaactggtttgtttttaacttttggatcataaactaattgcaagaaatatgatacatctctagaagatgtccaaggctttacatctttcactttatatacagactttcattgtattcctcctacccttatgttcttcttcttctttttttttttttttaatagagacaagttctcactatgtttcccaggctggtctcaaactcctgggctcaagtgatccacccgtttcggcctcccaaagtgctgggattacaggcttgagccaccatgcccagttgtttacattcttctaatatagataatctttttttttaaccatatgctgtagtttttattatactttatgcaatcactttaagggtttttgtccatactcttcctgttgcaaaaatgatttaaagtgtctttaactcagaaataagcagaagaggcgaggcgcagtggctcatgcctgtaatcccagcactttgggaggctgaggtgggtggatcacctgaggtcaagagtttgagaccagccggaccaacatagtaaaaccctgtctctactgaaaatacagaattagccaggcatggtggtgcatgccgtaatcccacctacttgggaggccgaggcaggaaaatcgcctgaacccgggaggcagaggttgcagtgagctgagatcgtgccactgcactccatcctgggcgacaagagtgaaactgtctcaaaaaataaaaattaaaaagtggaagagtctaggctttggtgtcacacagagacacacaaaagtctgttcaccatcatttcttcaagcaaatgatttaacctccttatctgagatttggtttcctttggtgtaaaaaggaaataattattttgcagggttgttgtgagaagtaaatgtatgaatgatgcttggcacagtgcttaagcatgtaatagtgtacaacaagtggactctttaggaaaattaaaataacacttctgtgctgtttattatatatatacactgctattttgaaaaaaggtacattactggatcagatatgataaattttgacaagaattagattatttttaaaaacaccccaaactttacgtttaacccacaatttatttgttcatattttaggttgaatttttaggagaagaaggaactggcttgggacccacattagagttttatgctctggtggcagcagaattccagagaactgacttgggagcttggctttgtgatgataattttccagatgatgaatctcgtcacgtaagaatatttctcattttgtgacttgagttgtgactctgctttcaaaagtgttaaaaataggttatgtgttcagagcataagccaggtttctgactctacttttattattgaataatcttgatgcaattaaaatagttctaaagcgataaaatttagtcaccaaaagctatttaataaaattatatacttttagatagccaaattcatgaagatgtttaatgtttatggatttttttcttagatgatgataggcttagtttctattaacttttgtttaattttatttgcatttcaccctctaaaaaattaggttgatcttggaggtggattgaaacctcctggatattatgtgcagaggtcatgtggactgttcacagcaccatttccacaggatagtgatgagcttgaaaggatcacgaaactgtttcatttccttggaattttcttggccaaatgcattcaagacaatagacttgtggacttacctatttctaaacctttttttaaacttatgtgtatgggtgacattaaaagcaatatgagtaaactgatttatgag

SEQ ID NO: 12155 - DNA, 2300 bp, Homo sapien
ggaagccaaagagaaaggtacctgcatttagctgaagtgccagcctgttccacccagagaagcgcgctgtgtgaaaaccaagggaaagaagtctgagctgctggaacctcttctctgtgaattcatgcataatagtgtttaaaaaaaatagccaggcgcggtggctcacacctgtaatcccagcactttgggaggccgaggcgggcagatcatgaggttaggagatcgagaccatcctggctaacgtggtgaaaccccatctctactaaaaatacaaaaagttagctgtgtgtggtggtgggcacctgtagtctcagctacttgggaggctgaggcaggagaatggcgtgaacctgggaagtggagcttgcagtgagtagagattgtgccactgcactccagcctgggcgacagagcgagactccatctcaaaaaaataaaaaataaagataaaaataaaagacctctggactgtaaaaatgtttctcttccttgagtagaagtgtggtgtcctctcccccaaagaaatacttcaggcaaattttaattttgtcctaagcctaattgtgtaatgtctttactattcaaatttaatgtatttcttgctgaaagatgtgagatggcttattgtgcaacaaattactcaattggttagaaaatggtcagatattatttacgaaatatttgtactactttgaagatagtccctctaatcatggaagaagtaatttaccaaaaaaaaaaaagcatttaaaaagtttctgttttcaggctgggcacggtggcccatgcctataattccagcactttgggaggccaaggcagacacatcactcgaggccaggagttcgagaccagcctggccaatgtggcaaaaccccatctctacaaaaaaacacaaaaattagctgggcgtaattccagctttttaggaggctgaggcataagaatttgcttgaacccgggaggcagaggttgcagtgagctgagattgcaccactgcactccagcctgggcaacagagcaagactcattgtaggtgctcaataaatattttgttgaatgattgtttaccttaagtactcttccaaaatagttgtaaaaaaaaagttataatttaaactgtttgttttcttccctgatagttacatttttgtaccatttaatgccatttacaaagcatttatatacatagaactataggcatgttgtgataactggcattgattataatttgttttataaatgaggaaattgattctgcacgtacttagctgatttgcctaagatcatgagaaaatagtagcacacatgagagtagaaccttcagcttcttattcctaattgtcggttcttcctcccaccataaatggattgttattaaaaaaaagaaaatgtggccgggtgtggcggctcatgcctgtaatcatagcactttgggaggctgaggcgggtggatcagttaaggccagaaattcaagaccagcctgggcaacatggcagaacccccatctctactaaaaatacaaaaattagctgggcgtggtggcacacacctgtaatcccagctactggggaggctgaggcaggagaatcacttgaacccgggatagggaggttgcagtgggccgagataatgccactgtactccagcctgggtgacagaacaagactccatctcaaaaaaaaaaaagaaaaattgttttaaaattataattaccgttttgatggcggctttcagtttgaaagatagcttaatcatttctaaatttctctgataggaaacatttttcctttttttgaatgatgttggggcttggacaacagattattatttttattgaactgctaaaataaggaggcaaaatatagacccagtactttctcagtttgcttaaggcagattataataaaaggagtttcatatatttttacttgtgacaggaagcagtttatgtaacaaaaaaagattactgtgttttaaaaatcacctgataaaatactattttttaatttcttaaatctttgaattctgttgctggtttagtagtacattcagctgttaacgtatgctgcagctcatagatatttttctatttcagagcaatagtatggttacagaaccgacgtgaagccactgtggagcgaacgagaaccacaagcagtgttaggcgagatgaccctggagagtttcgagttggtcgtctcaagcatgaaagagtaaaagttccacgtggcgagtcactgatggaatgggctgagaatgtcatgcaaatacatgcagatcggaaatcagttct

SEQ ID NO: 12156 - DNA, 2300 bp, Homo sapien
ttttcttcctttttgtgagaatatagcctctcctaattcatagcaagaatttgatatgatgttccatagttttaagagagtcattatatttctgtttctgcttattaaacgtgtgtgtagcaaaatgatgatgattacaccaaagtgttataaattcattgcataaggtgttttctgatttattatttctcatggtggccctgtgcccctctctactgatttgttattatgttaacttcaagcattagttcttggtcatgggaagttgaagatgattgtgggtaggaaagagtgaactggccgggcgctgtggctcacgcctgtaatcctagctctttgagaggctgaagcgggcagattgcctgaggtcaggagtgtgagaccagcctgggcaacatggtaaaaccctctttactaaagtacaaaaaattagccaggtgtggtggcccactcctgcagtcctaactgcataggaggctaaggcaccagaatcttttgaacctgggaggcggaggttgcattgagccacgattgtgccatttgcattctagcctgggcaacagggcaagactctgtctcaaaaaaaaaaaaaaaaaagttagaactactgattgacttttaaattttgttgttaggtttgactagccttaaaaaaatttattgttggccgggcacagtggctcacgcctataatcccagcattttgggaggccaaggtgggcagatcacaaggtcaggagttcgagactagcctggccaatatggcgaaacctgtctctactaaaaaatacaaaaactaaccgggtgtggtggcggatccctgtagtcccagcttctcaggaggctgaggcaggagaatctctttaacccgggaggtgtaggttacagtgagccaagattgtgccattgcactccagcctgggtgacagagcgagactccatctcaaaaaaaaaaaaaaaatttattgttagatgatgaaaaaaattaatataatttttattttagattcaggggatatatgtgcaggtttgtcacaggggtatattgtgtgatgctgagatttggacttctattgatcttatcactcaaatggtgaacatagtacccaataggaagttttcagcccttgcccactcttgcactccttttggagtcgctagtgtctactgttcccatcttgatgtccatgtgtacccaaggtttagctcctacttataagtgagaacatatgatagaagattttcttttttatattcttaaagctggtagatactttaagactgctggggtgaaggatcagagtaacatcagtttataccatttgtgtatgctgtgcaagcttttactgtgttttgtggtttttctcttaccgcaggcacgaatactataccatgttgtgttttgaagagacattttattctatgatgtggtcaaatctgtgaaatacagagctttttaatgctggtaaaaaagggaagatgagaaaaaaaaagggacatcagtcagttgtaacataccggagatagaatttcaatatatgaagttagattatgttctttaaaagacaaatcaaagtggaactggtttattttgtgtaccaccacatcatgttaatcacaaccagttcctaaattgcaggtggctccttacaagtgttaaagggtaacatattttatcaaatttaagatgctgttgagtgttaagacacaccattttttttctgttactaaggttaaaaatgttgcaatttaattctgacttgccattgtttgtaagatacattccgatttcaaagcattacaatgttttaaaaatgtagacctttcaacctgagaaagttgataacagcaaaaaaatgtggacccttagaaactaatgaaatataatggcaggcctcttctactggccatccagtaaaaggcactgaatatttagtcctgtgtaattattggactaaaaaccatttggttcagtggtctgcaggtgtaagtttctgagcaattataaattgtcttctggatgttcttcaggaatataaagtattttgttttctatcctttgtgcaattctgatattatattttactattttttccagatccagtaaaaacttctgttataatccctttagtcctctttttttcagtttttatgaagaacagtttgtcagcatcttcatttatgcaggacaatgtaatttgacccagtctccatcgaaggcaagagattataagaaggaaggagataaaaatgatgcaagttgttttgaacttccttatgtgctagataatatggataac

SEQ ID NO: 12157 - DNA, 2300 bp, Homo sapien
aaaacaattcacattaaagagataggaaaaaagtaggtaacgtgcttgaaaacagcattattaaggtgactgtctttcatattttctttggtttaggtagcaaaacagtggtatgattttgaccgatcttcatttgtttttgttcgaaaattaagagaaggacaaaattttatatttcggcaccagcatgattttgatgaaaatggaatcatttactggattggaacaaatgcaaagtaagtcagtcattttactttaagctggagtgaccatattcacttggtaaaagaattctaggaagtagaataaaattgttagcactctgaatattctgtggtttaaggaattttgacttgtaggtagaagttaagattatccaaattactttttatgaggaaaaaatgtctaaattgctaattctagaattgtacttaatataattctgtatttaaaaccttgtgcaaatgcaattatcttaacgttgttatttgctaatttttctttatttttgtatagaactgcttatgaatgggtaaatccagctgcctatggacttgtagtagtaacgtcatcagaaggaagaaatctaccttatggccgcttagaagacatactaagtcgtgataattcagctttaaattgtcatagcaatgatgataagaatgcctggtttgccatagatctgggtctctgggtgataccatcagcatatacacttcgtcatgctcgtggttatggaaggtctgcactgagaaattgggttttccaggtatccaaagatggacagaactggacttctttgtatacccatgttgatgactgcagtctcaatgaaccagggttagttgaggagtctttgcaaattggaaaactcactaaagagctttgtttatttttataattttatactctagagctctcttccttgtgaaatattgaagcaaaattttctttctaaaaacaaatcacttgatactttaggcattaaaactttgaaacactgactttactaaaactttgtcaaaaggtttagtttaaataatagaaagccgagctattttacactgtatcttagccaaaaggctgagatgctgtgaatatttattttaaaaattggtatatagctgtatatacatacgcgcgcacacacacacacacacacacacacacacacacacacacacacacacacatttatgcatacacacacagcccactaatggaaacaagtgaaataaactttccataaactctccatataatcacataatacttaggaatgttcaacatattagcagtggctattgctcgttatagaattaaggctgacttaaaatgtttttatttttatccttaaattttatgtattgaataagtttttaaaagacaagtcagtaacttctaaaaaattagttctactaaattttatttatgcattttggcacatatcagggggtagattatgtacccaaattgcttttggcatttgatatggtatgagaggagcttcttaacattaggattaataggtgatgttttcacccctttcatgctttaaagacaaaatattaatacgttatttaaaagtttgcaaaaatgtttttaagtccgtttttccatcataagagaatttctcctactctttgtaaaccatcctttttttttttttaaggagaatggggtcttgttatgttggctgctttctaacttctgggctcaagtgattcccctcacctcagccacccaaacaccactgcacccagcattttgtcttttatctttgaattatattaatcataaatcattaatgttatgagtcaaatcaatagcgtacatttaaatgtttcgtttttaacttgttctcttgactactttttttcctttgatttcttgattcttgtaatgaactgttgagttaatatgaaagttagtttattttttctacaggtctctgttatataaaaaatctttcccatcttgaatttctttttcatcttttaaaatattacataattttttctctaacatattaacaggtcaactgcaacttggcctcttgatccaccaaaggatgagaaacaagggtggagacatgtgagaattaaacagatggggaaaaatgccagtggacaaacacactacctctcattatctggattcgaactttatggcactgtaaatggagtatgtgaagatcagctaggtaaagagatgatacgaggcttttctaacttactaaaacaattacttttgtaaaaagtgatttggtttttatttctccaatttctacctgacaggga

SEQ ID NO: 12158 - DNA, 2300 bp, Homo sapien
tttttatttttgaaatagggtattgctctgtctcacaggctggagtgcagtggtacaatgatagctcatgtaaccttgaattcctgggctcaagtgatcctcctgcctcagcctccggagtcactatagaactataggcgtgtgccaccatactggctaatttttatttttattttgttatttatgtattatttgtagagacgagctctcaccatgttgcctaggctgatcttgaactcctggcctccagtgatcctccggtgtagcctcccaaagtgctgggattataggcgtgagctaccacacctggttgactttttggtctaaaatttaatttgacttaacttggtaattggcagtatataggaggcgatgtcattgattgccagatcataaattaaacagtacctctctttaaagaaattgggaggcagagtttgatggagaaggtgacatgttaagatggaatatacttaatttgagatgatgataaataaccaagtacaattaattcataagtttttcaagttacgataggctgctttgtattgttttttgagatggagtttcactcttgtagaccaggctggagtgcaatggttcaagcgatcttggctcactgtaacctctgcctcctgggttcaagcgattctcctgcctcagcctcccaagtagctgggattacaggcatgcgccaccacacccggctaattttgtatttttagtagagacggggtttctccaggttggtcaggctggccttgaacttccgtcctcaggtgacccacccacctcggcctcccaaagtgctgagattacagaataggctgcttttaaggtactaagtgcaaaggcagagatatggattgccacctgcttgattaagtaattctggaaaatctttagtttacatagttggatgtcaaagaaataaagtattgttatattcaaattaaatgcttttcttctctagactctgttacggcatggtgcaaatccagatctgagagatgaagatgggaaaactccattagataaagctcgagaaaggggccatagtgaagtggtagctattcttcagtctccaggtgagagctacattctttcttttgaagccatctactgttatttttcagctttcacttccatagctttctgtagacacattaaccttatataaatgaactattcctatgaagtcaaataattatatatgtatatccttatatttaataaacctgtttaacagcttaattttctatgttctttgagattgtgactgcctgattccagaataaccaaaatctaaagttcaaggaatatgggaatgtcagataaagaatactttggtattgtttagataggtagtttgaccaaaaaaaatttttttttttttttgaggtggaatcttgctctgtcgcccaggctggagtgcaatggcgctatctcggctcactgcaagctccgcctcccgggtttacgtcattcttctgcctcagcctccctagtagctgggactacaggcacccgccaccgtgcccagctaattttttttgtatttttagtagagacggggtttcaccgtgttagccaggatggtctcgatctcctgacctcgtgatccgcccgtctcggcctcccaaagtgctgggattacaggcgtgagccactgctcccggctgaccaaagttttaagttttcagagggttgatgaatccagaagctctgtgaaataatttttggaacgaagtggagtatccaaaattatcttcttaatttgttattgagcacattgaagttactagtgctctttagtattcttataagcatcattgaaacaatgttctaatttcagtgtatttgttaattagagataattattatttgaagttggatatatcttaaggtttttttccttgaaagcaaaagtttccaaaaaagtatttctttaaaaaatatttgtctgtaggtgattggatgtgtccagttaataaaggagatgataagaaaaagaaagatacaaacaaagatgaagaagaatgtaatgagcccaaaggagatccggaaatggcacccatatacttgaaaaggttattgccagtgtttgcacaaacatttcagcaaactatgctgccttcaataaggtagttattcatactatttgatgtgttagtcaaattacaccaattatatggttttatttatctcccttttccagaagtatttgaggtttattttaatgttaaaaaggtgtggtaagaataaaatttagatgagaagtgggaaagccctatcttttc

SEQ ID NO: 12159 - DNA, 2300 bp, Homo sapien
ctagtttttccagtgttgtagtccagaacttgctacttagctcagcctaatttctgcattcctcattcaaggccttccccactttagctccaaatttctctctctgttgcttactgttggttctttgctgggggcacaggtgacctttcctatgtctaggaacatatcaggctttatgttcttccctttcctttcagtgtctacattgtacccattcttcaaggtccagagggaatgccacttccttcttgaagtttcctggcagctccaattcacactcatgacatctaaataattatcctcatgtgttgtacttgggacaaaatagttgaatcctctttttcctcttgtttcgttaacaggatacctaaacggaccattacctgcgacaacgggacatgcgcggatagctatctgaagtacaaatttgtcatttccaaaatactggttctttttctaaagaagtagtaaaaaagaaagaaaaaaaagaaccagtattttggaaatgacaaatttgcttagtcgcccaggctggagtgaggtggcattatcaaagctcactgcagcctcaatttcttgggctcgagggatcatcccatctcaaccgctccagtagctgggaccataggtgtgcgtcaccgcatctgggtaattattttttaaattttaatttttttgcagagaccaggtctatgttgctcaggctggtctcgaactccgggcctcaagagagtaaaatcataaagtgctgggattacaggaaacgcagcggacccaaattctgttctttactcatacctagcagctcctctggttgcctgagggaccatgtctcaaacactatcatgtcgtattaatttttctttttgtttaaaagctgaaagtgagagtacagtaggacgtctccgggctccaactacgtcctataagcatgcatcctttattctgaatgcgtgtgaaataaagtttgaaaagaataaccacagacatacttgtgaccacaagccacaagaaacgtagtcaaaagtgcactctcagtgctgctgccgaccgggcacggcgctgggcctgcatttgcgctttcctggagcctcagtgtctcatctgtacaacgttgataatcgtcggcagcacctctttcccagggttgctctgaagggttttctttggggtgaaccgccaggcggtcggcctcccaggagcggggggagacgccttccttacgcgacgcacttccgtgcgcgaggagggaagatcgtggctgagtgcgggtggcctgggcggaaggctcagcggggacaggttgggccgcagctttgctgtgctgtgccgtgcgacgccctccgcaggagcgcgcaaagtgttagccacggcgccaagcaagctggacgtgcgtgcatgagcgcgctcggactgacagggaagcgaaaagggggccagggcgcaccatagaaaagccgcggcagaaacgtacgacacagcccgaggcggcgggggcgagagctccggggcagggacggcgacgcggcgtacccggtttggcgcccctgcgcggcggtcggccgtcccgcagcgccccaggtggccgccggcggggtcgccgccgggggagtggatttgctccgcctccgccgggctcggctgccctcggcagcttccccgcctggctctccctcgaccctcctcccctccccctcccggttcgcgatggactgggcctccccgccgcgccgccgccgccgtcgcccgcagcaccgcgcgggcctctgagttgcagggcctgaggagccgcgtgctggggactggacgtccgctggctgctgccgcacgcgagaacctctcgcttccctgtcaccaggtcctcgcggaggaaggggagggacgaggcgcggcttttcctgtgccgcctgcccggttcgacctgcgcggcctgcggcttcttgggaactctagggccgcggccgggcctggctctgccggcggcctgttgggagctggatcggagcggtttggaacgacaagcccgagtaagagcctgcgggaaggggaggcgggagcgcctcggaccgtcggaagggccctgcgtgggggcgcggatcccggacgcccggcgagtggcggaaagcgagaccccggcgccgagtgaggtcggccaggctgctgccgacttccccgctggcccctttgttcccctcccggggccctgccggcggcggggcccggttgcccgcgccagagcctcaggccggctccttttgcccttgagaagggttcgctgccaggccttcgagttccgggcg

SEQ ID NO: 12160 - DNA, 2300 bp, Homo sapien
cctgcctttgactcctgagtagctgggactacaggtgtgcaccaccacacccagctaattttaaaaattatttgtagagacagggtctccctatgttgcctaggctggtctcctactcctgggctcaagtgatccccctgcctctgcctcccaaagtgctgggattacgggtgtgagccatggagcctggacggaaatttttaagttaatcatttaaattctgatatatcttctttcaaaaattatttttagatttcttccccattcatattgccaataactagacttttctttcctccattattgcagcatttcgacaacctccagctagtctcgtctagatagatccttttagtcgttctagacactttccataattagtcttcttaagactagtttttccagtgttgtagtccagaacttgctacttagctcagcctaatttctgcattcctcattcaaggccttccccactttagctccaaatttctctctctgttgcttactgttggttctttgctgggggcacaggtgacctttcctatgtctaggaacatatcaggctttatgttcttccctttcctttcagtgtctacattgtacccattcttcaaggtccagagggaatgccacttccttcttgaagtttcctggcagctccaattcacactcatgacatctaaataattatcctcatgtgttgtacttgggacaaaatagttgaatcctctttttcctcttgtttcgttaacaggatacctaaacggaccattacctgcgacaacgggacatgcgcggatagctatctgaagtacaaatttgtcatttccaaaatactggttctttttctaaagaagtagtaaaaaagaaagaaaaaaaagaaccagtattttggaaatgacaaatttgcttagtcgcccaggctggagtgaggtggcattatcaaagctcactgcagcctcaatttcttgggctcgagggatcatcccatctcaaccgctccagtagctgggaccataggtgtgcgtcaccgcatctgggtaattattttttaaattttaatttttttgcagagaccaggtctatgttgctcaggctggtctcgaactccgggcctcaagagagtaaaatcataaagtgctgggattacaggaaacgcagcggacccaaattctgttctttactcatacctagcagctcctctggttgcctgagggaccatgtctcaaacactatcatgtcgtattaatttttctttttgtttaaaagctgaaagtgagagtacagtaggacgtctccgggctccaactacgtcctataagcatgcatcctttattctgaatgcgtgtgaaataaagtttgaaaagaataaccacagacatacttgtgaccacaagccacaagaaacgtagtcaaaagtgcactctcagtgctgctgccgaccgggcacggcgctgggcctgcatttgcgctttcctggagcctcagtgtctcatctgtacaacgttgataatcgtcggcagcacctctttcccagggttgctctgaagggttttctttggggtgaaccgccaggcggtcggcctcccaggagcggggggagacgccttccttacgcgacgcacttccgtgcgcgaggagggaagatcgtggctgagtgcgggtggcctgggcggaaggctcagcggggacaggttgggccgcagctttgctgtgctgtgccgtgcgacgccctccgcaggagcgcgcaaagtgttagccacggcgccaagcaagctggacgtgcgtgcatgagcgcgctcggactgacagggaagcgaaaagggggccagggcgcaccatagaaaagccgcggcagaaacgtacgacacagcccgaggcggcgggggcgagagctccggggcagggacggcgacgcggcgtacccggtttggcgcccctgcgcggcggtcggccgtcccgcagcgccccaggtggccgccggcggggtcgccgccgggggagtggatttgctccgcctccgccgggctcggctgccctcggcagcttccccgcctggctctccctcgaccctcctcccctccccctcccggttcgcgatggactgggcctccccgccgcgccgccgccgccgtcgcccgcagcaccgcgcgggcctctgagttgcagggcctgaggagccgcgtgctggggactggacgtccgctggctgctgccgcacgcgagaacctctcgcttccctgtcaccaggtcctcgcggaggaaggggagggacgaggcgcggcttttcctgtgccgcc

SEQ ID NO: 12161 - DNA, 2300 bp, Homo sapien
gacctcgtgatccgcctgcctcagcctcccaaagtgctgggattacagacatgagccatcatgcccggccgaaagggtttttttgtttgtttgttttgagacggagttttgctcttgttgcccaggctggagtgcaatggcgcgatcttggctcaccacaacctctgcctcccaggttcaagcaattctcctgcctcagcctcccaagtagctgggattacaggcatgtgccaccacgcctggctaattttttttgtatttttagtagagatggggtttctccatgttggtcaggctggtctcgaactcctgacctcagatgatccgcccaccttggcctcccaaagtgctgggattacaggcatgagccactgtgtctggccacgaaagggttttaaaaaggaaagtaatatgcttggatttgcgtttctaaaggttcgctcttggcagcagtgtaaagaagaaagccaaactgtgggagataagataataatagtatggacaaaaaggattaaaatgatgaaaagtaaaatgttaagcagttttcaacagaacttactgatagtttgatttaggagttgaaagcgtaggatgacttgaacactcgaatgtgattaacagaaataaccaagtgagggttatttcaaaagtagtctgggctagagatactttctggactatgtgtgtatttgggagctgtcagtgtaacctatgggacaattgaaatcacccagcttgagtttctggagcaagaagaggaccaaaatcaaggttagaggagattcagaagataacgtaattacataagccagtttttaataaagagggagtggtcagcactataaaatactgtagagaggccaaacagtgtgggggatagagctcacagtggtgaggcacaaatgagaggtgtaaggcatgggaaagatcaagtataggcttctcttcacaggaagaagagaaatagctaaatggaaagtgtaaggtcaagggataacttttttttaaggtgacattcaagcatgagttcatacttaacgggggaaaaaaaggaggtggacatggggttggagatagaagtattagaaaggaaagcagcgtccctgtctaggcagaaggaataaaatttacagcacatttaacaggattgacctctgccaatatgaggaaagaacagcaggtaaggatggaaaataatattatagctacaagtttttatgttgagggctggccagtgtggctcactcctgtaatcccagcactttgggaggccttggcaagaggaccgcttgaggccaggagttcaagaccagtgtgggcaacataacaagatactgtctctacaaataataataataattcatgttgaggtttatgatgagcttgcttctttcatctcacacacaaaaaaatgggttgtgttttgttgttgttgtttttggatgtgtatcagggaattaggctaggacaggatttagactagctactaagagaaattaaggagttggtcatgacaggttaaatgtttcctgcccaaaaaattgcctcaaaacttagtggcttaaaagagcaaacacatattatattatctgacagtttctatgggtccaggattaggagcagtttagctatgtggttctagcttaggttctctcatgaaattactgttaaggtgttggccagggctgcagctagaggattcatttccaagatgactcattcatatggctagctaagtgaattgtgcatctatcctaggtaaaagagagtaggaataaagatattttagaagaaatggtaaaaggaacccaggagaactttatcttgctgagaataaagacatttttactaaacaaattagctgactctgttgcagtttcaagttgctataggtggttaaaaataactttgctgtaagggaagcagtatagcattatagttaacagtacactctctgtaatcaagctttctgccttactaattgtgtgacttggacaaatgactgaatttgtgtttcttgtccataaaatgagagataataagagtacctacctcatgatgctgttatgttgattaaatatttaatgtatataaagtgcttataacagtgctacatgttaactttaaatattaactgtgtacttattttaccttaaaatcactcagatgtcttttataaaataaatcctattcatccataaaattttgctttcactgctactgtgcctcttgagtatagtcagctcaggtattatctcctcaaggctttctctgatcacccaggataggctgtcctgagc

SEQ ID NO: 12162 - DNA, 2300 bp, Homo sapien
ctagtaccaacaaaacaaaacacccacaaaggccaggcacagtggctaactcctacaatcccaacactttgggaggctgaggcgggtggatctgaggtcaggagttcgagaccagcctggccaacatggtgaaacctcgtctctacaaggtaataaaaaaaaaaattagctgggcatggtagcacatgcctgtaatcccagctactggagaggctgaggcaggagaatcgcttgaactcaggaggcagagattgcagtgagattgtgccactgtactccaacctgggcgacagagcgagactctgtctccaaaacaataaataaatagaatagtctactaataatataacctttcaaatctacatgctttcataaatgctagatgagttaactcttcaagagaaaatgtatttgtccttttggcattttcagaattaaaggtaatagtagatgctagatcaaggctagtatttcccctttgaggtattactttgtagtgagaatattgtatagtgatatatgtttattcagtagtccacaatagcttagttgtagtaattaaacagtgttctccatatagtgtttgttttctgtttgagctttactctcacgttaatatattttaaagctttataccagaataaggaaaacttaattatgtttttttaaaactagaaaataattatactgggccaggcgtggtggctcatgcctataatcctagcactttgggaggcctaggcatgtggatcacctaaggtcaggagttcgggaccagcctggccactgttgaaacccgtctctactaaaaatacaaaaattagcagggcgtggtggtggtcgcctctagtcccagctactcagcaggctgagacaggagaattgcttgaactcaggaggcggaggttgcagtgagccaagattatgccactgcactccagcctgggcaacagagcaagactcggtctcaaaaaaaaaaaaaaaaaaaaaaaaagtgccactggaggctgggcactgtggctcaacgcctataatcccagcactttgggaggttaaggtgggtggatcacttgaggtcaggagttcaagaccagcctgaccaacatggtgaaaccccgtctctactaaaaatacaaaaattagccagacatggtggcaggcacctgtagtcccagctacttaggagactgaggcaggagaaccaattcaacccgggaggcagaggttgcagtgagccgagattgcaccacttcactccatcttgggtgacagagtgagactctgtctcaaaaggaaaaaaaaaaaattaagcactgaataaaatttgtaagtattgagctgggttcagtggctcacacctgtaatctcagcactttgggaggctgagatgggtggatcgcctcaggtcaggaatttgagaccagcctgggcaacgtagtgaaaccccatctctactaaaaataaaaaaaaattagctgggcgtggtggcgggtgcctgtaattctagctactagggaggctgaggcaggagaattgcttgaacctgggaggcggaggttgcagtgagccaagatcgtgccattgcactctagcctgggcaacaagagtgaaattctgtctcgaataaagaaaaaaaaattttgtaagtattggacactaattgggtaaaactttttacctgattaagaaaacatattaataataacatatgaatactttttttcagtgacattacataaaatactgctatataggatcataaatcccaaaattcaagtgtgaactaaaatggatctcagtagattaaagcacagtatttgggctagttctttaagatgtatttttatctactatttgaataactactgaatgtgtgagcttctgatatggtagttttgttttctgtattacttagataattgattttcttcttgtcagatgctaacatcagagaagttggccttgagggggcattgttgatcttactagacaaggagacagatgagagattatgccatgatatcaaagagactttaaattatatgcttacatctatggcagtggaaaaactctccctgtggttaaagctttgtaaagatgtacttgctgcatcagctggtaagtattggacattatcagttaaaataataaaattgaaatttgaaactttacataaaattgtttaccactgagaattcatcagtcttgtctaactagctggattctgactgtctgattgttgcttttcttcaaatgaagattgtatttctagtgttttagaattctctgtaatttgaaca

SEQ ID NO: 12163 - DNA, 2300 bp, Homo sapien
taacattagttatgggagccctagaaagccccaaccccttgctgagatgtgcagctgcagagtcatgggctagattagcccaagtggtagatgatggagcttttactgctggattagctcaagttagctttgacaagtaagtgaatttcttatttaatattcagaggctatgtttcaaaactgggtatagctttctggcttgttggaactagtaagatcttcattctgagatttaactaagaaaagaaaaattgtcaaatgttgactgctaaaggaaagaaaataaaaattggccggctggtcttggcacataaaacaactactatttcagctatagtctttatataataagaaagatcagaatctatatgagtgatgtaattgatcatcaatgggatggactctaggatagtgaaatatttatacagttttataatgtaaaacatatatgataagtaataagaacaaactacaggaaaaagaaaaggctgtaggctgcagatgaggaaacaaacggtactttcatgtcttttttttttttgagacggagtctcaccctgtcgcccaggctggagtgcagtggcgcgatctcggcttactgcaagctccgcctcccaggttcacgccatcagcctcagcctcgcgagtagctgggattacaggcatgtgccaccacccggctactttttgtatttttttagtagagacggggtttctccatgctggccaggctggtctcgaactcctgaccttgtgttccgcccgcctcagcctcccaaagtgctgggattaaaagcgtggaccactgctcctggcctgtactttcatttctatcagttgtataacttttagtagattacttaatcctctcagccagtgttcttctattccaggaggtactgcgctacctacttaagaatgttaaggtaaatgagatagtaaatataaaagtaatatgggaaaaaagcctacaaataaaactttgtggttatattagttatatatgtataataagttatattaggagtggtggtggtagtattgatagcactttgaccttggagcctactgaatatgtgtgtctgatttgaaggatggagtcaggttattaacttggctctaatcccaactctaccatttgatagttggttattttgtgagagctatttgagctttcattttggtttcctcatctatagacaggaactgataatagtatgaattccagggttgttgagaggattaaagaagggctaaatataaaccacttaaatgagcacacagtacatagaaaattcctaataaacattaacttctcttgtatttaattttatttattttcgatacaacgtcttgctctgtcacccaggttggagtacagtggtgtgattgtggctcactgcagcctcgaactcctggactccagcaatactccagcctcagcctcccgagtgactgggactacaggcttgtgacactacgcccagttaattaaaacaatttttttttttagtagagacagggtctcattatgttgtccaggctgatctcaaactcctgggttgaagtgatcctcccgccttggcctcccaaagtgctgagagtacaggcgtgagctaccacacctagcctatttaattttaacatcaaaattaagttgaaactctatgaaattaaagtatctcagcatttgagtttttaaaatgtaacttaatgataaagtaataataatgcttatcttaaaaaccttcttcatgtatatatatgaaagacattgaaactgctcatactaaactaatcattaataatatgaggacattttgattcaaaatgttttcctttgcaagatgcctttcggttacttcagaagtttttattagttagccaaaaatgtatttctaaattttgcaactatccatataaaaagttttgcctaagtgacagtgtacatgcattagtttttgtgttttttttcttttgcagtgattaccgtttatttttatttttatatttacagattgaaatcagcaagggatgtggttaccagaacaggacactcattggccttggggtccctacataggtatttaggaggaataagttcttctcaacacctaaattcttgtattggaatcctttatactttggcgcaggacagcacttctcctgatgtgcaggtgggtacctcatgtgatacttcccttgaaattcatgatttttagatgatgcagattgtgtttatattgaacattaataatttatgaatatagtttcctcccatagtaattgtggaagccgtt

SEQ ID NO: 12164 - DNA, 2300 bp, Homo sapien
cattttccatgtttcaaaagaattttcaaagcattgtatagcattttcatttgtggaggactagggcagtcttatttatgtttttcccctgttttagaagacagccttttaacttctttgaggaaaggaagcaataggtcatgatcttagtcatagtctctaagatgtttttgacatgcacttcagggtccattctgatttgacctctgaccccttgtgtgactttgtgtgttactgtgtagactgttctgtaaattttgcattttgtttgaatttttagtttatttttgtttctattaacatgctttttgcaaatcaagaacttacattaaaatttagtctgtaaaatatgaatcacagttttgttctttgtcatagcagcctcacgtcaaagcattcgcagagtatctttggaggaagttctggaattactaggaacagggtttctacgtgggagttcaggattccttcgagccagtggagatatgctgaaaggaaccagttcagtcagtagggatgttcgagttggagttactcaggttggaatcacaaatcagtatctcagtctaactcttactggcctataatgaaagttttagtatctgactccacagaagtggtactatgcaaggtcaacacttatgctctcatatctataaatagatataaatggtaaggccaaaacattttttttaaactaggttgcaagtaagaggaccttattacctataatgtgttttgcgttcctaataatggaacattttaattttctttgaaacacaaagattttttgtttccagctgttgtgcttttgtgtatcttgtggtttaacatgttttccattgtatttgtgtgtgctcatgcagttcagatttaagctattacatacataattgtttagcataggtgaaataaacattttatgtggctttaaccctcaaggagtacagcatgtagtttacttcagtgcttaaatttttcatcctaaacgagttttaaaaggtaaactcttggaagagttatcttaacaataaaacaaagagatatctgccttctttccttggattatctttttttttctaaacaccgttatcattcaaagcaaacttgtatttttgaaaaattcacatatattgtctttgttttatactgcatatagtctccatgaaaatatgagcttcccagtataattgtaattaaactgtgtgtttctaaggaacagataacttaaaactactttatatctatggagtaagaaaaaccattaatattcatgaaaataaagaactaaatttccttagagttataatgttggagcatagttaattcttataatgtgtttgtatgtttaaattgagatttcttgttcagaatgttaaatctctcggagccgttgttcacagaagccacagatacattttacatgtaagctgggtatgctgactatcctgaaactgtagtctgaccaaaataaaacaggagggtaacagaaatgaagtcttgattgaaagactatgcacttcaggccgggtgcggtggctcacgcctgtaatcccagcactttgggaggccgaggctggtggatcacgaagtcaggagatcgagaccatcctgggtaacatggtgaaaccccgtctctactaaaaatacaaaaaaattagccgggcttggtggcgggcccctgtagtcccagctactcgagaggttgaggcaggagaatggcgtgaacccaggaggcggagcttgcagtgagctgagattgcaccactgcattccagcctgggtgacagagcgagactccgtctcaaaaaaaaaaaaaatgcacttcagttctggcttaaacaaaaacaaaatggtgctatgtttgtatatttcaagtggcataaattaggaaagaatacaatttataaggaataagaaaaatattaataaatgctacatgttttgtgggggagaatacagaattgaaacaatttaatattgaaaataaaactcttttcctttttaggcttatgtggtatttgtttcaacactaggaggagcttggctagagaaaaattttgctgcctttttttctcatatcctaagccttgcgtcaccgtcacaccctaaagccacccaaactcagatcgatgccgtctgctgtcgccgttgtgtttcatttattcttcgaactactataggtggtcttcttggagaaaaggctcagcttgctgctgtaaaggatatttgccaggccatctggaagctaaagaaagttatgggtatggatctctactaagacagtttgtttaacagtg

SEQ ID NO: 12165 - DNA, 2300 bp, Homo sapien
ttaaaaaaattttttttaacttttaaacacacacattagcccaggcctacacagagtcagaaccatcaatctcactgtctttcaccttagtatcttgtcccactggatggtcttcaagggcagtgacacgcatggagctgttatctcctgtaatagcgatgccttgttctagaatacttcctaaagggcctacctgaagctgttttgtagttaactttttataaataagagtatattttaaaataacaataaaaagtataataaatacataaaccagtaacagttgtttattatcaagtattatgtactttacataattacatggtctttacttttacatgactggcagtgtagtagggttgtttacgtgaacatcaccacagacacgtgagtaatgtgttggaatgtcacaaggcaataggaatttttcagctccattataatcttacaggaccaccgtcatatatgtgatctctgtcattgaagaaaatgtccttatgtagtacgtgactgtatatgaaagtttattatactattcttacagcttttttctaattttgagtttttctaataaaaagtttaaaatatatatttatgtgtatccagattccattcactccacttcactttaaccaccttgatccaagtcactatcatctcttgcttacattaataaatcattcctaatggttttccctgcttctatctttacccccctctataatcttctctcaacacagcagcagcatgacatattatatcactcgtctgctcacggtcttccactggcacctcatttcagtcacagccttattataatgacctacaaggtcctatatcttctgccctcttaccatccttacactctgacctgtctcctacctaccccctccactgctccatccccattgctctgtgtaaactcacctggcatcctataaaggcctttttgtcatagccatttcctctgcctagaacactttttctccagataccctcatgactaatttcttccctacattcaaactgtgttaaaatgtcaccatttcaatgcatcttaccccaataccctatttaaagtcacaaactacacttcactccacccccatattcctgacctcattttgctctgttttctgcatggtttttaatcactgtttaatatacatagtcatttattacgtttattgctgtcttttcttagaatttatgatccacagagcatggattttgcactattcaataatgtttcttccccaaatgccaagttagattttcatttgtctcagatggttttctttaggctagggaggaggtttttttgttcataactgtaacaaaagtttatttctgtactcttgtagagggtcagagcttgtgaccattaattttcaagggagaaatggtttcttcttttttttggggagataatattatctagtcacagggagaaacccagctgtgtcaaactgaagtcgatcttaaacattcctgccttaattaatctcttagttattgtagcctaagagccaactgagtagttttaatgaatttagctttgatttcttcagagactgaaggaatagcaaaagttttattgccaatagagaatttttaaaaataggacatttacattatataaacttctttgacagttgtacagcatttggaaaaataaaattatgattttggcattttccatgtttcaaaagaattttcaaagcattgtatagcattttcatttgtggaggactagggcagtcttatttatgtttttcccctgttttagaagacagccttttaacttctttgaggaaaggaagcaataggtcatgatcttagtcatagtctctaagatgtttttgacatgcacttcagggtccattctgatttgacctctgaccccttgtgtgactttgtgtgttactgtgtagactgttctgtaaattttgcattttgtttgaatttttagtttatttttgtttctattaacatgctttttgcaaatcaagaacttacattaaaatttagtctgtaaaatatgaatcacagttttgttctttgtcatagcagcctcacgtcaaagcattcgcagagtatctttggaggaagttctggaattactaggaacagggtttctacgtgggagttcaggattccttcgagccagtggagatatgctgaaaggaaccagttcagtcagtagggatgttcgagttggagttactcaggttggaatcacaaatcagtatctcagtctaactcttactggcctataatgaaagttttagtatctgact

SEQ ID NO: 12166 - DNA, 2300 bp, Homo sapien
ttatttatatgaggactgtggtctcattaaaggattgttcaaactcttcaattatactatgggataattaatgaaccacacaagactcaatagagctttttaaaaaaatgcagatgtcattaaacgcttaattcagaataattttagaatttaaaaaattcagaatttaacccttatgttattcatagttaagaaagactattataaactacctcaacctttttgaaacaaagcaagaagaaaggtaagtgtattggttaaagacaagtaaaaaaataatttttttctgtagataatatattcattagtttaatgtagttaattttaattaataatttaagaattaaaaaggtactttggagtcatgtattttctgtgactaaagtcagatacaataatgaataatactaaaaaagtgacctaatctaacatccataaatagtggagggaacttaagctagaattcaggtctcctgactttcaggtgaggagtcttttcttattctcctattctatagtcatctaggtaaaacaactgcattccaaggcacaacaaatccatactacagtattctccaactgtcactattcttatattataaatcctgcctgcttatcagtgaagaaaaaaaaaaagtcaatggcattaaaatgtaacacaaatctcggcttcgatactttatctaaaattactttctcaaagacatactttctaaaatgtttggaaaattaaacaaaattctcctctccccatccaactaatgctcaattctaaccacacttctgctttccctacagcttaagtaatttcactgggagtattttctctggaagttcttaagtgtacttgtgggcccctttttttcctccttaaacttctaatatctttcaggctgtaaattccttaagggcgcctagccccaaaaaagtgctgcatatttgttcaataaatgaatgcacataaaaacaatggataactatgacctttaatgtaggagctcaagccattttattattatctgacttgacagtcaagaaaattatcccaacttgccagaggtatccattactgtgataaataaacactataaaacgctttataaagtttctaaagactttataatcacttgaaataacgccgcgttggccgagagtagggtgaaagaaaatgtttcctcacactaagcaaatgccaccaaaggaaaagctttctttcctggagagaactgcaacagttagaaagcaaatatccacactctccactgctcccttctgggaactctctttgagggttcctgcagaaaacgaacgggcctctgaggaagctcgcccgaaggccgggccggggcccggctcctggctgaccactggcgcagcggacgccgcagggcgggtcccgggagcggcgagttggcgaggcgggctccgacttgctgaccttccccacacgcccggcaaccccggctcccgctggcgggcagagtccacgcctacctgttgtgcacaggtgaagccagactttcccgtagtccaggaggaagaacggaccacgctgtttatcagccgaccctgtgccccagtcagccccttctcggcggactccagcccttagggtcaagacacctagcccctcgaccggttctcccaccggcttctttcgcgatcacattgctgccgcgaccaccctcgggatccccgagcgctcaactcatacagcggccctggtgcgttctccttcccagccaacaggcagcccagacacagccccctcgcgcccggaggtgtccccgctccctggatccccgactgcctgcctttgggggtcctcctcagctgagcgtgcgtcccggtccagcaacgttaccggctgctctgctaaccctagcagagtctggaattgccggcggcggcgacagcgaggcattgaggtgggcggggcgcgcgtggggcgtggccggaaagctctcagcggcgagcaccgcgggagctagcgattgggagcgcgccctgcgccgggccgctggtccaaggccccgccagctggccgccgagccatcgagcgcccactctggcaggcgtgactgcttcaccgtcgaaagagcgatggagactgcggcccaagttaggattaggacagcggtttttcagtccggagattccggccacaactatttttgtctgtttttatcgtaagccagagtctttgggtgcagctctgggacacctaaagggcctggagaaattcaggcggggccagtgctgtgggggtagatgttagacgtggaagggaccctagagag

SEQ ID NO: 12167 - DNA, 2300 bp, Homo sapien
ggaggctgcagtgagccaagatcacaccactgcactccagcctgggtgacagagcgagactccgtctcaaaaaaaaaaaaaaaaaagagagagagaatttaaggctgggtacagtgggtcacacctgtaatcccagcactttgggaggctgaggcgggtggatcgcttgggcccaggagttcgagaccagcctgggcaaaatggtgaaaccctgtctctacaaaaacaaaaacaaacaaacaaaattagccaggcacagtggcacacccattgtccctgctacttgagtggctgaggtgggagaatcacctgagcctaggaggttgagcctgcagtgagctgtgatcagactactgcactccagcctgggtgacagagtgagaccttgtcttcttgtctcaaaaaaaaaaaaattacacacacacacacacacacacaacacagaagctagaatgaatatgagaccttgtcttcttgtcttaaaaaaaaattgaacacacacacacacacacacacacacacacacacacatatcacagaagatagaatgaatggggcccctacccaccaaacttgggataattgagcatcaaaataaataatgatagagacagaatattggctggtgtggtggtgtgcatgcctgcagtctcagctacttacctgggaggctgaggcagaaggatcacatgagcccagaagttcaaggctgtagtgtgcaccatgattgcattatcgacctgtgaatagccactgcactccggcctgggcaacaaaggaggccctgtctcaagaaaaaaaaaaaaaaaaagagagagagaaaagagagaaagaaacggattataagtcatttaacaaaatagaaacctctggatccatactaattaatataaatacattaactgaagatttgatgagaaacaagatatttacaaatatcttgaaaggagagtttcagagtctccctcacaaaatacttattaatttacaaaggggggaaaaaagtaaccacactggacaagcctaacagacatcaccttattaaagtaaacatctgtaatgagagaagttaaaatcgtgccacctgatagggtgccatgagaagaaagcagcaacacttctagagtcctgtcatacctagctaaatgtaatcatgagtaaatatcagacagacccaaaatgaaggccattctacaaaaataactggccaggaatctttaacagcgtcaagaatatgaaaggcaaggcaagactgagagttccagtttgaagagtaggaaagatacatgataagtaaatacaatgcctgattctgaacggaatcttttaccataaacaatattattgggacaattggtaaaacgccgagttatgtaaatgttttgattttgatggttatattgtgattatgtagaaggtgcttagggacaatgtggcatggtgtcagcaatttaaatctcaattcagggaaaaaaagttctttgtactatacttgcaacctttttgtaagctggagatagattcaaaatgaaacttgaaaaatgacatttaaaacgctgagtgtagtgggaaaacgcacatgactcaaggtaagaggctattagtctcagttctgccattgacttagtatgtgaccttgagcaagtcactttacctcagtcctcacagtcaaggctctctagggtcccttccacgtctaacatctacccccacagcactggccccgcctgaatttctccaggccctttaggtgtcccagagctgcacccaaagactctggcttacgataaaaacagacaaaaatagttgtggccggaatctccggactgaaaaaccgctgtcctaatcctaacttgggccgcagtctccatcgctctttcgacggtgaagcagtcacgcctgccagagtgggcgctcgatggctcggcggccagctggcggggccttggaccagcggcccggcgcagggcgcgctcccaatcgctagctcccgcggtgctcgccgctgagagctttccggccacgccccacgcgcgccccgcccacctcaatgcctcgctgtcgccgccgccggcaattccagactctgctagggttagcagagcagccggtaacgttgctggaccgggacgcacgctcagctgaggaggacccccaaaggcaggcagtcggggatccagggagcggggacacctccgggcgcgagggggctgtgtctgggctgcctgttggctgggaaggagaacgcaccagggccgctgtatgagttgagcgctcggggatcccgagggtggtcgcgg

SEQ ID NO: 12168 - DNA, 2300 bp, Homo sapien
aacttaaatgaattaaagaaggtaaaataacactaaattagttattgtaccatctcagaggacatagaacccatccacaattaatcccctatccatatggtacactttcagcattgtaggtgtttgagaattatctctgctcaatgatttctcatacaatgacaaggcaaagctctctcacattccagtgaaccaccatcttcttgtaaagccaacttaatgctatgctttgcctttagttccaacttgaaacaaattgtacaacctacagcacctcaatactacatacaatgaacataattgttttataacaaaaattaaagttatacatttgtgaaaattttgctgcatactatatcatctcagcactccagttgagaaccactgtcttacctgttttcaatttcccccattgtggcttactgacataattctagtttctttatttctaatgctttaattcacattttactattttattgcatgcatgtccttccttcttaaattatttgcagaatgaaactaagtgttcaaaaaataaaatacagaaaggaaatgctgtctttggtggccactctctatagccttctgcaaatagaagtaaaaaataagtgagccacagcctattacagtacctacagcaatgtccacgagatcctcactcaataggagggtttaaagtaattagtgatttttgagaagctaaccattaccatccatactccatctattctactcacaggaagggtttcccaatttgttaaagaaaccctctctgtagaaagatctctgcgaaccacataacctattctctatagacctccctatttcctgcagccacatacaaatggacaccaaagtcttttcttattctgggacatagctaatggtttgtatgtcaaagtttctttcaggcctgtaaaatctgaatctgagagccggagagaaaagagactcagtagttataatgacataaaggtgcagacatgaagcaattcaacttgtctgtgctttgcagacaaatgtcaacaactgttggaatccctgcaatgcaacaatcagagatcatgtgagattttgctttctgtttttactaaaagtgtaaacctggctgcaagataaccagcaaacaagcagcttcgattttgtgtacaaaggactgttgattatgcatggactattttcttcagtcacactactttgtatggatagcaacactgtcagtgatgtcatctttttaaacaacagatccgaatgtataggcacattgtgtcaactgagcccaaatcaatgacctgggtaatgcaatcagggtaacactattattcctcatctaaaccatccaagcccatagacaaataaatgctaatctgatgcatgtttaaggaatacgttacatgggaaagaaaatcaagcccttgtttagttttatttacattctaatatgtacttccagaaaatgcatcacagaatttacgtcatatgcatcagaataagctgttttatttttgtattagtagcgggctaagttattaacaatcatactttcttggataagaacatttttaacaaggatatcttctaaagaatgtgtattcgtatagcataccaataccttttcacaactgtggaatcagaataatttatggcattcccgatagaggaggcagcattgtttttattgattggaataaggaaaattttgaaggatgtatatatagcttttagttccatctccgcttgctttatgattcgattatttgtttacttactttcatatgggcataacatgaatttaaatcaagcagatttaaaatttttcaacagttggaacctaagctttctgaggtgaaaaatgtttcttaaaaggtttgtaggaaagagatttaacgagtcttttcaatcgtttaataaaagtatacactgagcgccttctacagagttgggcaggtgctgccgagaagcttagcgctacgccggcctccaagaccgcacatccgggacattcgagagtcagtccgaggccccgccctcctaagggcggggccactgggcaatcggcgcaggcccttcgtcgtgccccgcctcgtctgccccgccagcgcgtcgagggaggggccagcgacacatggcctagtaactgtccggccgcggcgctggcttaagccatggctgagggtagccggattcctcaggcccgggcgctcctacagcagtgcctgcacgcccggctgcaaattcgcccagccgatggggacgtcgcggcccagtgggtggaggtaacgtcagcccggcagctc

SEQ ID NO: 12169 - DNA, 2300 bp, Homo sapien
aaatttctttacaagatatatacagcctttcttgatttaggcaacctccatctaaccaaccttcactccatcctcatctcttttagtcactttgtcctaagttgcacagatcatttacagttcttaacaatccagaaaagaaatgtattttctactcctcttgtgttctctcttcttttctctcttctttctttttttatttttatttttgatatcttttttatttttttatttttattttttagtatttattgatcattcttgggtatttctcggagcgggggatttggcagggtcataggacaatagtggagggaaggtcagcagataaacatgtgaacaagggtctctggttttcctaggcagaggaccctgcggccttccgcagtgtttgtgtccctgggtacttgagattagggagtggtgatgactcttaacgagcatgctgccttcaagcatctgtttaacaaagcacatcttgcaccgcccttaatccatttaaccctgagtggacacagcacatgtttcagagagcacggggttgggggtaaggttatagattaacagcatcccaaggcagaataatttttcttagtacagaacaaaatggagtctcctatgtctacttctttctacacagacacagtaacaatctgatctctctttcctttccccacatttcccccttttctattcgacaaaaccgccatcgtcatcatggcccgttctcaatgagctgttgggtacacctcctagacagggtggcggctgggcagaggggcccctcacttcccagacggggtggccgggcagaggtgactccacctcccggacggggtggcggccgggcggggtctgccccccacctccctccgggacggggcggctgaccggatgggggctgccccccacgtccctcccggacggggcagctggccgggcgggggcttttctctcttctttcatctttcttccttctactctcttcttctttcttcttccttcttctttcttctccttttaatttcctcttcctccttcctccttccttctttcttcttcttctgacaaggtgtcactctgctgcccacgctggagtgcagtggtgcaatcatagctcactgcatccttgaactcctggctcaagcaatcctcttgctttggcctcccaaagtgttggaattacacgcgtgagccaccatgcctagccttagcagtccatttctaacctctttacaacaatctccttgccattctcccagctaacttctacacattattcagattcagcattcagcttagatattacctaatttagaagcttcccctgattgaattgagtgccctttctttgtatcactttgtcctttctcctgtatccctcaatgcttttctcctgtacttatcatattataccgcaattttgttgttaacttattctgtcttttgcactggattataaagccctttagtggaggaattatgtcggtctcaatgctgaatattttaagtctactgtagtactcggtacatagtagttgctcaacgaatatttgttaaataaatgagtcttaagtctggaagaacttgcaaagttctttaccaggttgctggtaaagcaacctgacctttctttcagggaactgtcagcaacacaagccatgaataccaacgcaaaacagactctcactgtagatcacacgggaaaaaataaaataaaaaggtaaaatccttaacggtggtagtatttaaatgaccatatactgcttagtaagaaatcctggggtcattttcaaggtcccccatttcctacttttgttaagctgggtcaagtctctttaaactttctccgttttcttgtccataaaaagagtatactaggtaagtcttctgtctacctcgggacttctgtaagtatcataagagatgttttatatgacaacacttcacaaacgtttagtaaaacgctgcaaaatgtttgtagctggctataaacaagatcatgcagattgggttcctgagccaacaaacccaaagaagaccggttgctaggaagagaaagccgagcgttgctccgtgacgtcatcactccgcgccacccgcgacagtttcccagcagggctcacagcagcgttccgcgtcatggggatttggcagcgtctgctgctttttggtggggtgtcgctccgggctggtggcggggccactgccccgcttgggggaagccgagcgatggtttgtgggcgccaggtccgtggtgctgcagggcagggggaagcgggctgacagatgctgggctg

SEQ ID NO: 12170 - DNA, 2300 bp, Homo sapien
agcctgtgagtgaggcacgcagccctggctcccacccatgcctctcccttcacacctccctgcgagcagagggagccagctccggcctcggccagccccagagaggggcccccacagcacagtggcgggctgaagcgctcctcgagtgcagccagagaggatgccgaggccaagggggcaccaagagtgagtgagggctggtagcatgttgtcacctctcaccagtgttaccaaaacatcaggggtttggtctgggtcctgtggctctctgcacagaaaaccagtcactgagagaatgagtattgccagggaagaaggctttaatcacgtgcagcagctgagacaatgggagatcagtctcaaatccatctccttgaccaactaaaattgggggtttattatagcagggaagaaatgtaattatgtgtgggaaaacaggaactagggaggggtaaggaagaggaactggttaacgagaagcaggtgaccacttaggaacataggaattagggaggggtaagggagcaacctgatggatgaagggtctgccatctcattgtctggatgtggtgatctggtgagtttcagttctttgatactttttgagaaggctgaggatcatttcctgagaaaggaacttaaataagacaaacgttagttttaagctttaagaccagaagggtcaatttctatatttattttaaaaaactactgggttggtttcactagcctttttagtttcttccctttctcaacttgagtgcccttgaactccactctcatggcacaccaggaattttatccccttgaagtattcatcttaattaccttaccatagtttttcgtctttgagttcttttattaaggccattatatgtcagattccttgactgtttcactctttctgtacctttcatttttttcctaacatgtttatatatggcacattatgtcactggcttgctgataatttcagctccttcgtatctttccctttcagttgtgccacaaacccattggtacattccttttactctaaacccataaactccagtttagaatggattcagcattcgactttctctattcttacgcttgggctgctgggtgctgctagagatgtccttttaagtggcatgtggatggcactatgaattaatgatttctagccttgctcaacaacccgtaggaaatttttcttctattttttttctctcttgcttagaaacctgttattctaggcagccctctcttttattctccgtaggaactatttaaaatctgctttgttattctgaagacctctgtccttctacctctccctttacttttaatgcatgattccattttctgtttcacaaagaaaattaaatttatatggtgcaaactttctcaattaccagccagcctccttaaaaatgtatctgtatctgaattcattcttgccctcttcccttctgtatctggttcttagtctttactaactcttttccatcagcatttaaacatgcatgtggaagacagtactgattggctatgtagaaactattcccagcccctgtctctttactgcttaaaagtaggtctagaaagtcaaaagataatctagttgctcttagagctgagtgtggccatgtgaaccagttctaaccaatgagacacaaggaacagtctgtggagatagcctctatgtaagatgttttgcttcctaatagaaaggcaggttttgttcttcctctttctttgtagggaatataaagacatgatcaacttggcagtggtagccattttgtggcagaacaagaagatagaaagaccaaagccttggcctttgatgatatctctgagactttgaaaaaaaaacaacaacttagtctttttgcatctctgtgaaggaatacctgaaactgggtaatttcttaagcaaagaggtttaactggctgatggttctgcagggcatacaaagaagcatggtgccagcatctgcttctggtgagggcctcaggaagcttacaatcgtggtggaaggcaaaggtggggagcaggcgcagcacatggtgacagcagaaggaagagagacaggcgggagaccccagattcttctaaacaaccagatcttgcgtgaactaaccgagcgagaactcacttatcaccaagaggatggtgctgagccattcatgagggaactgctggcgtgatccactcacttcccatcaggcctcacttccaacattgggaatcacatttcagcatgagatttggaggggagaaacatccacaccataccacaaataaaaag

SEQ ID NO: 12171 - DNA, 2300 bp, Homo sapien
tcaatactgacagtgtaaatgactagcagaaatagtaatgtctcctaagatatactaataatattagtatactattatactaatattagtattattaaacatactagtaataggacatcgtgcactctggggaggcaggtgattgtccccttccactctgctttattcaagcccacccctggtgtagcatgtacacttctgggcaccaaaatctaagatccaattgaggctgggtgtggtggcttgtgcctcagctggatcttagattggatcttagatcccagcattttgggatgctgaggcagaaggatcacttgaggccaggagttcaggaccagcttggccaacatagtgagaccctgtttctacaaagaataaaaaaaaaaaaaaatagctgggcatggtggctactttagaggctgaggtgggaggattctttgagcccaggagtttgagaccttagtgagccatcattgcaccactgccctccagcctaggtgacagagtgagaacctgaaagaaagaaagaaagaaagaaagaaagaaagaaagaaagaaagagagaaagaaagaaagagagagagagagaggaaggaaggaaggaaggaaggaaggaaggaaggaaggaaggaaggaaagaaaagaaagaaagaaagaaagaaagaaagaaagaaagaaagaaagaaagaaagaaagaaagaaagaaggaaagaaagaaagaaagaaagaaagaggccgggtgcggtggctcacgcctgtaatcccagcactttgggaggccgaggcgggtggatcacgaggccaggagatcgagaccatcctggctaacacggtgaaaccctgtctctactaaaaaatacaaaaaattagccgggcatagtggtgggcttctgcagtcccagctactccagaggctgaggcaggagaatggcatgaacccaggaggcggagcttgcagtgagccgatatcgagccacagcactccagcctgggccacagagcgagactccgtctcaaaaaaaaaaaaaaaaaaaaaaagaaaggaagaatccaactgaactagaagagaacagtcaggactgggaggggacttcaaagcatgcactgtaataatgggggtagttactacccaatgagcacccactctgtgtcaggcacttaaaaaatgtgcagtatttaagatatgagatgctcacttgaatggaaggaaaagggtggcaaatgaacattttttgaacacttaaagagccagtgcgaatcacttttcacactttattgcatccaatcctcaccacaacactctgagataagcatctctgttctataaatttgagttagggatacagtattgcatcgctgtgggctctggagcccaagaggctgtgctcaaattctaacagatatgtgaccttagccttactactaagccttattcctaagtctcagttacctcatctacaaaaaggtgacctttttgtagatggggttgtttaaagactaaatttgttaatatattacagcacttagcacagtactgggcaaatagtaaggtcaataaacattaactgtgattgttaaaaatgtgactaagattacccagtgagtaagctggggagccagtggagaacaaaataagctgaggcctctggggattcatttggtgaagttttgtcatagggaagaggttcctactgacatcaggaagtagaaccaggctgggtgagttggttcatgcctgtaatcccaacaatttgggaggtcaaggtgagagaatcacttgaggccaggagtttgagaccagcctgggcaacacagagagacctcttctcttaaaaagaaaaaaaattaaattagccagacatcatggcatgcaccttccaacattgtggcctgcaccttccaagccctagctacttggaaggcagaggcaggaggatcacctgagcccaggaattagaggctgcagtgagctatgctctcaccactgtactctagcctgggcaacacagcaagaccccatgtctgaaaaaaaagtagaaccagacccagtgaacagaagtgtaacagggtatctggtaggaagcaacctgaaattaaatagctgggtaatgacagttacttttctgtctaagtggacaccgatcttccccatttggcaaagagtcattaaggggccactcttactcatgatgctgtgagatatttaacactctgttgccctggagaggacagtctagtagaagttatatgtggcctgacaaagcctgcccctccaatacccctgttatgcagagctggtc

SEQ ID NO: 12172 - DNA, 2300 bp, Homo sapien
caaccttggctaacttcagtaccttacgtaacataagaaataaagaataacttgaacttaaaatactttttatatgtttacttcgggtattcttaagggctttcagtacaaagataaaaacatgcgttggaatgcatcaacattccaacttacataagtggtgtagatacctatggcattagtaccacattttgatggttggaccacccaccaaattcccttctctccttttttacttctttttctttctgtttgctttccttgcaagtttccttccgcatccttctttcccacctacaatttgtaactgaaagaaagaagtagctacagaccttacctaacctactcttaacctacttggtaggtagggttcagatgcaagggagtggctcgaataaagcattttagttatgccttttagaaattagggagcaagagatatatagaaaaattagaaatgtctcttctacctttattaagtctacctttgagaaatatgaagggcaggaagacggaaaaacgaacagaacttctgctggaatattgtgacaaatttactgacaaatattttctaatagatttttaccaacaggcagtttttgttttctttactgacagaccgtaaatgtacttctggttggcagcagctgcatcattataacacaaaagcaaccttggctaacttcagtaccttatgtaacataagaaataaagaataacttgaatttaaaatactttttatatgtttactaacattaaactattttcaatgcaggaaataaatatttccccaaagaggaatcccccctcaattactttctttcagacttaacaaattggagtagatgtggttttgctcattcttttatctgctggcaactattttaagtctcctgtgcaaggcagattccgatgacctcgggaaagtcacaggacctcagtttcttcaatggtaaaagcaaaggcagtggtttctaccgtcctttctcactgcaccattcagcgtcagtgccctcatgagaaacacacccaaagcccagtgtgctctaccccaaaacttgtgaaatttctagagtctcaaaaaagtgaatatgtttaaggcagtataataaaagccaggtggacgacagttcctaaagttaggctggtagtggcgtgaacaggggtcttttgggccaccctgagacccgccccacggggcttctcgatccacgtcttggcttctcgctccactttcacagaacgtactgaatcaggggcctgcatccccgtgccgtgccgagccgacggagaaatggactcctcttctcgctcctgtggagtttcgtcttctgggtgagtgtggcaccgggtcctgggcgggtgatgtctgtagttggcgagcgatcctcagccagaaaactggctgcgcacacaggcgcagacacgcgaacatgttcctgcgaacgagcttgggcgcatgttttcctcccttgctttctttaatgctcagagaccataaggggatttatcgagaagcattcggtgcccatgcccggtttggaaccgcgagcacaatatctggttcctttgcagtacggtggtttgctcttgagttacgaccagaaaccggaacagaaggaaagggagaagcaggggaggttcggggacgacggcgctccgggcagtaaggcagtagcttccaaagcgtggaggatgggactgaggaggagcagaatacggagaaagagggaagctgaggaaaaatactcacgccaatgggtaaaagggaaaaggtgagaaggaatggagtaggggagggaaccaatggtgggagaggcggaggaagaagggggaggggtagaagccaatgggggagtggaggggagggagaagcagaggggaggagggagcggggacgcgagcgaggacgcggccccgcgcgctcgtccccctccctccgactggatagctcgcgccttcccaggctcccgggagacgagggcaggggcggggccgtgccgggtgcgcggcgcgggaggcgtcgcgaggtgaaggggcggggacgggggattgtggggagggcagcgcgggttcgcgcgcgcgcgcgcgtcccgtccaggctgcgccgccgcgccgccgctccgcccccggtcgggtgtgtggctgcgcgcgccgggagagatgctgaggtaaagttcgggagagagggagagaaatccgtcagcgcgagggagcccgagtggccgccattactgagcccggcgcggcggcgggcgctggggaaggggggagggacgggccgccgctggtggcgggga

SEQ ID NO: 12173 - DNA, 2300 bp, Homo sapien
gaatactggttctggatttaagtggaattgacaaactcgccccccgcccctacctgtagaaagcaacataagcaagtactagtaaatacagcgaagcattttgctgttttacacctgaacatttaaaaaaaaattcagtttcctgcctatcacaaaggaaaaaataaatgatcgataagaatttaaacttaaaacgtaagcacaaacccatctatatgcctatcttgctctatctcaaaatatttgaattcccatttattaagcgatggccaaatccgaatttctatcacatggtagaagtataagcgtctcccctacaactttttcgggattttactaaacggcctaataacagtttgcccttacttccgtgcacctttcaacctcagctacaccccgagcctccagctctcttgcatttctaataacgctgaagagggagggtgagagggagtatttctgtgtggataagtgcgcgcgcgctcccgcgcggctccccacccccaccccgatacttttctttagtggaaagagaggaagaatctggaggttattctagcgaaaactcagtatcaaagcctcaacccagtcgcagtcagcccataggactctgggctctggatgcgcagtgcaacttctcatatcttactccaagcttcaaagcagatggaaaattggtgaagagaacccagggaggagtcgaggagatgagggaaagtgaaagggccgatcccccctacaaggcgtttaagtttgcaaccgagactgtgtttccgcgaatctgcacccgccccgtgtaccctttccaggtggaactcgttaacagcagcaacccggccaacggacaccgccacctcccctctcgacggaccacccgagactcgagcaagtgaggcggcgggcgagagcggacgcctggcggggccggcgatccccggccagcatcaggcctccgccgaccctggccccgtcacctgtggagaaagcaccccctcccccggcctctctgcccttcacgccgaacgtatccctaacgctgcagctgctgcccgcccggcctgcgaaaaccgagcgcagcgccaggctcccctcggcggccgcggggccccagccccttcaactggttacaaccggcagcggcgaccgagcggggcagctagccgcaggagggtccccgtccgggagggggcaggcaggcttggaggagcggggtccgcaaggtcctacctaacaacgtcggtctcctccgtctcctcctcaacggcagcggccccggcggtggcggcggcagcgacattcctggggaccgctcccgccgccgccgcctcctcctccactctccgctcgcctctcttcctcggcgcgctcaccgagcggcgcgtcccttcagccacctccccccgccctccccgacacacacgccccgaaaccctgagccccacggctcccgcagccagctcacccaccctccctccctccctccccgccaccagcggcggcccgtccctccccccttccccagcgcccgccgccgcgccgggctcagtaatggcggccactcgggctccctcgcgctgacggatttctctccctctctcccgaactttacctcagcatctctcccggcgcgcgcagccacacacccgaccgggggcggagcggcggcgcggcggcgcagcctggacgggacgcgcgcgcgcgcgcgaacccgcgctgccctccccacaatcccccgtccccgccccttcacctcgcgacgcctcccgcgccgcgcacccggcacggccccgcccctgccctcgtctcccgggagcctgggaaggcgcgagctatccagtcggagggagggggacgagcgcgcggggccgcgtcctcgctcgcgtccccgctccctcctcccctctgcttctccctcccctccactcccccattggcttctacccctcccccttcttcctccgcctctcccaccattggttccctcccctactccattccttctcaccttttcccttttacccattggcgtgagtatttttcctcagcttccctctttctccgtattctgctcctcctcagtcccatcctccacgctttggaagctactgccttactgcccggagcgccgtcgtccccgaacctcccctgcttctccctttccttctgttccggtttctggtcgtaactcaagagcaaaccaccgtactgcaaaggaaccagatattgtgctcgcggttccaaaccgggcatgggcaccgaatgcttctcgataaatccccttatggtctctgagcattaaa

SEQ ID NO: 12174 - DNA, 2300 bp, Homo sapien
atttcttcccatcaaatgattgacttgcttctggcaaaaaagattaacaagattcttaccatcttgagaagccatattcaaatctggaacacctgctcccaccctgtcctctcctctttatagcatgtggatttcagctctggaaagactaatcttgttctgtaataggtccatgtctctttatcttctccagagactgaagggttcttcagaggtatcttaaagagtcagcttacagcaaatgaggttggaggcagtggttgagaatggctcatcagtctgggctctgggcttcttatcttgcctcaaccaaggcagtccagctttgatctgtatcattaaaagaaaggttatattactaatgaaaaacctgaaaactatggttattagctaaatcaatcatctctgcagatgaaaaacttgaggccccaagaagttaatcaattggcctgatatcacacagatgctctaggaggacctgacatttacagttgggtttcctgactctcagatctgtactctttgtactggggtagctgcctgctacttctccccttgtgtgtggcatgtggtctgaggtctaagataaagggagggagtcaggctctgctgatgccacaaaggacctaagcaggcagattcacctcctgcttttggtctcttaattcctctctagatgaagcaagaacaagtctgtcttcccatctagggcagggttgctctgtgcgaggctgatggtgcacgctgctgggatattggcacttctcaggcattttattagctcctgtttacagagacactgcctgaattccttctgccactcatcccacaccgcctatgctggtggttaacagtgccattttaaaatctcaagcaggaggagacaacataattgtctcatgttttaagcttttggaatgttgttctttttcagagttgtgaagacggagtggatacaggtcaacttgattctgcttttctctatcaatggcctgcaaatattaaatatgcaaaacataggctgctctgtccatatctccttctccccagttctcaccacatgacgttgatttctgctcaggactggaaagaagtgattgctttagatttgcttttcttttaccaactggagaaatgccttaccgtgtcttgtttaaatgtggcttttcacacagttccagcttttggggttggggaggggcacaaataatctgtgtggtaggcagttttattgttcagaaaagaagaaaacagaccccaatgtttggaatgccaacgatttaggaagtttctagcaggtctgctacttgttccaaccactaggtttgatcccagaaaagactcacatgcgttttggccatgagaaggaggggttccctgcaggccaaaggaagggtcagtagaagttgagggtggtgtgttgtgcccctctagattccaaacttccctttgctgcctatctgatgaccaggtgaaagctgggtttattctgcatgggaaggttctgtgggttggtgttcatcagggaaaataaccaggacagacttcattggccaagggtttgcccatgttttgagaattaaaacttgtttacttgagagttagagtcatttggtcagctgtttatattccatttttaattatttttgtgctcgctgttttgttcttttggtctttgacagatgagcaaaaattctttttaataacttttaaaaagctatcccagtgctgaccagggaggaaaaagtgatcaaattgtctaataaggaaacattgtacatttcagtttttatttgcttagtactaattctattttctcctcccaccttttttttctaaatgtataacaacaaagggggagataatttttgttttttccaaaatgctttcagggaaatcccttttaaacctatggattttagtccaatgaggaatcctcttcctttggtctaaattttgcatatcgtctgtttcttacagggcttccgtattgtctcaggctccactggaaatgcagcaaggattcctagcacatcccagttgccatagcaacagcagtctttcccataatgagctgcatcatctgaactgatgtcacagcatcatgcagcaggtcaaacaaggcatctcctagtattgcatcctacagatgtgctgtaaacatcaaaagaagacggtgggatcaggagatggtgagtgttaaatgtctgggccttaattgcacggctgttttgttggttagtcggtgtctgctaaggcggagattgggggatgttgtctctgcttaaaatggactgggg

SEQ ID NO: 12175 - DNA, 2300 bp, Homo sapien
ccccccaccagggctatagctaatatcttcattgcacagttattgttcattgagacatgtacctccatccatggtataaactgtttttattatctgtctcacctccattttaacagtaattctgttgacattgcttctagactggagtttggctaataagacactggacactgtgttatctgtgctaaggaagcacagataacgcagcgtgttaagcattctgggtcaggatttttgtgctggcacaattgtgagtaaaccaagaaaaatagtccctatgagatttctttcagacttcagcacacagaaacctagtggattgttccttaagataaaagagaggtttgagaatttactttttgtcatagtttgggttcccaggaatcggattctgaggctctgagatctacatgctggaggtttattggggtgagttcttgggaaaagcacctctgagaggtgagggaagtaaatcaaccagagagaggagttgaactgcagctgtgacagagatggcagtattcctacccagaactctaaagtggctccccttttcccccaggctttatacctcctcccatttagcagacatgggatgtggaaagctcccagggaagggcatgaccttgggtgaggcagctgagggcaagtcccagggagggtctcagctgagagcaataagcagtcaacactgcttagcaggtggggtaaataagtgtcttgatcataaggtggggtaggaggagggcaagtataaatgctgtccaccgcattcaatagaagtgttttctctattattactaaagaatggcttgacccagaaaagatcatggtctttagccacagaacttaattctaggagaggcgatattacagcagactgatccctgtaatgcaaatggcaatgcccctctttgctgagaggcattgtggagaatgcatgaaaacatggcagtgatgttggcagggagatggcaacgaggttctctgcaccaactgtctcctgcagctgggaaaagacacacagcctggctgccaactgttgggctcattgtgctctggctgaatttagttccctcttatgtcagcttgcaattctatgttgaagaaaatcggtctggtctgccaccatcaccatctcttagcaactaagagagattgaaacaacagctgggtaatttgatattgggaacttaaaggtcgtgaaaatagaatataatggctgtttgtattaaaggaaaaaaaaagagaaaatgatgtaatcctaatgcttagaaatgtttggaatgccacatgggttacaaagagtgaaaatctagtttaaactggttggattctttctctctcagaatgattaaagttgagcccagaagctcacccaaacacacatatttgcctaaatataaatccctgtggaatgttggagctataatgtgaaaaacagtttctgtgtttttgtattttctctaagactgacctacagctttcttatcacaagttttgaagcaatacttataacatagatgataatttagagttattttttactttgctttttgtgggcaatggggatggggactgcagtgaagatgggagagaatgaggtgtggccctcagacatagtgctgtgcaggaagcctactacttcagaggctgcccacagcctcacatacaacaggtaataatagaattacatgtttgaaaactagaaaatgagaagtagaagccagatgaaattgttaaaacaagtttttcttttttccctagggccagtgaggagaccatctgtttttcaaattagaaaagccagaaaatataatgtttgctctcagaatgagtcaaatgtcatactctaatgaaaattccaaagcagaaagagagaaaggaagaagagcttgaaatgccaaattagtggggtgaggtgcttgctgcttgcattcctgcagatccaagcattttgcaactctagtaaacctgccaggacaaggttcatttgaaggggtgtggattaccgggaggtgcggggggactgacattctagtgctttagatggtaggtaactgcctggtcttgtttctcagaataacttgttcatccaccacatatgtggctttcatcccagcacattgggcaggacaccactgttttcttcgtttggttaatagttacacttccttgacacctcatacagctgggtcatggatctgctgctgttctcaatgtgagcatcactgtctttttttctttttctttttctttttttgggacaggatctctgtcacccaggctggagtgcggtg

SEQ ID NO: 12176 - DNA, 2300 bp, Homo sapien
actagctgtccactaaatgaaactccatttgtcataacactgacatttatttgctttattaaaattcctttagtgtacctcattgtctttttgaaaaaaatcacatggagatttcgcttaaccttaccaacctaagccattaattctttcaatcattccttcactaacaatattcattaatcatacaataacccatgaatattttgctagaaagtagcttagtactgtcagagcatatggagtaatgtgtatgctctgcagataatacaacgaaataaagtacattgtttacttttccctgacatgacatgagttaacatcatctatttgtacagtaatctcctagtgttcctgcttagagcttcttctgatagttacattgctgagaattggcaagtttcctcttagagttttaatgcagtgctcaaggtggtgagtagagattccttttaaggattttccaaattgagtacaggtttaagctgttgctagatgaaggaaatagatataactagaagttgtttccttgtaatatacgatgcatatttgtccagagagccttcatatcctttaggaaagaatttatcgataaaaaagattgcatactccaaatgaccttgaggtcaatgtctattagttgaaggcccaactcccatgtttgacttatataaatggaatgcatacatacatacatacatacatacatacatagaatggaaagttttccttatatgtttatatttttcagttctataactttggaaagttcaggatccaaaattgaaaaatcaaatgtaaaaatcatgaaaaatcctcctatgaattctgattttaacgaagccttaatatctgctctttgacgtgttaggcacttgggactgggaacagaagggacaatgaatcagcaagccatctaattctttttgcatctgtagatatattgagtctagggggtgattttatcgtcaatagttctgtttaattgttttaagctgaagttgttaaatttcttaagacttccaagttattactagtaatcagagtcaacataattagatgtcttttcttgaaatgacctgtttttttgtaaagctatttagctggcatgttttttgtttgttttgagagtgtttggaagggcagatgagattattattattactttctatacttttaagcctgtaatcgtggtagtggccataagatatatgcaaaaatcaactgcagcaggcaaagttgtgaaatttttgaagcattcaaactgctttggaggaggcaaagttgtgtttctttgaggatttatttgaaatcgtatgatcaggggttctagagcagttctctgcagactagatgtagacatttttatcctttttttttttttttcaaggatggagtctttctctatctcccagactggggtacagtggcctgatcatagcttactgcagcctcaaactcctgggctcaagtgatccccccacctcaacctctcaagtagctaggactacaggcatgtgtcagcatgtctgcctaatttttattttactttttgtagagacatggtctcactatgttgcccaggctggtctcaaattcttggcgatcctcccaccttggcctcccaatgtgctggggttgcaggtgtaagccactgcactcagccttttattctacttctatggtaaaggcaagctttagctttgaggcaaccctggctgcttcttaaaggttcaagctactacatacaggtagatacaaattccaaacagagaaaggtgtttccttttgtttaaggtgactgctgaatgtgtagactggaaaaatgaaggtagcaaataaggtcctctgtgctgaaagttgaaaatctctgtcagaaaaggaatgaagagagtggtctaatgccaacaaatactgtgagcaccgggtacatcattcagtgggagatatttctctgcttcttatctctgttggttgagtgaagagtccaggttgctttgaagttgccaatgtgggaggctgcctttgcagagaatcagaatcctctaagttggctcttcagttatcatatgtccccactcccatttcatccttgcttgtgcattgggactttcacttctttgatatggtttgtctgtgtccccaaccaaatctcctcttgaattgtagctcccataattcctagatgttatgggagggaccgagtgggagataattgaatcatgggggtggtttcccccatactgttctcatggtagtgaataagtctcactagatctgatggttttataaggggaaacccc

SEQ ID NO: 12177 - DNA, 2300 bp, Homo sapien
ggtgttggaggtagggtctgagtcaggagtcccctgtcctctggcacctcaacaggattgtggggttctgaaggacagacttagtttccgcttggatttgtttccatctggatttgtttgttaagtgaatggtgacatatcattttaccaaaaaattatttttaagtacttttgaggagtccgccgcgggagtgacaggagtggggggtttttcaagcaaagagtggcctcttgggagactacaagcttctctcatttgtcatcttcgggcagaaaccccctagactgggtgtcctggagccaaaactttgaactggcaactttttcccttctctgccagcccatgtatatcttgtccataacactctccactccagttcatttctcattctctcctacctgtagagtgtactccaaagagaacttaaacaccatcatgcagattaaacacctctaccacgaaaaacatttatgtgttcctttggaagtttccaactcccagccctactttactggagtcgtagagaccgaatggaggaccccttttcaggtctttatttttttcttaagcttaaagtcaaatgcagaacctcacacaggactgatgttttccatcaggcgctttcattcattcaaagtggaaatgctttgggagtcctttctacttgcctggttgacacatgactgacccaagtctctgcgtaaaaagctgtccacacgcttctgattggtttagtggagaaaacgctctgaccagggtctacccaggtaacaggattctagcccgggccctgcactgagtagccagcctttctctaggccttgctgaactgtcaaaccggggtgcggctgggctagatcccagagggtggcagtccggtcccaagtcccgggacccgagtcgggaggggcttctgtatgtgagtttaaacgcgcggggattcacctgtgaaccctggggtctgcactcctgtacgtccgtgactgatgcagatgctccggctttgggaacgctgctgagagcgccagagccacaaggtgcttgtgctgctgctgcaccgcccacggggctcttgggcccatctgcttgggccagcgcaccccccatccgtattgatttccgctgcccccaaggagctcccgggactgtgtcctgccccagctcgctcctgtggcctcccagttcctttttctgtttctttctttcctcctggctgcaatactccagagaagggaagtgtttgaaactgcaactgagtggcgttgttgcgccggcagccgagcctcccagtcccccaacgagaaagagagagagagagagagagagagaaattgagagagagagagagagagagagagagagagagagagaaggggggggaggtgtgtgtctgcgtacgagagagcgctctggagcaaagcagctggaaaatgcccagaaatactttcacagcggtcaagctggaaccccccgcgtgtcctcccccttcccgctcctcccggcctagaccccgcgccccccgcagggagggtgtgcgccccacctgccaccgggctgctccgggtggtagaaaggggtgacgggggacgggggcgggggcgggtggcggcgcgggggtgagaacccggaggcggcggggccctgggccgggctgcccgcgggaccgcgcggccgcctccccccgccgccgccgccgcctccccctcctcctcctccgccgccgccgccggtcgcctgtctccgcgccgggcatgcctcgggagccggggcggcccgggccgcgggcgctctgcggcgcatggacggcggcggcgccgggcgagcagcgggaggagaaggcgcaggcggcggcggaagcggcgacccacggctgggagcaccggcggcgcgaggggacggccggccgcccgcgaggctccggccccactacttttccgtagcctccccacctcagcagcacggccgccgccgccgccgccgccgccgccacggccacggccacggccccggccccggccaccgcccgccgggcagcccagagcgccgcgcacggccgcactctcccgccaccccacgcacacgcacacccccgcccgcccacgccccccacccgggaggggggagagaggcaaaaagtaagagaggaaaaaaaatagcaggaagatggcgcccaccaagcccagctttcagcaggatccttccaggcgagaacggtaacacttttctgtttattgaacctgccgccgggccgctgctcccgccgccgccgcctccgccgccgagggcccctctccgcagc

SEQ ID NO: 12178 - DNA, 2300 bp, Homo sapien
ccctcatgtaccctactctccacgcctcggcccaggctgtggatcacgcctgcattttcctgaggttctgtcctccgagacgttgactgtcagacgttgacctcattccctcaagtgctgtcactccaaacagcagcttaacccactgccttaagggtttcattgtcaaggggaagtgtgggttctctcacgaagaatgttaatcaccccatatgtagcccgtgtgagggacatacagtattcttatagtaactaccagattgttggagaaaggccatttcctcctttcccagctacagaaggagaaatatctgcctagggattctcatttccctcaatggaaaagaaaggtgggtaggcgaagtgaatctttaaaatggaaacttcgtactaagaggtccctgtaatttgttgctgaccaaatatacaaaaacattttcgagacttactacagtgatatttggttgccgtttcacatttagaggactatgccattttggtgtagaaaatgataaacattttcaaaaatcatatgaatactatttaattctcaagaagccgagaagtgcatagtgaacacccccttgactaaacagatcaattagacattgtatgttttccccttagttctttaatagttgaagcaatataaatacacttctttaagaaaagcagacatggtttctttttcccaaaagcagttcatttataagtattaaaatttgcacagtcgcctcatccctaattattttacccaatgcagtcaacccatacttaaatggtggaagatatttaaatatgtattgcatcaaaaaattttggatcatcgttaagacttcttaaaatttcaattgcattattggattaaatattcttttttgtctaaattggtgatataacatgttagtaggtctgagatatgaattatgaagatagtttttttgtttttaaaaatcccctaaataggaatttaaaaataaacccaaagtgtactactcctgaatacatgagattttttttctggtatttatttgttatcagatatgtgattaatcacgtgcccaattaacaatgcgtgtccctatttctcttctacagtcatcatttatcctatattttaatactagaaactaaccttgatgaaagtacactgaaaaagcactgtgattatttgttttcatatatatatttcatgtatgtgttttcatatatatgaaaacaataacagtgcgtcatgtatgtatatatacatattgcacgaaaacttcacatacagtgctttcaacaacagaatttcagttgtcatgttgctatatgggttaagctggtacccagtgctatttcagtttcttctccaaacctgaaaatctcccagtgtctaagccatgcacagatactgaggcgttttgtattgaaagaatacaatttgtgaaaacggaccccacagaaggcagagtgatgagggccagtttcagaataaagacacagcctatattacatgcaaactgagaaattttaattttgatagggaaacagatacacacactcatacatacctcatgaacttctggggctcctgagaaaaccctccctgacttctttggccctacagtgaggaaagctaattgagattcttcaagggaatccctttccttttcttctatgccatggaaagactcattaagcattccatattccattctttctcagccgctggctttgcttagccaaagcccaggaagtcaatgtccagggattccattaagcatgccctttagtgctcccttcccccaggctcagtgtgggaacagatccttgcccccttagatggaggattcagaggggagctatcaggggttaccgggcatgaagcctgcctttttgccaggcgttcctgagatactacctgccgaactttaagactacatttgcccgtgatgccgtactgccctccaccttatgggggaggataaggaagtacctctgaaatgatgtttcctatccaccagtgactgccttggcctaataaaacaatccattagaaaccctgcctcacagtgtcacagtcctcttcacttcagaataccttcttcaagtgatccctccaatagcaagcccctctgtggctctctgcctgtggtccaccttcccactgtgaaccatgctggcaaggagctggggttatgaagggaaagagcagggcacaaggcaagtagggctcgtgacttttcccctttcattatgtgtgtccaccgagctgtcctgcttctgttttgtaatgggttcttccatggcaagct

SEQ ID NO: 12179 - DNA, 2300 bp, Homo sapien
gaacccacacgaagtgcagccctcttacgcaaccaggtaatagccggagccatgattcctcttccggagcttggtgtacaaaccctagttccagagaactctttaaacgtgtgtcctgtgcatgtgggggattgaccacaccccatagctgatagcaaacttgtttggagtctacaaaaattaaaggggaaactttgcgttctttagcatatcaaacctaacctcagtttgaaagtactattaacaagttgttttctattagatgagcatattggattccaatttctcaaaagtatttttctcttctctcctttcctcccttctcttatctctctttccctttttttaaaaaacctaatgttgaactatgcctagagaatgttggctgtcacatatcaggaattctgtctggttactttggatgagtttacaagctgctaattgcaagcagagaaagagccttgagaagagaaagagtaatttgttttgactttctctttttgtcttttccttggtttgaaattggcttgggcttgctgtatccatggtccaacagttggatgttttattaatcttttctttatcatgtgcacatgaagattctcagagtaactgaacaccttagtattgtttaggaccaatctagacaatcttgacaaaaaatcttcattctcaattctgcctctcatttacctttgtctgtgtctaaagcaataagccgggcagcattggagggctatggagtgcagcttatactgagactagcattcaggggcaggaggagagaattttggtaggatgatgattaaaccctaacaagcctaattaaattaagatcacatgtgccctcctccggaagtcacacagcttagccccaaacccagttatatattaactgccaaatcggaatgtcttctagatgagcagggaacgaattctaccactgaagtcagcttttgtgttttatggggtatgtaactaaaccctgttgtttgtggcagaagtctttggttattccccaatctcatgatgactggccttacagggaaaacattagcaaatgttgatgagaagtcccttgaaaaaaactcaagtgctatagaaattgttagctacggaagtagctaacaatcattacaaaatgaaactttaaaaaaaaaccaagcatgaaatggctcccattacagtctatccaatgaatgggataaagcaaattagtggggatgcagtagaaagctctggggcattattattattcaattgcaattttgcctcaatgtccaaaactaaagaaagcaagccaagagttttaaacatactgtgatttacataagtcgtttttcaaagcttcactcaaatgtcatctcttctctatgttctcgccaccaacttgggtctcccagtctttagcagaatgactcccttctagtcctttctgtagaggctatgtttacctgttgcattattgcaaaatcacctgtctcccctacttggagcctgagatcgcagaggaagatctgatcacagggtcatttgaattcctaatgcccaagataatttctggcacatacctggaattccttatgcattttattacattgaaatagaattaaaaccagagaagttaattttaaattaaaatcagcgtagacaggccgggcatggtggctcacacctgcaatcccagcactttgggaggccgaggtgggcaggtcaagagatcgagaccatcctggccaacatggtgaaaccccatctctactaaaaatttaaaaattagctgggtgtggtagcgtgcacctgtagtcccagctacttgggaagctgaggcaggagaatcgcttgaacctgggaagtggaggttgcagtgagccgagatcacgcctctgcctggcaacagagcaagactccatctcaaaaaataaataaataaataaataaataaataaataaataaatcagggtagacttctaataatagagaaaactttaaaacttttaatgtgagatttataggacatttgtgtttctagtagtaccattaaatctctttccttatatctgcttatctttcacagatatgctatgactgtctggtactttgatgctgaagaaagggcagaagccaaaaagaaattcaggaatttaactagtatgtgtttgataattttctgtgacttttgatcaagttaatccttgacttttattcaattttatgtagttttaaacatgttctgttcaatctgttacggcttagctttatatataatgacatcttgatgggttttatcctgaaacct

SEQ ID NO: 12180 - DNA, 2300 bp, Homo sapien
taacagtcctccagttttcactttatgtctctggctcccaccactcaaatgtccactgctcagatagacaaagctgagagacaaatgccctgtagaactcctaagttctccctccactggcctctaagcttttgtgctgggtcaggctaatttgcttgactcttttccagtgacttctctttggggaggctccccagccccttttgcaaatagatccttccagataagcccagacatactgaatcccaagtggaggctgctatggctcagggtcagacattgagttcccagtaactatttattagccattcactatgtgctaaacactggggttccaaggatgatggtctcctctcatcatggagctgccttgggaatttagacaagagctctttgagcagtgatggcctttaccccaaggaggggtacctcctgctcaaaggtaataccaaaggtgccaactaatcactgacttggcagagaacctctctcaatataactagaagtttcatcaaagtttcttaagcactccaccattgactgctctccttcaccatcccccaggttcttactcaaccacgtgcctctgtctgcttctttccaacttgtagcagcacctttcctcttctattctttgttcttgtcctggatgtcattccctttctcccctcagaggcagagaggagagggctgctggaggaagaagaaaagtgaaaaagctgtagaaatttgcttccacaataaacaatacccgaaaaacctgtacattcttttcttcaacttaaatgaagaacccaagtgtgcactcatatgaagtaaaaaaggtgcaaataggccgggcacggtggctcacgcctgtaatccgagcactttgggagggcgaggcgggcggatcacctgaggtcgggagttcgagaccagtctgaccaatgtggagaaacctcacctctactaaaaatacaaaattagccaggcatggtggcgggcgcctgtaatcccagctacttgggagcctgaggcaggagaattgcttgaacctgggatgcggaggttgtggtgagcagagatcacaccactgcactccagcccaggcaacaagagcaaaactccgtctcagaataaataaataaaaaaaatacagttcctttttttttttttttaaagaagtacaaatagctttgcatgcaatttatgaattttttcctgattctgatcgctggtgttcagtaggaaagggaatcaaaactccataaagcaaatcagcttatctgtagataaccaaagtcttctcagtggtgtctgtccctcttgtgaaagtacagctgcttgtgggaaaagtgagagacctagaatacagtgtatcttttgggggacatacctctgactgttacagaagcatgtgattaatttggaaggtagaatttcggaacatcatattttaataggaagcttgaaaggtaagtagaggaaaacatcaagcaaagcaaaatacaccatttgcagagttcaatcagatatgactcagcatttcttcattgtgctcatccccagctcctcaagcacatagtgccttgcacacagtaggggctgagggaaatattcgttaatgcattaattttagttaaaactagatacctcctaatctctcagtggcttgaactgggtcaaacagcagaggaatggggtaaataaggaaagacacccggtaaaggtagaacaagaccactgcttaataaatatattcgtttttggggttattattttgctcaaaagtctatgaggtgaccaacccagaatgtggcagttaattctatttacattttcagtgtgggatccaggttttcaagtttgttatgtgattttatgcaaaacaatatgcaaatccagcgcattctaaaaattcagtctgctttccagccgctcccctggtcacaaacaactaaggttggcgccgggctctctgggatccttcgcggaggggcagagcaggcgggggtgactggcagcggggcgggggaaagggcggtcccggaggcggtcccggggcggagcccgtgacgcgcggagtcggccggcttaagggccggacctcagcgtctcccggagtctggccgcagtcgcggcagtggtggcttcccatccccaaaaggcgccctccgactccttgcgccgcactgctcgccgggccagtccggaaacgggtcgtggagctccgcaccactcccgctggttcccgaaggcagatcccttctcccgagagttgcgagaaactttcccttgtccccgacgctgcagcggct

SEQ ID NO: 12181 - DNA, 2300 bp, Homo sapien
aggctggagtgcaatggtgtgatctcagctcactacgacctccgcctcccgggttcaagcgattctcctgcctcagcctcccaaatagttgggattacaggcacccaccatcacgcccggctaattttttatatttttagtagagacggggtttcaccatgttggccaggctggtctggaactcctgacctcatgtgatccacccgccttggactcccaaagtgctgggattataggtgtgagccaccacacccagccctgaaagaaaatcttatttaagttgttggctccagtaacttttggacatcaagttaaaaatttcttagcttctcaaacaaggtccttcagaatatggtccctgtttgctgtctaggcccatctcttgctactgcatatacattctttttgctccagccacatggaagttcttccagtcttctaaaaacatcacaacttcatccttagaatgtctgtctcaccctctcttccccaagctcattcattcttccatttctgcttgtccttcaacactcagttcaagcaccatttctcagaagactttcacaagcccaatctgattttgtctgggctatcttggtatcctaaaggatacgatccacaaaaatatcatttaccacacctcactgtaatccattaacttgcctctcttccccagcagactgggtactttatgaaggcaggtctcagtctatctggcttgctatcccaatgtctggcacttgatattacttactgttttctttcttttcttctcttctcttctgttttctcctctctttctctgtctcctttctttcctttcttttgctctgccacctaagatggagtgcagtggcaccatcctggctcactgcaacctcgacctcccgtgctcgagcaatcctcccgcctcaacctcctgagtagctgggactacaggtgcacgccaccacccctggctaactttttgttatgtatttacttattttttttggtagagacggggtttcaccatgttgctcaggctggtctcgaccttctggactcaagtgatccgccagcctcagcctcccaaagtgcttggattacaggcatgagctacggcgcttggccggcacttggtacttttaatgaatagttattaaccatgaaacttttaaagtttaagcagtagtatgtttaacctggaagacttttaacatttaaacagcaggccatttaattgtggcagttcacatgctacaccagtgcatggagctccttgtggccagtgcaatgttgctggcccatctggcagtgggaaaatctgggcatccaggagtgcatctctagggaagtatcaccagccctcacaccaatctcaagctgcctgtcttctgcagaacccactagatcagcgcgcttctggccttgacccacttggtggttacctacagccactaagaggtgggcagatagatgtttttggtaagtggtctctgggttagggagtgcatgggttatgtccgtctaggggtgtgtgtgtgtgtgtgtgtgtgtgtgtgtgtgtgtgtgtgtgtgtgcatgggtgggggaagggaggaaggaggccgaatgtgcatcccttctacaaggacgcctttccagacctccttattaggtggcgttcgcctcctcaccctctctcagccccttatctcctcttacacggatcacgacttgattaatgcttgtctcccagctaggccgccagctgcacaaggtaaggaaccgaaggcattccggttctccctggcaatcctccttctcagaaggatgcctgaggcataacaagtgttccagaaatatttcttccgcaagcgctctgggccagtctggacggaccgagcgcccgctgggctgcgggggccccgggaccccggccggcactgacgccccgcccaccaccggccggcccgggcggggtggggcgcggctgggcgctctcgcggggaccgttctccggctagcgtgggcgatgcccgggcggggaaacgggaggggacgacgcgacgcgaggtagcggcctggccaatgagcgcgggtcgggcggggctgggggccggcggccggggcgcgcgcgggtctgggcgtgccgcgggtgacggcggggccgggcgggccaatgggcgctgggtggcgggcgggcgggcctggcggccgggggctttaggacgtgagcgggcggccggccggacagactgacgtgtgagctgcatcgcgggaggcgcatggcggggatggcgctggcgcgggcctggaagcagatgtcctggttctac

SEQ ID NO: 12182 - DNA, 2300 bp, Homo sapien
aaagaccaccttggtaaatacagaatggcaaacggttaagtgaaacactgtatagcttctggccctatacttagtatttcttaacatttacacagcattttcacatttccaaagcagagtaccaacatttattaatcctcacaacacccctgtgaggtaggtcagtatgtcctttagagtcgagaactgaggcagaggtcaagcaaacctgccctgggccacagagcagcagatgaagggcctagacctggatccagaagctagggctctcggtccagcattcatccactggtggacatcacatgggcttatttttaccagcgaaggttacgtgaaggacaaaacgcactcagccagcaacggaaactcaacagttcaaacagcactggggaacatgtcagttaaagagacgaaacgctgaccagctcatgaatgaggcaagacaacatgcggctgaggaagtgtggaatcatcacgactggggattagaccaagaacgggcgctcaggagggttcaggaaaatgtaaacaaactaggaacccatccaaggggtgacaggcccaaatgcctacggtctccaaatggtagaaaaattagaaaaagatagtggaaaaatccaaccacgcaaccttaactttaaactaggaatgacaataatgtgtctaatgttcattcacactagaaaggccgataatgtttgtaatataactactggcgatagtatcctatttgtatgccaactttcatctcaagtattctgcttttctttccccacagacaaacaagtgttgttctttacagcagacctctttccctctacataccaatctatccactcgcataactactaagtggctcaatggcctatgtctcatgcttaattggctgagctaggcgcggaatccgggaaaccacaacagactgtactctgctcctgtatttcaggaataactgtcactaacctgcttctgtccgattccaccttctatgaagtacacacagaggagcagttcattcttttgtaaagggattggtggactttgttcgagatgccatttcaaaagaaatgagaaaaaagaaaaactaagacctgcactgtaaagcataatacaggagtagatttattacagctactccacattttagagagtgccacagtgtctcggtaggaggcaggaacccgagttcctggttcagaaacagggttagaaacagtctcccgatggagctcaagtggctgtcatctgcctgttctcctcaggtatcgagtgggatcagttgagggctgagcaaaagtggggactgggaagatgacgagaaaagataacttttcgtagattgttgaggccgcagtcagactgaggagtgaacagtgtgaaggagaggttgagagcctcatggtgtggaaggcataagggttagaggcgaggttggagggatgtgggtgctggtgtctgaggacttattggatttcgggctgtgtgtccctcagcgtctagattcctgcttcgtaggtgatgagacgctgcatgtagcatgttcacctcagagactgtcacttatgagggtgcccatcattattatttttggtgacaaggtagctgctattttcctgtaagcagaagctgcggaagaaaatggtgggattggccgggagcggtggctcacgcctgtaatcccagcattttggaaggtcgaggtgggcggatcacctgaggtccggagttcgagaccagcctcaacatggagaaacccccgtctctactaaaaatacaaaattagccgggcgtggtggtgtatgcctgtaatcccagctactcgggaggctgcggtaggagaattgcttgaacctgggaggcggaggttgcggtgagccgagatcgcgccattgcactccagcctgggcaacaagagcgaaactccgtctccaaaaaacaaaacaaaacaaaaatggtgggattaagacccgcccccgtcccgtccccgccccttttcgctcctgctccgccccttccccgccttctacctgcctccctcggtgctgtcggtctgcgcgggcgcgcaagggggactgggacgttcaggcggaagtggcgtcaggggcgctttagggactggacttgcagtgtaaacagagacgctgcaaattgcttgtggacggtgtaggccgctgcaggccaccatgaaccggcttccggatgactacgacccctacgcggttgaagagcctagcgacgaggagccggctttgagcaggtgggctcccgccccaccctggcccccgaggatttgggtcgag

SEQ ID NO: 12183 - DNA, 2300 bp, Homo sapien
tcattaaaccctttctggaagatgcaggtttaagtcatacaaccagtattaatgatcatgatcagagcctacaggaaaattatagaataattgtttccactgtaaagttatttaaattcatatttgaaatagaccctgaaagttgaaaatggaagatccaaaagcttcttttaaaaaggtaaaaggtccagtctgtctttggacttaaggggaaaaagaaatagagaacatgactttttaaagtagaatagtcattgtttttttttttctatttacaaagccttagtcactaccaacctagttctcttttttcaatgtgggcatattgccatacttctcaaaagagaatgtactgagcaactgcatatattctgttttcttaaaaactgcgtatgtatgtagtgtgaattatcacagttttttcaagaaactaatacatttctagtatatatgaaactaatagtcatttaatgaaaaacagtttttaactattctttagttactttgcttctgtattcttttccctttgggcagaagccacaggcagagaaaagaagaaagggaaattatgtacaggttgagtatcacttatgcagaatccctgggagtgcattttggattttaattttttttttttggagtatttgcattatacttactggttgagcatccctaatctgaaatctgaaatgttctgatgaatatttcctttgagcatcatgtctttatttaaaaaatttcagattttggagtactttggatttcagattttcgggtagggatactcaacccatatttcgtttttagtgtatttgctgaaaacacagaatctttccccttttgttaaacatttggagtaattttggatttgctggatatgtttctctattttgagagttgtacaaggaaataattttccttagttatcacctctgtcactttttctggtcatttctccccttcatgcatttcctcttctcttcttccactagttttagtttttagttatatattcacactgctactatacttctcttcaggatgctaaactcttgaaaagataaatcagcaaagcaggtcttagttgcaagcagcggtctgatagcagacagatatatattcaaagtttataagactgaaaattggaaatgagcagagcacattaatatcgaagaatctgtgattttccagtggccctgatcatgattcttttgtggtctggttaggggttggataacagagaaccttgggtttattctactgctacctccatcctctgcatccttcttttttgtcttcactgaatgactaccctcacagagatcaaacttctcccatcattggtcctgctggtttgctggtatgtaaaacttatccttcttgcacgtagttgaagcaagaatatcaagccttttccttgaatgtttttttttttttttcccccaaactgacatgtattactttgtggtctctgggattcactgctggtattaaaatattttaaacacatttctttggtgtaatggcaaaaaaaattagtttcttcatagtgtgtttcttgtgtgtttgggtaattagatgaaaataattattaacgttgaaaatatgctcaccgaggtttgggttttaattttttttgtactaagttgtttaaaagcagtcattggatattgaatcattaagattctatcaaataatttgtagcacacttcctgtagagctgagaacaagcagccctatagttaactttaacatcaactcgcataagtaagaaaaatttgtaaaacttaaaaatattaacatttagatataaatattattaactggcatgaaacctttttcaaagctgggttttatgtatttcattaacagttcaactaaaaaccttgtttacatgaattatatctttgtatctctgatttgcattcggaataatccaaagagtattttctgaaaaaaattgttgcaggtgactttttagttgatggagttttttacctttaattttgtatattgtttctagtgaatatttggcaatattcaagaagacagttgcgatgcatgaagtgttcctgtgtcgtgtggcagcacatcctattttgagaagagatttaaatttccatgtcttcttggaatataatcaagatgtgagtatcacattgattggtggtcaagttttctttttcttcttcttcttctttttttttttgagacggaatctcgctctgtcttccaggctggagtacagtggcatagtggcatgatcttggctcactgcaagctccgcctcccgggttcat

SEQ ID NO: 12184 - DNA, 2300 bp, Homo sapien
agacactgcgcctggccaaaacaatgttttcttagggcactaagattctgttctaatcgaaatatcatgatgaaaatgtacagctgcttaaagatttattttaaaacactgactttaattttgcttacttgtagctggacgctgtggctcacacctgtaatcccagcactttgggaggctgaggagggtggatcatgaagtcaagagatcaagaccatcctggccaacatggtgaaacctcgtctctactaaaaatacaaaaattagctgggcgtggtggcgtgcacctgtagtcccagctactcaggaggctgaggcaggagaatagcttgaacttgggagccagaggttgcagtgagtcaaggtcgcaccactgcactccagcctagcgacagagcaagactccgtctaggaaaaaaaaaaaaattttttttgcttacttgctgctttacatgaaatgctagttattatttttgaatgtgctgtcccctttgcaacttgtatcaatatgtacttcatgctttttctgtcaaaattcccctttcttttcgagacagagtctcgcactgttgcccaggctggagtgcaatggcacgctctcagctcactgcaacctccgcctcctgggttccagtgattctcccgcctcagcctcccgagtaggtgggattacaggtgcccgccaccatgcccagctaattttctgtatttttagcagggacagggtttcactatgttggtcaggctggtctcgaactcccgacctcgtgatccacccacctctgcctcccaaagtgttgggattataggagtgagccactgtgaccagccaagactccctttcttaaaaggctcaacaagatgatctaaactaaaaatgcaatgcctaaaagttctaattatggtaatctatttctatcaggacaaacacaatgtaaggaaatttaaacaggccagatatttctattcctaaaatgaggaaatagcaggataactttctgcagcagtaatcaaatttcagtgcacaaacagaaactccttgggtgctggtcaaaaaagcagttatcggccgggcgcggtggctcacacctgtaatcccagcactttgggaggccgaggcgggcagatcccctgtggtcaggagtttgagaccagcctggccaacatggtgtaaccctgtctctactaaaaatacaaaaaaattagccaggcctggtggcgggcacctataatcccagctactcaggaggctgagacaggagaatcaccttaacccgggaggtggaggttgcagtgagccaagattgccactgcaccccagcgtgggcaacagagcgagaccctgtctcaaaaaaaatttaaaaaaaaaatgcagttatctgcccatatgtagaggtggggctgaagagatcaaagtgtgaccaacagttttcaatactgtgtattccctaccctaagagattctgatttagtgaggaggtgacacccagaaactttcattttgattttcaaatgcaccaggtaattctaatgcaagtatttcaaggccactttgagaaacctgtgcagtggctctgatatcagaaatgtgttttaaagtccagctctcccatttgttgctgtgtgacctcagactactaacttagtttctctgaagttcggatttctcattagaaaaagggggatactaaaggctttagagggatgatgaaatataatgaaatataaatataatgaaacaatgattatgctgtgcccacctataattttataattattatgattcacccagttccacgggacaaaaataaggaagaactgggtaagtgtatatatccatcctgatgttctaaaagcattctaattcaggtttttttccatttccatattaaaattttcatctacaggattctataagaacatcacagtcaggagtgctcttttgtcttcctctccctttaattttgtaatacatgaaaaagtctctggggccaggcacggtggctcacgcctgtaattccagcactttgggaggccgaggcaggcagatcacaacgtcaggagatctagaccatcctggctaacaaggtgaaaccccgcctctactaaaaaaaaaaaaaaatgcaaaaaattagccgggcacggtcgcgcactcctgtagtcccagctactcaggaggctaaggcaggagaatggcatagcatgaacccaggaggcagagcttgcagcgagctgagatcacgccactgcactccagcctgggcaacagagcgagactccatttcaaaaaaaaaaaaaga

SEQ ID NO: 12185 - DNA, 2300 bp, Homo sapien
aatatcagttaagtggtttttttaaatttttaatttttatttattattttctttttgagacgcagtctctgtcacccaggctggagtgtggtggcatgatcttggctcactgcaacctctgcctcccgagttcaagcaattctcctgccttggcctcccgagtagctgggattacaggtgcgcaccacctcacccagctaatttttgtatttttagtagagatgaggtttcaccatgttggccaggctcgtcttgaactcctgacctcagatgatctgccccccttggcctcccaaagtgctgggattacaggtgtgagccactgcgtccggccaaaatatcagttaagtttaatattgttttgagagcttcacttcaataaaataggatggagggcctggcagagtagagagggattcaaatgtagaaggcttgaaatcgtaggctgaggaattgaatcgttatgtaatgggggcttgtaaagattactgaacagggtagtagcataatcatcaatatctgtgttttaggaggaaaactggcagcagtgtgtaaaataggataaagtgatggaaaatagtggagtcaggagagtattgcaaaggtgtagacgagagttgatggtaattgctgtgagaactggaaaaattggactaattaaagaggtatgggctgggcgcagtggctcacacctgtaatcccagcactttgggaggtcgaggcgggcggatcatgaggtcaggagatcaagaccttcctggctaacatggtgaaatcctgtcctactaaaaatacaaaaaaattagccgggtgtggtggcacacacctgtagtcccagctactcgggaggctgaggcaggagaatggcgtgaaccctggaggtggagcttacagtgagccgagatcgcaccactgcactccagcctgggcgacagagcgagactctgtctcaaaaaaaaaaaaaaaagaggtatgaaggacaatcaattgtagaagccataggatttggttggatatgaggagtaagggagataaggatttatttctttctttttttgagacagagtcttgctctgttgcccaggctggagtgcagtggtgcaatctcggctcactgcaacctctgccttccaggttcaagcgattcttttgcttcagcctcccaagtagctgagattacaggcacgcgccaccacgcccggctaatttttgtatttttagtagagacggggtttcaccatgttagccaggatggtctcaaactcctgacctcaggtgatccgcccgccttggcctcccaaagtgctggaattagagacgtgagccacagcgcccggcccctagagtacggatttcaatgggttaagggtttctggtctgaacatctgaagatgcctttccttaactgaatgcaagctcaggaacgtgtagattctaggattaagtatgattttctcccgttatttgaaatgcctgtggatcccgtgtgatgctaaccacctggacagttagagtaggtgtggggaaatttcttctaacaaaggaaaggaatatttttgtaatgaaaacagctcatttttatagttcgcaaccattagtgccccaaactctgaggtagttattacctcgccagcggtaaaagcttgattatagtccctgattaccgactgtgtgaaggtccttgtttccagcaacttccataggcaaaatgatattaattgtgattaattatcgtgtggcataatacaaagaccagatgatgtattatggcttccggagggcgcctgcatcgtttttcgctggagccctcggggcaggggaactggagagctccctgggtggcctttggcccttccctggtcagagcccgccagctgcgaggtgcccccagccatgaggtctgggtcttcaggctctcccgacttcggtgccttgaccttgggcagaaggccctgttaaccttcctcgctcacggactcgagcgaccagcgccggggacggggcgggccgtccttaggccccgccccttcgcctccgccccgccccgccccgctcctggccgccggctccctccggcagcagggagatgcgcgcctgcgccggccctcgcctcggagcagccatgatggtgggtgttctccgcggcgccgagtcccgggagcgcggtgggggcagcgggcgcggggcgggcgcggggaccgcgccagcctgtcactaatgtctccctttgtgtctcccccatctcatccttttccccggcgcgccgtgcccgccgaccccacaggaaggcctggacgacg

SEQ ID NO: 12186 - DNA, 2300 bp, Homo sapien
agatgaagcgaacaggaatttgctaatacctacacatagcagatgatcagagctctggagagacattctccatgacttcttggaagttcaacagataaagtgaaaggttccataaattgtaatgtaccagctagatataaagtattatccacttgcttgggattcatgcttagacattgggaaatcccttctcaatttttgtctctaaacgaagtctatcttccaattaagaaaacaaacccaagatatagacagaaaaataggtctgtttcaatgcctagcatgttccatttaaaatacagtaaatttgggctgaaagaacttatcacgcaatctagggcaaacaccatctcatgactttcctgcctaacctcaatcctgagaccaccaaaaacacaccatttcctactgaacattgatatactcagaaactgaaatctaaagctggaaagggccttaacgataatttaataacagtttgttttacacatgaagaaccctgaggtatggaggagttaagattaaaaaaagagaaactgccttggcgcagttatatgggctttgctagaagaggctgcgtcggcttatttgatatcagctgtcatagctggagcttcatgaaatctctaagagagagtacaatccatttcctatgaagtctaaaatgtaaaaggatattactaaggaatgctaccacgtaattttttaatcataattattatttcaaccagagttttgaaaagtgatttaccaacactgcgtatcattttgtttttgctaagtactatcaactggagcaatctcgtgtagtatttattctcatttatctctaaacaactgggggttttccaaaaagactcaaaatgtcgaaatccagcctctttcgggaaaaccacaggtaaataaggaaagacaccttcgcaggagttcccctcacacgcacccacccctggcgcagggccctacggaggcggtggaaacgcccctctgggagcccagcactctctcccaccggcttgacgggtgatgctcgggggctggaggcggctctgccaggctcccgggctccgctaccaccgcgtcgccccccccggcctgcagggctcgcgctctgaggtcaggccgaggacgcggacagccggggagccggggccgcgagacagaagggccggcctgggagcgggtggcgccggctggggaccaggcgtgcccacgtgaccgccccgcccgctgcctgcggcccgccgagccccgccacctccctcgggctgcagctcccggcgtgccccgcactctccgctgcccacccgctcgcccgcccctccttctcctcccagtgccacagagccgaagcccgagctgccgccgcagccacagccgagggcactatggtaagacgagcgcgctggccgggaggccgcggcgaggcgagaaaagccccccgcacggccccgggagtgaggccgccattttaacctgattttggcctccaaggtgggcgcttctgctctgcggctccgctgctctccagccgaccggcctgccctccggccgtcaggccctgccctgctgctctttggattttggggggcggggagggcccgggcgtcggcgcaggttgggggtcggggccgggcgggcgggggcgcgagagggtctgcggactgcagccgctcgcgccgcctttgcccttcgcttcctaattttacttaacacgcgaggctttaaaattggtacgtgctgcgaacgctgtgtgggtcagggtctggacggcctgtaataaaacccttacggggagattaaggaagagggaaaacactttttaaaatgctttctcgccgtaaaagcttttacactcgatcagttagttttggagtgtctgcatgtgagctgtgtgtgggccgtgggcggtttggagtttacacttgattctctttccttatgaggaaacgtcagtggctaggatgactttaaagaaaaaaatagtagaagcattaactgaaatccaaaagtgtttttttaaggccagccgagttgacacaatacagaaggtatttttgctgccactcctgaagctctgacatcacccagtgaaataggaaacatttcagggatgggacaacttgtatttgtccctttcgcttccacgtccaaacccctttaagaaggatgaatgggcaggatgagttagactccttcgctgtatcgtctactgattcttaaaatgtgacaaatctgattggacgacttacatggtacggtgcaatttttgatgtccagactaaagtgagtcttctcta

SEQ ID NO: 12187 - DNA, 2300 bp, Homo sapien
cctctagatgttggaaaaggcaaaggagtctcccactacagtctcttgactttagccccatcaggcttatttctgctagttgtggtggttcatgcctgtaatcccaactactcgggaggctgaggcaggaggctcacttgaggccaggagtatgaggctgcagtgagctatgatcacatcctgcactccagcaacctgggtgggcaacagaaccagagactatctcttaaatatatatatatagagagagagacttgtttctctgactctgtaagaccataaataataaatttgtgttgttttaaacaagtaattttatggtaatttgttatagcaacagtcgaacgctaatacatgtggtatctgacactcagatccccctccactacacagtgaccaaaattcatgcagcaatgattggcaatgctgcccctttaccaagtggtggtaagttctggttataactcacagaggtgaaggcaggaagctgctactggccctgacattctcagtgccatgctcacaagggcatgtagaaaggcttcacaattttcagaagcttccttttcattctctttacagcactaaagcatcttaaatgtattatttcagcacctattaagcacctactatctgtcaggttccagaaattcaaagataaccaggactcagatccttaaggagcttacagcgcagtagggtggcagaagacataaacaagttattataatgtaacaaaatatatgcaagacaaaaataacttcaggaaaagaatcttagaacatgtgaattaccatctctgtttggggagggtaagagagaatgggaggcatggaaaggggttggagtccgagctagggggtgactagcatctttggaatccccagctttggtgggtaaggttctgacacccactttaggccccagtgtcatcagacctggtctctgctggggctgctgcaaatctctgaggttgggaagggaaggtaaccgcaagatgaagcgaacaggaatttgctaatacctacacatagcagatgatcagagctctggagagacattctccatgacttcttggaagttcaacagataaagtgaaaggttccataaattgtaatgtaccagctagatataaagtattatccacttgcttgggattcatgcttagacattgggaaatcccttctcaatttttgtctctaaacgaagtctatcttccaattaagaaaacaaacccaagatatagacagaaaaataggtctgtttcaatgcctagcatgttccatttaaaatacagtaaatttgggctgaaagaacttatcacgcaatctagggcaaacaccatctcatgactttcctgcctaacctcaatcctgagaccaccaaaaacacaccatttcctactgaacattgatatactcagaaactgaaatctaaagctggaaagggccttaacgataatttaataacagtttgttttacacatgaagaaccctgaggtatggaggagttaagattaaaaaaagagaaactgccttggcgcagttatatgggctttgctagaagaggctgcgtcggcttatttgatatcagctgtcatagctggagcttcatgaaatctctaagagagagtacaatccatttcctatgaagtctaaaatgtaaaaggatattactaaggaatgctaccacgtaattttttaatcataattattatttcaaccagagttttgaaaagtgatttaccaacactgcgtatcattttgtttttgctaagtactatcaactggagcaatctcgtgtagtatttattctcatttatctctaaacaactgggggttttccaaaaagactcaaaatgtcgaaatccagcctctttcgggaaaaccacaggtaaataaggaaagacaccttcgcaggagttcccctcacacgcacccacccctggcgcagggccctacggaggcggtggaaacgcccctctgggagcccagcactctctcccaccggcttgacgggtgatgctcgggggctggaggcggctctgccaggctcccgggctccgctaccaccgcgtcgccccccccggcctgcagggctcgcgctctgaggtcaggccgaggacgcggacagccggggagccggggccgcgagacagaagggccggcctgggagcgggtggcgccggctggggaccaggcgtgcccacgtgaccgccccgcccgctgcctgcggcccgccgagccccgccacctccctcgggctgcagctcccggcgtgccccgcactctccgctgccc

SEQ ID NO: 12188 - DNA, 2300 bp, Homo sapien
ttacagatcgacatatctggagatcagcattagaaagtggacggtatgagctgttaagtgaggaaaacaaggaaaatgggataattaaaactgtgaatgaagacgtagaagagatggaaattgatgaacaaacaaaggtcatagtaaaagacaggtacaaaaagatttttctaaagtaaccattacttttccttgccattttaaggttttttttttttttttggtttttaagtaaatatgttgctttttcttattttaaaaacttgtcgtgaggaccttgatatttgtaaccattggactgatcattttctaaacctcaggatctctgttactccactttgtactaatgcaaccaaaaaacaattcattcgaataatgataatttcttaaagtttttttttttaatctttgaacttaaggttttattaattttggaaagtaattatactattattcttcttttctataggaaaacttagtaaattagtaaattctggtagacttgaatgttatttgagccaggcaagatggcgtgggcctgtagtctcagctgctcgggaggcggaagcaggaggatcacttgaggccgggagttggagaccagcctgggcaacatagtgagaccctgtctctcttttttttaattatctgggcatggtggcatgcacttggtttttgttgttgttgttgttattttttgagacggagtcttgctctgttgccaggctggagtaaagtagcacaatctcagctcactgcaacctcctactccctggttcaagcaattcttctgcctcagcctcctgagtagctgggattacaggcacgtgccaacacgcccagctaatttttgtatttttagtagagacagggtttcgccacgttggccaggacgatcttgatctcctgaccttgtgatgccctgcctcggcctcccaaagtgctgggattacaggcctgagccaccacgcctggccggcatgcacttgtagtcccatctattccatcgttgtaccccaggacttcaaagctgcagtgagctaataatgattgtgccactgcactccagcctgagcaacaatgagacctcatctctaaataagtataagtattaaatattattactaatcagaatctatatccatatatctatagatacttttattttttcaagattattttggatattatatgcctttaagcagtttgtcatctagaagggaacagtggagaaacatgaggctagcattatatttactagaatggggtactgatagaaggttatacccagtgcagatgaagtacatgggcgggctacttgtcttagtagaacatgggagatagtaaaggaagtgcaagaggaagtgactgcaaagctgagccctaaagttgagaaaaataggacactgggaagaaaaaccatgtacaaaggctttgagtgaatgagtttgcactttaaaatgatcattttaggccaggcgcagtggctgacacctgtaatcccagcactttgggaggctgagacaggtgaatcatgaggtcaggcattcgagaccagcctggccaacatagtgaaaccccgtctctactaaaaatacaaaaaattagccgggcacggtggtgggcacctgtagtcccagctactcaggagactgaggcaggagaatggtgtgaacccgggaggcagagcttgcagtaagctgagatcgcaccactgcactccagcctgggcaacagtgcgagactgtctcaaaaaagcaaaaaaaaagggcaaaacaagagaaatagagataagctgcccgaaatacttaggctttaaggcccatcacaatgtcacctctctgaaacctttcccataagccttccctcttctttctctccttcaaatatttacccttagtccttctaaatgaatctcccttccctactagtttactgcaactccttgagattgaggaaatgattttttacaaaggtataaataagcatttgaaccaatgaatggactcaagttttacctaatagtgtttttaagtaccataaactcttaattgttttaattgtagacttttggggataaaaacagaaactccaagtactgtatcaacaaatgcaagtacaccacaatcagtgagcagtgtggttcattatctggcaatggcactctttcaaatagagcagggcattgagcggcgttttctgaaagctccacttggtaagtatctgtttttatttcaaaatattagttgtgttataagtaattttgagttggcctttaactaatagaactttattggctg

SEQ ID NO: 12189 - DNA, 2300 bp, Homo sapien
tggcctcccaaagtgttgggattacaggcatgagccaccgcgcccggcccaataaatactttctaggcagggaattctaacttgtcactcagtatactagttggagacaggtttaaaacaccaaatcttggccgggcgcggtagctcacgcctgtaatcccagcactttgggaggccaaggctggcggatcacctgagatcgggagtttgagaccaccctggccaacatggtgaaaccccgtctctactgaaaatacaaaaattagctggacgtggtggtgtgcgcctgtaatcccagctacttgggaggctgaggcaggagaatcgcttgaactcaggaggtagaggttgcagtgagccgagatcgtgccaccgcactccagcctgggggacagagtgagactctgtctcaaaaaaaaaaaaaaaattaaatctgtaaactcttatttgaagagttaaccgatactaaagtatatacttactacttacaggagcatttccaaacttctgtgacttctgtacagtaaggtgcattcatagtattaatgaaatttaaaacacccaaagaataacgcctttcacaaatgtttattttgctaggtgtatgaacagttaaagccagcctgaaagataaaaaatactaactcttgatttcgatttcttacattttctgctccaaagtacaaaggaacttaaatttgaagttataaaacggatcccacattgtttctgtaattatcatttcgcagtattggtaataggaataacatctttgtcgaataaccattcctaaaacttacttttagactcattcttacatattaatttgcaaataagcaaatgttaaggacagtatcaaaaaagactttaaaacacatctagtgaacgttctgagttacttctagtttcgaaaattctattgaattccaaggtcacatgtattatgtacattaaacttgtttccctaaataaaagttactgatatgggaaagttgctttaggggaattttcgctagtaaatccataatccttaaaattctaagtgaattaaacattgatactttgcaaatatttacagcagtgtaaatattactttttaaaggtgcgttagtttcaagaatgctggggtcctacaagcatgatgacactttgtaacacatactttttttttggtcttttcctctgctttctaaatctcttaattgccataagtattaaatagaactgatgtcaaggtatcttctgttcaagatggatgtttactaaacatgcaaagtatttttagagatatagattctaatttggaagaagaaaaatagcaacaaattttcttattcatttcttttctcatctttaaaatacaagttaaatcgtaattggaatcccttttcccatcgtgtagtcaagagtctgtgccagacttgaaggctttactttgttagccatgtgtttatgaacccccagcgctttccctagatcttttggctgataatctcaaacatggaggatgcttctgaatcttcacgaggggttgctccattaattaataatgtagttctcccaggctctccgctgtctcttcctgtatcagtgacaggctgtaaaagtcatcgagtagccaataaaaaggtagaagcgaggagtgaaaagctcctcccaacagctcttcctccttcagagccgaaagtagatcagaaacttcccaggagctccgagaggcggggaagtggcggtgggacgcaattccccgcgcggagtcgggcagtggcagcgggagaagcggcagccaggggcgcggcggggccggagagaggcggtcccctgggaggacggggtctcccctcgttgcctttgtagtggagaaggtggacaagtggcagtcggcgtgatcgcaggtgagggtcgctcgggagccggccggcgccggcggggaagtggaggcgagccgggaacaaagcggagcagctccggggtccgcccgcggcgagcgctctggcggcgttgggctggccggccggccagctgcgcgccgagcacgttgtgagcctggcggcggcggcgggcgaggagccggcgctgggggagggggccgccgccgctcccgcactgccccccgcggcggggcgtcctgccccattgtgaggcggcggcaggacgagaggaggtagggcgcgctcggggggcaggggcggcggcggctccgctcgctcgacacccgggcagcggcaggaacgaactcggctccggtagcggccgcggcgcgtcagtcacacaaaaggcagccgagcttctcccagcgc

SEQ ID NO: 12190 - DNA, 2300 bp, Homo sapien
tataattttctaaacttacattgttctgaaataacaatgaacaactgtataacattcattaaatgccacaaatcattaaaataaaccatatgtatataattcagagaaataagttatgatagtattgaaatttgagtatgatcgtgagaaaactgagcatgatagcttttgatggaatagaataaaattttaagctagtataagaaaaaacccaacttaaatatttgtatttaataataaaataacgacttttgatcatgatttgaatgacttattgaacagtaagatctaataaatataaatactgacgtattcagaaagaatttcatctttatttagcttaattgttaaattgggattttgagttgtgagggtgatgcttcaatatagcttgaaaattatccattttcccaatcccccttttgagtttacctttgtgggctctaaatttttcacctggtagatcaataaatactttttttttttttttttttttttttttttttttgagacggagtctctgtcgcccaggctggagcgcagtggcgccatctcggctcaggacaacctccgcctcctgcctcagcctcccgagcagctgggattacaggcacccagcgccatgcccagctaattttttacttttagtggagacagggtttcaccatgttggccagcatggtctcaacctcctaacctcatgatccggccgccttggcctcccaaagtgttgggattacaggcatgagccaccgcgcccggcccaataaatactttctaggcagggaattctaacttgtcactcagtatactagttggagacaggtttaaaacaccaaatcttggccgggcgcggtagctcacgcctgtaatcccagcactttgggaggccaaggctggcggatcacctgagatcgggagtttgagaccaccctggccaacatggtgaaaccccgtctctactgaaaatacaaaaattagctggacgtggtggtgtgcgcctgtaatcccagctacttgggaggctgaggcaggagaatcgcttgaactcaggaggtagaggttgcagtgagccgagatcgtgccaccgcactccagcctgggggacagagtgagactctgtctcaaaaaaaaaaaaaaaattaaatctgtaaactcttatttgaagagttaaccgatactaaagtatatacttactacttacaggagcatttccaaacttctgtgacttctgtacagtaaggtgcattcatagtattaatgaaatttaaaacacccaaagaataacgcctttcacaaatgtttattttgctaggtgtatgaacagttaaagccagcctgaaagataaaaaatactaactcttgatttcgatttcttacattttctgctccaaagtacaaaggaacttaaatttgaagttataaaacggatcccacattgtttctgtaattatcatttcgcagtattggtaataggaataacatctttgtcgaataaccattcctaaaacttacttttagactcattcttacatattaatttgcaaataagcaaatgttaaggacagtatcaaaaaagactttaaaacacatctagtgaacgttctgagttacttctagtttcgaaaattctattgaattccaaggtcacatgtattatgtacattaaacttgtttccctaaataaaagttactgatatgggaaagttgctttaggggaattttcgctagtaaatccataatccttaaaattctaagtgaattaaacattgatactttgcaaatatttacagcagtgtaaatattactttttaaaggtgcgttagtttcaagaatgctggggtcctacaagcatgatgacactttgtaacacatactttttttttggtcttttcctctgctttctaaatctcttaattgccataagtattaaatagaactgatgtcaaggtatcttctgttcaagatggatgtttactaaacatgcaaagtatttttagagatatagattctaatttggaagaagaaaaatagcaacaaattttcttattcatttcttttctcatctttaaaatacaagttaaatcgtaattggaatcccttttcccatcgtgtagtcaagagtctgtgccagacttgaaggctttactttgttagccatgtgtttatgaacccccagcgctttccctagatcttttggctgataatctcaaacatggaggatgcttctgaatcttcacgaggggttgctccattaattaataatgtagttctcccaggctctccgctgtctcttcctg

SEQ ID NO: 12191 - DNA, 2300 bp, Homo sapien
atcccagcactctgggaggcccaggcaggaagatcacctgaggtcagcagtttgggaccagcctgggaaacatggtgaaactccgtctctactacaaatacaaaaatgagccgggcgtggtggcggacgcctgtaatcccagccactcaaaatcgctcgaatcagggaggtggaggttgcagtgagctggatggcgccactgcagccccgcctgggcaacaagagtgaaactctgtctcaaaaaataaatacacacacatacacacacacacacacacacacacacacacacacacacacactctcgcatacaggcataggatagtttgctatagttaacaaacataagaatatcctattttcttgagctttcatcaggctttactttgccagaatacatctatcccatttttcagtaactagatctagctaccacatttcctcagttttaacgtgtgtgtttaaagagacagggtcttgcgtcgctcaggctggagtgaagcagcgggatcaaagctcactgcagcctttttctgtctataaatcttcaacacttggctgcgctgcaatctctctgagcctgcccgattcgtgaatcattctttgctcaaaatgttaaatttaacttggctaaggtttttcgtttaacacttcctactaacgctacagcctaaaacctctcctgcaaaatgctttttcaggtggcaacgtaccaattctaacaagtttgtgggagtaatggggaggagggctaaccctctattttctttcagaaaaagggttaggcacaaggagctctaaaggcttgtccgaagtctgctgaaaactcacaaaccactcagaaccaggtttcccacacccaattaattccaagtggtactgtatccgattacccccattttccaagagatagtttattttttcccctcttttcccctccccactacactttccacttagccctttttgaactgcaaaataacctctcaactcccctcaccagaccattctctacagagcaaattcatctacgagatccaagacgcaactcccaccgccaggcggtcgcctcagaagggtaagcagaaagcatgcccacttggccacttttacaacttatttctgctcagaaatgcaccaactcaactacccggtagataaggcaccagctagcagagacctcttgctcatttcctcttgtaccttataaaatgcccgcttttttgctccaaagacgaagcgggctggcttcagaaataaaatccctcttcttgtatactagggctcgctcttgttaattggtgtctacgtgtggcgagcaactaactctcttttccgttagagcactcaaagccctggtcaatctaccccccaagacagcagagaccagcacaacgatcccaaggaaggctgttggcttcaccccgcttaagtcctcaaagtcagcgcctgcagcatatccttgcccccaccacctgcctctagctctggtcacttacacttacggttagttcgcatccactgtaacagcgcctggcggtcggcaggagccacagtgcgaagcggccgcagcatcactgcctgcctcgcagtgggaaattttaccttgctggagcaagccgcgcaggcactggctggcattgcgcatgcgcaagcagagaccgccccaccctccgcggaacaagcctccggtctgcaaagccctaagccccgcccctctacggaggtctcacgtgcgcctggggatccctgccttcagtcacacctctatctctcatctttccgctcttagctgggagtgctccgcctagtcacttttcttaaggtggctcgtcgaggcctgacttcttccccgaaatcacgtccctagacagcctcctattttaccactaactttactcctgcagttattcagcggtaggaaactgaaaccaaaaaccagtgtaagcaagtaaacatctaaactgtttcaggagccgcgtagaaggaacgcggcggtgtgccccggaagcggaagtagattctcctatagaaaggctggactacgcggagtggtgacgtttcctcattgggcggaaggttcgctggcactccgttggtcttccagctggtgggagttgacgacgtggtgctgggcgttgggaccctactttatctagttcgggaagttgggttgtggggtcatacctgtctgtctgctcccagctttcttgggtttcttccgacggcgtggggcctcgctaaggaattcccggcccctcagggccacggctttagcggtgtcttttgcggtaagtgtc

SEQ ID NO: 12192 - DNA, 2300 bp, Homo sapien
caggcgcccgccaccacgcccggctaattttttgtattttatagtagagacggggtttcaccgtgttagccaggatggtctcgatctcctgacctcgtgatccacccgcctccgcctcccaaagtgctgggattacaggcgtgagccaccgtgcccagcccgagttgttgatttgtaataaactgctcttcaattggatatttgtgttaaaaataactttttaggaaatacttccagttcacgttagaatgtaacttgtactttgaattttcagtaaactaagaaatacacatgtaaactgtgaaaatatattctgcttcggcaatgaaaattgtaatttgaggccaggcgtggtggctcacgcctgtaatcccagcactttgggaggctgaggtgggtggatcatctgaggtcggaagttcgatactagcctggccaacatggtgaaaccccgtctctactaacaatacaaaaattagccgggcgtggtagtgcacaactgtaatcccagctacttggcaggctgaggtgggggaatcgcttgaacccgggaggcggatgttgcagtgcgccaagattgcgccattgcactccagcgtgggtgagaccccatctcaaaaaaaaaaaaaaagaaaaaaaagaaaaagaaaattgtaatttgatatttaattgccactttggaaaataaaatcatgcatttataaatatcccacaaagttttagtaataaagattgttgattgccctgcttgccagtaagaaggaagagattttgaatacatataatgcagaactgtgttgtttatgaatgccaattcatgaagtcttaacaattggttctttatttttgttttcaatttatggccgagtttggttttgctgttttggactgtctcaactccctgctgatgccaccatacagagtcagatcaggtactaacttgtttacttcagcagcaacctaacttgattttattaccaggatagagagcaatatggatttccaactagtttttaaggcgtagatggttttcaaatgattatttgttttttaaagtttttggttttgtttttaggttccagttatacatagaataggaagtgtacaataacattaggcagagggtaaggagaagaactttggcacagaagagaaaggaatatttaatatttgggcctgctgttgctatgatgaaaaacatttacaaggtcatacaactttagggagcatttctgaattgagactagtatgaaaatggaatttaaagtatcaaatgaagcctcccatagccaaaataatgtatgttttggttttgccccctacatatttgtgaaaactttcatgctaaaacaacaatataccatttacctgcagaacctcagacttgtttgatgttgaagtcatgcagtaattgcatgattttttactttcgttgaacattgcgaaagacggaaaaaatctgggacgccccctctaacatacgcacacgactttaagacacagataaaacattccttacatttgtcaagatggaagcttactactgccctttgctctccttcaggtcttttcacttaacactttctacagttatacttaagtatttcagacaagagtaagcaaatatcacgcctggggttcttctttcgagggtattttggctggactgtcacccacgtttggaatggaaagtgcagcacgagccgtacattttacatttttcagcaaccacatcccatcactagcctttgaagtacaacgacacagctgtcttcattttacaagtgcaaaaaccgaggtcctgcggggtgactgccccagacgccgctggtgacgggctgcgccgaggtcgagacgccaggcttcaggtacacgtaccagaaatgacgtcacaggcggtgccaggcggggatccacgagctctggatgcttgcttggccggaagcgacgccccgcaaggacccgccccgccccgccccgccccgcgcgagccggtagttgcgcctcccagactgcagttggccagctctcggggtgcggagcccggcgggctaggcgaggcgcgggctggccccgcccctcaggccggcgagtccccttctcagagacttggctaggcgcggcgcgaggcgggcgctgggcgggtgagtcccacttcccgacagcctggctcggccagcgactgggcggggagaccaaggatggaagtgggcttaccggccattaccctctttctcaccagcgccagcagccctgtggtggcgacgacgatggaccaggagccagtgggcggtgtggaa

SEQ ID NO: 12193 - DNA, 2300 bp, Homo sapien
gggttcaagcgattctcctgcctcagcctcctaagtagctgggaatacaggcacccaccaccacatccagctaattttttctatttttagtagagatggggtttcactatgttggccaggctggtcttgaacacctgacctcagatgattcacccatcttagcctcccaacgtgctgggattacaggtgtgagccactgcgcctggctgctgctgcttttttgtacagaagaggtctgtcttgccagggctggtcttgaactcctaggcaccagtgatttctcacctcagcctcccaaagtgctgggattacaggtgtgagccaccacacctagcccagattggagtttgaatgccacttttaaatatgtaacctagcaaagtctcagttgccttacacataaaatgtggacaataatgtaccttccttatggggttatgagatgaaaatgaatgaatccatgtaaaatgcttagcatactacataagtcaaaacgtgatattattttgtaaaatttgaaaaagtatatatgtgtgtacttatagtagaggagttcaaaaaacactgtcagctaccatatgctgtgattggattcataactggattttttttttttttttttggacacaaggtctggctctgttgcccagactgaagtgcagtggcccgatcttggctcactgcagcctctgcctcctgggttcaagtgatccacttcagcagcttcccaagtagctgggactacagccgtgtgtcactacgcctggctagtttttttttttttttttttttttgagacggaatttccctcttgttgcccaggctggaatgcaataacgcgatctcggctcacctctgcctcccgggttcaagcaattctcctgcctcagcctctcgagtagctgggattacaggtgtgagccaccgtgtccagccaatttttgtattttttttgtagagaaaaagttttgccatgttgcccaggctgatcttgaactcctgagttcaagtggtccacccaactcagccccccagagtgctgagattacaggcgtgaaccactgtgccaggcccatagctgaattttcaaggacagaaggacaatcaggcactttgatttggaccttctctgtcctttcctctgctccagttacatgtagttaagtctgggcaggtttgaacagttaataaaacaaactgttaatgaggccatatttaccaatccgatccttatagagaataagaaaaatatgcatcactggctaaatggctctcatatttccaaatacatatttttcatcaaaaagagaataattctgcagtatgtcacacagcagagacagcaaattatatgcaaataactggcttcctagaactggaaggaggtatttatgactgactacccagttcatacttcttcactgttaggtgatgtccccccatctgtcacacagcaggttatggtcagtgcaagtaaatcataaaagatcttcagataaacataaccaaagtactgctactgttttttctacctttttatctccttgaaattcaccaaatttttaatggcagtgacaggaaaataaatgatatttttcaagagttttctctagttattgagatttagatataataatatcctcataatatctaagttagataagattttcttttacctgttcttaaaggatctaaaaagaagaagaacttcctaactgctgtacaaacataaaaggagtagaaagatttttccagaccatctaattgtggcaacgtagggataagttccaatatgtagttttctaaatcctgaaaataaaacaaaataaagtgttaaatgtccagtcttgattcattagatattagaatttcattactaaaaattattcagcattaatactatattgataaagaaataaatgcatgactattttagtggtaaaactattttacattaaattttgtttctaatttgttttagcatttttgaaaagtagtaaattctacatagttccaaattcaaagggaacaaagatattgattaaaaagcctctcacctatttcttctccccaaaggttaagtaacttgtattatcaacttctgatgcagcttcccaaaggtaacagatgcaaatatgaaccaatacatatatatttctttccctctttttttttttttttgagatggagtcttgctctgtcacccaggctggagtgcagtggtgttgatctcagctcactgcaacctccgcctcccaagttcaagcgattctcctgcctcagcctcctgagtagctggg

SEQ ID NO: 12194 - DNA, 2300 bp, Homo sapien
agccaggatggtctcgatctgctgacctcgtgatccgcccgcctcggcctcccaaagtgctgggattacaggactgagcgaccgcgcccggccgactgcttctcctttcttaatgagatatatattaaaatacaagttcatcagcttaaagtaagaagcgggtaggacagactgcaggtgtaggagatgagaagaatagtgtaaaagagtgttgcctgggtgcggcggctcacgtctgtaatagcaacactttgggaggtggaggtaggaagactgcctgaggccaggaattcgagaccagcccaggcaacatagcaagacctcatctccactaaaaataaaaaattagccgggtgtggtggcgtgtgcctgtacttctagctgctcaagaggctggggtgggaagatcccttgagcccaggaaatcgaggttgcagcaatacttcactgcgccgctgcactccagcctgggcaacacagggagatcctgtatcggaaaaaaaaaagtgtatttaggaaaacacagattggcagtttgggagatgaaaattgaatgtaggagaatgaacgtccaggaaaacacggtagacatgaccaaaacaccttctttagattagtggacttgtattaaaagtgagataactcggcggggcgcggtgactcacgtctgtaattccagcactttgggaggccgaggtgggcgaatcacaaggtcaggagtttgagaccagcctggccaatatggcgaaaccccgtctctactagaaatacaaaaattaaccggccgtggttgcgcgcgcttatagttccagctactccagaggctgaggcagaagaaccgcttgaacccgggaggcagaggttgcagtgagcggagatgctgccactgcactccagccagcctgggcgacagagcaagagactccgtctcaaaaaaaaaagtgagacaactcaccaaggttctgtttttctccagccactttcaacagcccttagtgcgggtgtggaataggaaaggtagatttaacgaggttagttaataagcaatgtgaaggagaaaaataaaaggaaaaatggattatgaaatataaaatggattacgagggaagcaaaaagcgtgacagtaaaaaggcaggaggacaattataggtcctggtggggttcaggcgttgttggagccggggttccaagttattcttcacaagtttagattaagaccatggaagtcagtgactaaagctaagtttttcgttcctctagattctgccccaggaaagtttgggtcaaacctatcgggatccttaaaccacattccactccgcctcctttgtcgggaggtttcacagaagcggaaaaggcggctcccccttgctcctcctccccacctcccccctacctctaggagtttagggccgggccatcccaacgggctgcccctcccaaaactcactgtttggacaggtgttgggcgtcgctaggcgccgacgaagaacttctttccagtccatggccgacttccgcgcagcagcttctgcatttgctgtttcctacctgctccacccctaccagctcaggcgtcagcaccgccaggccccgtaaaggttaggaaggccgtccaaccaccatcttgatcgagggcggaagtcttggctaaagaggcaaaaacaattactgtcactgccgcggagaataccgctaccacgctgactgggggaaaaaactatgaaagagatggaaaatggttctccttcagaggcgacccaagctcaccaagccggattttaaaggccacgataagcccgcgttttcctttatcgtgtgcctttggcgcgtgcgcaccacgtgacccaggagttcattagttccggcttgagggaagcgccttctttcacaatttcttttcattgttcattgcggatatctggaagccttccaggtcccctgaatgtagtagacacttcagcagccgtctcctaccccttttgccactaaatgcttcaaaactgccttttttcctcgccgccgggccaggcggaacgcctaagtccgggtcagtctcgtccgtcggtcggggctggcgcggtgcatcgtgggcactgtagtttccgccgcgtttatggccgcgttaagtctgagtgccgctttgagttgttgaatgaagtgaacttcatttgtcagcgttcggtacgcagtctaggcagcgcccttcctgtacctctcttcctttcctgagtcgttggcgcagctgactcgccacctcctccctcctcgtccccccaccggaggagttttgcggtctg

SEQ ID NO: 12195 - DNA, 2300 bp, Homo sapien
taaaatacaagttcatcagcttaaagtaagaagcgggtaggacagactgcaggtgtaggagatgagaagaatagtgtaaaagagtgttgcctgggtgcggcggctcacgtctgtaatagcaacactttgggaggtggaggtaggaagactgcctgaggccaggaattcgagaccagcccaggcaacatagcaagacctcatctccactaaaaataaaaaattagccgggtgtggtggcgtgtgcctgtacttctagctgctcaagaggctggggtgggaagatcccttgagcccaggaaatcgaggttgcagcaatacttcactgcgccgctgcactccagcctgggcaacacagggagatcctgtatcggaaaaaaaaaagtgtatttaggaaaacacagattggcagtttgggagatgaaaattgaatgtaggagaatgaacgtccaggaaaacacggtagacatgaccaaaacaccttctttagattagtggacttgtattaaaagtgagataactcggcggggcgcggtgactcacgtctgtaattccagcactttgggaggccgaggtgggcgaatcacaaggtcaggagtttgagaccagcctggccaatatggcgaaaccccgtctctactagaaatacaaaaattaaccggccgtggttgcgcgcgcttatagttccagctactccagaggctgaggcagaagaaccgcttgaacccgggaggcagaggttgcagtgagcggagatgctgccactgcactccagccagcctgggcgacagagcaagagactccgtctcaaaaaaaaaagtgagacaactcaccaaggttctgtttttctccagccactttcaacagcccttagtgcgggtgtggaataggaaaggtagatttaacgaggttagttaataagcaatgtgaaggagaaaaataaaaggaaaaatggattatgaaatataaaatggattacgagggaagcaaaaagcgtgacagtaaaaaggcaggaggacaattataggtcctggtggggttcaggcgttgttggagccggggttccaagttattcttcacaagtttagattaagaccatggaagtcagtgactaaagctaagtttttcgttcctctagattctgccccaggaaagtttgggtcaaacctatcgggatccttaaaccacattccactccgcctcctttgtcgggaggtttcacagaagcggaaaaggcggctcccccttgctcctcctccccacctcccccctacctctaggagtttagggccgggccatcccaacgggctgcccctcccaaaactcactgtttggacaggtgttgggcgtcgctaggcgccgacgaagaacttctttccagtccatggccgacttccgcgcagcagcttctgcatttgctgtttcctacctgctccacccctaccagctcaggcgtcagcaccgccaggccccgtaaaggttaggaaggccgtccaaccaccatcttgatcgagggcggaagtcttggctaaagaggcaaaaacaattactgtcactgccgcggagaataccgctaccacgctgactgggggaaaaaactatgaaagagatggaaaatggttctccttcagaggcgacccaagctcaccaagccggattttaaaggccacgataagcccgcgttttcctttatcgtgtgcctttggcgcgtgcgcaccacgtgacccaggagttcattagttccggcttgagggaagcgccttctttcacaatttcttttcattgttcattgcggatatctggaagccttccaggtcccctgaatgtagtagacacttcagcagccgtctcctaccccttttgccactaaatgcttcaaaactgccttttttcctcgccgccgggccaggcggaacgcctaagtccgggtcagtctcgtccgtcggtcggggctggcgcggtgcatcgtgggcactgtagtttccgccgcgtttatggccgcgttaagtctgagtgccgctttgagttgttgaatgaagtgaacttcatttgtcagcgttcggtacgcagtctaggcagcgcccttcctgtacctctcttcctttcctgagtcgttggcgcagctgactcgccacctcctccctcctcgtccccccaccggaggagttttgcggtctgtagagagctatgcagggtgagggcccctagacttcggctttcgccgctgttggtggtaggctggagttgggggtccctggatacggttttggctttacaccccctttccagcaagcttcccgtgg

SEQ ID NO: 12196 - DNA, 2300 bp, Homo sapien
tttaaagtttccaacataggaacaatatcatgacctagcaattcctgatataaattccaagctgtgtttacatcttgatgaaggagagctccctggatacagtcattatagttcttttttgaaggagttataacttttttgatgtcctctaacagcaacaatgcttctctccatctgtctgaatggatcaatccccggatgagaagactgtaacctctaggttctaaagtcttatatctggctttcataatttcaaagacatcaataacttcagatgtctgcatatgaaagacacagagatacaaatacttgaccagtaaatcgtaacttacaataccattatttttggctgctacccatgccagcagagatttagccacatctatagagctatgacagccagccatctgtgaaatgatccaactttcgaaactggtctttccggtgttttcttttaaatcttccttaagtttatcccactcctctgaattcaaaggttgtgttgggagttgaatagtgttcctcacaggtgccaaggcatgatcttcagtttgagaattcatctgtgatctctccttagctgctccagctaaaaaaaaatgaggaacagaataaacttgcttattactgccctcatctttcctgagatatctggccttggcaatcagattcgttgctttggtattctgtggagacattgttttaagagaaaacaacctctgctggttcctgatgccacagcggtctgccagaaacagcgagacataagagtgccctgggcctagcccaaggtatgggctcttccaaagcttcggaaagcttcgaataccaaacaaatagaaagtcattatgcagtgagatcagcaccagatagtgagagagatgttgaaaaaacccctcttctatggcaaaattaaagagattgggggtcggcggtgcagagtcgaagtggaactttttaaaaggtttgtgtttcttccttacagacaaatcaaggttctgcttttggggctacttaaaagcaagaaggcaggtgagttttctctattaaacaacaatccggggatgtccaacgtcgcaagccgcaaaccaggggacagagcaggaatcctctggtgcctcttacattccagttcatgaacctgaggaaaaagcacaagacggaacgcccagttttactcacgtggatcacagctgtcctgaaaaggaacagattcccacgggaagcttgctggaaagggggtgtaaagccaaaaccgtatccagggacccccaactccagcctaccaccaacagcggcgaaagccgaagtctaggggccctcaccctgcatagctctctacagaccgcaaaactcctccggtggggggacgaggagggaggaggtggcgagtcagctgcgccaacgactcaggaaaggaagagaggtacaggaagggcgctgcctagactgcgtaccgaacgctgacaaatgaagttcacttcattcaacaactcaaagcggcactcagacttaacgcggccataaacgcggcggaaactacagtgcccacgatgcaccgcgccagccccgaccgacggacgagactgacccggacttaggcgttccgcctggcccggcggcgaggaaaaaaggcagttttgaagcatttagtggcaaaaggggtaggagacggctgctgaagtgtctactacattcaggggacctggaaggcttccagatatccgcaatgaacaatgaaaagaaattgtgaaagaaggcgcttccctcaagccggaactaatgaactcctgggtcacgtggtgcgcacgcgccaaaggcacacgataaaggaaaacgcgggcttatcgtggcctttaaaatccggcttggtgagcttgggtcgcctctgaaggagaaccattttccatctctttcatagttttttcccccagtcagcgtggtagcggtattctccgcggcagtgacagtaattgtttttgcctctttagccaagacttccgccctcgatcaagatggtggttggacggccttcctaacctttacggggcctggcggtgctgacgcctgagctggtaggggtggagcaggtaggaaacagcaaatgcagaagctgctgcgcggaagtcggccatggactggaaagaagttcttcgtcggcgcctagcgacgcccaacacctgtccaaacagtgagttttgggaggggcagcccgttgggatggcccggccctaaactcctagaggtaggggggaggtggggaggaggagcaagggggagccgccttttccgcttctgt

SEQ ID NO: 12197 - DNA, 2300 bp, Homo sapien
gggtaaagattagcacaaattatgtatgttgttactttttttaaagagagaaaattttgtcgtaaagagaaaataaatcttactaagagatggaaaaaagtataatcagaagagtgattctcagcaactaacaacaaaaaagaatggctactttgaggtttaaagttattaaattaaaaataattagccaggtatggtggcacatgcctgtggttttagctactgaggagactgaagcgagaggatcacttgaggccaggagtttgaggttacagtgagctatgaacacaccactgcactccagtctgggcaacagagcaagaccctgtctcaaaaaaaaaaaaaattaaagaataaaaacatacatataaaaaaaccaaaattacctctcaaaccatgtttttatactgtgtgcaaatgactcccctggatacagctgattatttcttagatatgaaagaatatctagtagtttatttgaatagttatcatcctttatgtcttttccaaaatcaaagaaagcttttaaagtttccaacataggaacaatatcatgacctagcaattcctgatataaattccaagctgtgtttacatcttgatgaaggagagctccctggatacagtcattatagttcttttttgaaggagttataacttttttgatgtcctctaacagcaacaatgcttctctccatctgtctgaatggatcaatccccggatgagaagactgtaacctctaggttctaaagtcttatatctggctttcataatttcaaagacatcaataacttcagatgtctgcatatgaaagacacagagatacaaatacttgaccagtaaatcgtaacttacaataccattatttttggctgctacccatgccagcagagatttagccacatctatagagctatgacagccagccatctgtgaaatgatccaactttcgaaactggtctttccggtgttttcttttaaatcttccttaagtttatcccactcctctgaattcaaaggttgtgttgggagttgaatagtgttcctcacaggtgccaaggcatgatcttcagtttgagaattcatctgtgatctctccttagctgctccagctaaaaaaaaatgaggaacagaataaacttgcttattactgccctcatctttcctgagatatctggccttggcaatcagattcgttgctttggtattctgtggagacattgttttaagagaaaacaacctctgctggttcctgatgccacagcggtctgccagaaacagcgagacataagagtgccctgggcctagcccaaggtatgggctcttccaaagcttcggaaagcttcgaataccaaacaaatagaaagtcattatgcagtgagatcagcaccagatagtgagagagatgttgaaaaaacccctcttctatggcaaaattaaagagattgggggtcggcggtgcagagtcgaagtggaactttttaaaaggtttgtgtttcttccttacagacaaatcaaggttctgcttttggggctacttaaaagcaagaaggcaggtgagttttctctattaaacaacaatccggggatgtccaacgtcgcaagccgcaaaccaggggacagagcaggaatcctctggtgcctcttacattccagttcatgaacctgaggaaaaagcacaagacggaacgcccagttttactcacgtggatcacagctgtcctgaaaaggaacagattcccacgggaagcttgctggaaagggggtgtaaagccaaaaccgtatccagggacccccaactccagcctaccaccaacagcggcgaaagccgaagtctaggggccctcaccctgcatagctctctacagaccgcaaaactcctccggtggggggacgaggagggaggaggtggcgagtcagctgcgccaacgactcaggaaaggaagagaggtacaggaagggcgctgcctagactgcgtaccgaacgctgacaaatgaagttcacttcattcaacaactcaaagcggcactcagacttaacgcggccataaacgcggcggaaactacagtgcccacgatgcaccgcgccagccccgaccgacggacgagactgacccggacttaggcgttccgcctggcccggcggcgaggaaaaaaggcagttttgaagcatttagtggcaaaaggggtaggagacggctgctgaagtgtctactacattcaggggacctggaaggcttccagatatccgcaatgaacaatgaaaagaaattgtgaaagaaggcgcttccctcaagcc

SEQ ID NO: 12198 - DNA, 2300 bp, Homo sapien
cagccttaccgagaactctgactatgcaggcaaacagtaggaattacagtataccaggctctttcagagtctgagaagacaaaagtcttcaaaaggtcaagaggagttggtcctgagagtagggacctgaaccagaagcaagggaaaacttttatcagtccacttgggaactagccagtgctggaaagtaccctttgtgccagagatgctgtatgcatttaccgttttcttaaccatgtttcagtttgggattttttagattaataaaatagaaattaatttttaaaaacacttgagaaattggaattcccttatgaaggtcttagaacattttttctttaaaatagaaagttagtttaggaaatacattaaaggagtaagaatccctacttcagtattacagcaggcattacagtgccacaaacattagtgtatcttgccttccttgtacacaaaccatctttatctggggagaaaaacaactatcctaacattatgttttgcattttgtattcattaaatgggagtgtgccttggggaaagtcaaaataggcacaaatttgcgatttgaaaagccacctgctcttctcccggagctacctcgccagcttggaattactctcattaatccatgcaacactagctgctctaagccccatcccctcagctctagttcattattaatcaagggtgcttaacctcattccccattactcgtatttcaacctcagttccacatttttttttttttatttagatagatcttcctctgtcgcccaggctggagtgcagtggcgtgatcatagctcactgcaacctggatctcctgggctcaagccatcctcccaccttagccccccgagtagctgggactactggcgcgcgccaccacgcacagctaattttattttttgtagagacggggccttcctatgttggccaggctggagttaggctttctttctttttttttttttttgagacggagtctcgctctgtcgcccaggctggagtgcagtggcatgatctcggctcactgcaagctccgcctctccggttcacgccgttctcctgcctcagcctcccaagtatatgggactacaggcgcccgccaccacgcctggctaattttttttgtattttttagtagagacggggtttcaccgtgttagccaggatggtctcaatctcctgacctcgtgatccgcccgccttggtctcccaaagtgctgggattacaggcgtgagccaccgcgcccggcctccgctttcaagactaaaaattgcctgggcactgtggctcaagcctgtaatcccagcactctgggaggccgaggaaggtggatcacttgggctcaggagttcgagagctgcctgaccaacatggcgaaaccccgcctctactaaaaatacaaaattagccggtcctggtggcacacgcctataatcccagctactcgggaggatgaggcaggagaatcgcttgaactcaggagggggaggttgcagtcagccgagatcgcgccattgcactccagcctgggcaacaagggcgaaactctgtctcaaaaaaaaaaaaaaaaaaaaaaaagactaaaaattgtcggggctgctggccaaaagaagatcttgcctggctgtcagaaaataatgttctttccagcggctgcttgaacccgcttccttcagtgcctaaatttaacggctgcagctgcagctgcaacctgtttcccccgtaataggaatgaaagtggaggataaaagaggttaggaagaaggcaagccagcagtctgaccagacacaggatgcatgtaagagacttgttaattacacgttctatttaggtcacactgataggcaaatcgctattctgggcccccaggaagccttttcgtccttgctatagtcaattcattctccagatgaaagcctgaaagcgccacgacccaagtttcacgtctatccactcaagaggcctgcttggcgcaggcgcataccttcaaaggcctcccgccctcactccaccacccccttagggggcggggcctcagagctcagtgctcgaactggctccagagccgtgagttcggcatgcaagagcggaagaaacgcggctggtaccccggaagcagtcgctgcaacttccgggaggtgcttgtgtgcctggtgcgggagctacggggcccagggattgtgtttaaagtagtgcttctaccaacatgtcccgtggttccagcgccggttttgaccgccacattaccattttttcacccgagggtcggctctaccaagtaggtga

SEQ ID NO: 12199 - DNA, 2300 bp, Homo sapien
agttggagtagaaaatacttttgagtacattccaaattatagtgtagtcagtctgattttcacagcgtgttttcaaaagtgttaatactaagactgctttggccaaatgattaatatactgccaaggggttcctgggtaaatttctatgcatttcagtttctttttagggaagtaggaacaatatctatcttacaagattagttctgagaacaatgtggtacataaggcgctggaattctttcaaaaatttataccctgacatttccaagagccatggtcacccttacaaaggagagttaggcatgcatttgtagacaagcaatatgacttttaagctagaaaagaccttaagtaacattcaatctaatcttattataaaagttaagtataccacaaaaaagttaactgacctctccaactaatgtgcagtcaagtaaagatagaacctggaattgagatgtcccattgcagtcactgtttcaccttgcctcaatcattgtagatttgcatatcataaacctgcagagacaatggtgtctatccctgggaagttttcattgtaacatgtgatcattattaccctggagggtctatctgattttaatttttttcccttcatacttggtctctctctatcgagtcagatttctttcattctaatattaggggaggggtggagatacgaagagaggggaaggattggttagtacaaggccagtcaaggtaaagatgattgcaataatcaccagaaatctctgcagaactacagaggcctcctgggactaattctgaagagctctgaccgaagtttgctttattttgcctgtaccaattctaccaagtagatgaattcagtccatggcttgcaggcttggaggtggaggtggagtggagagcataaattatatttctgcaggtgaaaccagagcatagtgagccgaaacccctttctacccaggtggcgtgaatgggtccaactgctactgtcccccaggacaagagagcaaggaggggcgggcaggatgggactaccttgagcctcccgcaggatgcctggcaactactttcttagtggtccttaaggtccaatcgcggttaaggcactaactaaactcattcttcagcctccttctctaagttctcctcgaatttgggtgcccagaagtaggctcacgatcctttttctgcgggagcacaatgtaggtcagatagcataaacgaatagctacttatgaacacaatagctactctgctattgcaaggtatccacaaccaccactacaaacattaacaccttgctttacttgggaaacaaaaaaaatcatggtcctattcagcagtttccccatacagggagcgtttgcccctcccccagtcaacagggctgttcatccctaggaagtgatttgagagttctccaaggatttaggcttttcactcctccaaagctttcacaacttctacctggcgggggtgcgtgggggggtgggggcgaagctaaaagttcctttgctgcaaagagcctggtataggcagaaacaccggcgcggcctgcagccccctaaccacagtgcgtccttccccttagaagtctggggaaagcaaatccctacgcccagccatcatttccactcttgcgttttcaaaagatcaaaaaacggaaaggaccggcaggttggcaaaccccaaagagggaccgcccatcaggtcggcgtccttgggatctcagcagccgacgaccccaattcaaatcgatcgtgggaaaccccagggaaagaaggctcacttgcagagggacaggattacagggtgcaggctgcagggaagtaccggggggagggggcctggtcggaaggactttccagccactcggcgctcatcaaaaagttccctgtccgtgaccctagtggctcatcgcagggagtttctccgatgaaccccagctcagggtttaggcttctttttccccctagcagaggacgaagccagttctctttttctggtctgactggcttggaaattccccgagcctgaccccgccccagagaaatccccagccagcgtttatagggcgccgcggcggcgctgcagagcccacagcagtccgtgccgccgtcccgcccgccagcgccccagcgaggaagcagcgcgcagcccgcggcccagcgcacccgcagcagcgcccgcagctcgtccgcgccatgttccaggcggccgagcgcccccaggagtgggccatggagggcccccgcgacgggctgaagaaggagcggctactggacgaccgccacgacagcgg

SEQ ID NO: 12200 - DNA, 2300 bp, Homo sapien
gagagctattggaactatcggatctggtagaaaatatctgacagcaattcttacaaagtactatgcccctggggaagagtcctttctctctctggaaaaggggttatcttaaagtattaaaattattacatcagattttccacaccacacaatatgtatggatcatgaggaggaaaggagaattgagaatttgagttagaagtcacatataagctgacatgtcagaaatgaccaatttgggaaactaagtttaccaacactgctaaaggactcaaatattttaaacagtggttcagatattgtgattatgcagtatcaggtttatttaattttgtatcatttcatgctatttaatgagacaatataatgagtgtttttcaaactgtgggtcctaatccatttgtaaattatgaaatcaatgtattttctatgactgctatttttaagaaacaaaatacaatacaatgaaaaatatgagaatgcactgcaaacatttcaatgtatgatttcataatttacaaatagattaggacccacagtattattttgtgagacttttgtttcagttacatgtgtgtatatactatagaacacatttattattgtgggatgtgattaaggaaaaaaatagtttgaagccattggtgtagtggaaagagtctgggctttggaattagccagaacaagtttgaatctgagctctgcttggcttttacccattatctaactaaatggctcaatcaccacattgaaaaaagagagaaataatatctcctttttggtttgtgtgtgtacatgttgtgtgcgtgtgtatgaagattagagattacttaagcagaatgcctataacatagtcaatgattaatatataattacttccaaatctttctcaaaataatgttctccctgtaaaaatacttcactgaagaaagacaatgtgttttattgatgactacatctgttatgctatcgtgtacttttaaaacacctctgtcagtctttttctccaatttggtttagtaaggagacttgtgcacatagtctttccccttcctgttctcacactttatttacctatattatggatcttggcactttatatctgtcatagatggtctaattgttgcctagttcaattactactaaacactttcaaacctcttctagttctcaaaatagtggtgggagcattgcagggtgccagatgaaaatctgttgagtttgctctacagcacaccttttgcaaagtatcacttgtggtgtacggggaagcagctgtaatgctgattccgccggcatttctcactcaatctactccatgctaaacaggccggttaggaattaagtcatactctgggtagtacaagtggaaagtgtgaacagagaaaccactttatgcgaggacagtggaaaatgagatcctcctttcctctccctactcctgctcctatcgagaagcacttaagagcgcagacgcccaggacccagccgcgctcgggcgtcccgactcggaggctggcggcgggcaggcacgctctcccgcgctgagagcccttctgcggagatgaactctcgagtgtcgccgccgcgcgcgggcccgatcgataccggcgggcggacgtgctcccgccgccgacagcagccacagggcggtgcagtcagctgtccggccgctcggtcgcacttctcatcagctcaatacccgcagaggacgtgcaccggttccctcccggacacccaccccgtggtctccgccgcaccttctgcccaccgccccttccgctcggccgtccggcgcagagcgggagcttttcagccagacgccctcgcgttgggggcagccgggtcccggcccgagcggagggcgtcgtgaggtggccttttcgcccggctccccagtgggacgctccgcggaggcagccaaggcggggagtgtcgagctccctcacactctggaccttaccttctggcgtcttcgcccgggaggctgcagggggaggcggacccagccggccacaggggcaggttcgcggcgctgtgaggcggggctgggcgtgcgccgccgccgccgccagattcgtctactccagtgaatcggcacgggagaaagccccgcccccggcgcccgctcccactcctgattggccgggccagcccggggaggcccggcgggaccccggcccgcgtctcagctataaagatagccccggcatgacagccgcggcgaagctcttctagttcatctgctggccggctctcagtccccgtggcgccccctttcctcttgtcccagagcgctc

SEQ ID NO: 12201 - DNA, 2300 bp, Homo sapien
taatacagaaacacaatcactctgtaattatgtctaaaattaagtagagacaagaatgttttaaacacacacacacacacacacacacacacaccccctaaacatcctaacatgaatgactaatgcttctttaccaaaaacaactctcctcctacctcttagatgaaacgcattaagataacagtcagctagttgtccctacttcctgacaccactcaatcccaaactggcttccacatcaacacccctcagaatcacagtctttagccctccttagaatggcggtctttaactagttggctttgacaaattattgtctgtctcctttctcctttacctcgttactgtctctgtgttcccttcttccttctccccctcccctcccttttcctcctccttcagattctgacattgggcatcttgcctttccaggcctcttaaactactatattctttgagttttctcttttgactgtttcctatgatttttttagttactcgtatgaatatgcttcttacctgttttcctctgtattgtacttgagggaaaaaaatatttcttgcatacaactgactgctagactgtaccacattgacctgaagaataccttagaaaaatataagtagatccagcaaatatttttgcttttaaaataaaatctcttttgcatacaggtactagctatactgacttgctgtttaaatttattctgattcccggagtttacttggaatgtcaccttttctgaaacatttttacattatctgtaaaagccagatttaaatgacatttaaggcatctacaaactgtctctgaatctggaatctattaatggagataagaaacttatcagttgaacagatttcattatgtttttgtttttgttttttgttttattttgttttgttgttgtgggagacatggtcttgctctgacacctgggctggagtacagtggccaccacactgggctaattttagtattactattattatttttatttatagagacatagtctccctatgttgcccagactggtctcaagcaatcctcccgcctcagcctcccaaagtgctgagatttcagatgtgttacagcacctggccgtctttggctttttaatgtgcattagtgatttcatgattgatttataatacttctgattcttcaaagtgatctatatataaaggccttggtttaaattatggacccattagcaaaaatttcagaaaggtcttccttataaacaaaacttcatcaaagaatggttttcctccttttttgccatcattactgtattatggaatctaaactggaaatattaacaatgtgataaaatccctatttgttgtctaatatttcattgtcatatgattccctaggaagcagcaatattcccattcatttatattttttatttccagtgaaaactcaaatgcagcatggattaatctctatagcagcccgcactgttattacacatctggtaaatcacctgggccattatccaatgagcggtggtcctgctatgctaacaagtcaggtgtgtgaaaatcacgacaatcattacagtgaaagtactgaactttctcctgaactctttgagagtccaaatatccagttctttgtgttaaataatacaaccttagtgtcctgtatccagatcagatcagaagagaatatgcctggaggaggtttatctgctggccttgcatcagccaattcaaatgtcagaatcatagtacgtgatctctctggaaaatattcatgggattctgctatactgtatggcccacctcctgtaagtggcttgtcagaacctacatctttcatgctttcattgtctcaccaagagaagccagaagagcctccgacatctaatgaatgcttagaagatataaccgtaaaagatggactttctctccagtttaaaagatttagagaaactgtaccaacttgggatacaataagagatgaagaagatgttcttgatgagctcttgcagtatttgggtgttactagtcctgaatgcttacagagaactggaatctcacttaatattcctgctccacaacctgtgtgcatttctgaaaaacaagaaaatgatgttattaatgctatccttaagcaacatacagaagaaaaagaatttgttgagaagcactttaatgacttaaacatgaaagctgtggaacaagatgaaccaatacctcaaaaacctcagtcagcattttattattgcagattgcttcttagtatattgggaatgaattcctgggacaaacggtaagcataaggg

SEQ ID NO: 12202 - DNA, 2300 bp, Homo sapien
atgctatgtgtaaacttatgtcatcgtctttataaacatgtatgttgctttattccctcttaagtagggaaaacataccatccagttaccacaatcaggtcattattttttttctttcctctttagccagtcatttgtgaatttttgttcattctaattcggtgtctcctgtgcttcctgcaacacctgacgtatttcattccttcattatttctttcttgagatattgctgttgccttctcctggtttgtgtggtcttgctcttaaagtcatcattcacatttacatggctcttaccatatcacatacccccacaaaaaaaaaaaatctctgattttcctttggctataaaataaagcccaaattctttagctgtgaattcagggccttcacaggagaacccaactggttttttaagaatcatgtacagattcctttgaaatgccatgttgttcaggcaactgagtctgcttgtcatcacttaaacatacccctggctttcttcctcctagctgaaatgctttgcttctcttctctagtgccctcatctttcagtgattggcttaaataccatctcctcaaaaaataaaaatcgctatctgctctccctaaccagaatttatcattcttatcttcctatctttataacatttttaggacagatgggaactaatatttattaaacacctactatgtaccagtcaccttttcatatgatatctcatttaattcttagaagttttttgagatagattattcccttccctgtccccaatctcccctccttatttaagatgagagaactgaggatttaataactacataagagtcataagccaagagaacaggactcagacccaggtctgtaagattccaaagttcatgcttttcccactcagtcatcttaccagactctattacagcactaaatgtagtaagtatcgcactagtgagtaaagcctttttctgtataaagtatatttagaggaatttttctacttactacattgaggcaataatttctaaaaaatgtaatagcatacaatacagctaaaataaaaatacaataaatatatacctatacatttttaacatgcacataaaaaattaaataagactaaatgatttccagggtaaatgataacactgtatatgaagattttgcctttttttaaataatgtctttttcatttactttgtattctgtactttatatttattcaaataatattcagtgtataatatatgttaatttaaaaagccacatttggctgggcacggtggctcatgcctgtaatcccagcactttgggaggctgaggtgggcggatcacctgaggttaggagttcgagaccagcctggccaacatgttgaaactccgtctctactaaaaatacaaaaattagctgggcgtggtggcccacacctgtaatcccagctactcaggaggctgaggcaagagaatcacttgaacccagagctgagattgctccactgcactccagcctgggtggctgagtgagactccatctcaaaaaaataaataaataaaaagtcacatttttaaaaaagccttatatgtgtgtgtgtatatatatatatatatataaacaaaaggcctggaaaggcaatagagtagatttcttcaggtgataggattacagtggttttttgttgttttgagacagggtctctgtcgcccaagctcccaaagtgggtttgagccaccgtgcccagcctatgatggtttttattagtctttttcttatctgtgtcttttaatttttctataatgaacatatattttctgtgtgtttgtacatagtgatttacccccttgaattgggaagaaatccatttatggttgacagaatatgtataattttggttctgtacatgaggattataaataattgatagttaactatacttgaaaagcttacctattaaacattactttgaaataacagtgttaatgtgtttagaataaatttgcagtagtaggttttgtatcacttcagcatttaacaatcaagttttaggatgtaccattaatttgacatatatagagcttttaaaaaaatttttttttgcttacagatcctaatagctaccatcacccatcttttaccaagtacagaggcttcatcttatgaaatggacaagagggtaatttaaattttgtttgatgattagtatgtggttatttagtaaaatatttgcatttcaaaactttaaaggtatgtatatttacatggtaaaaatttatccttgttcagaatctactataatgtgaaatg

SEQ ID NO: 12203 - DNA, 2300 bp, Homo sapien
ttttccattaatttgatgatataacctgaagttgctattagataaaagtgagagtatgtgcttataaatttgatgtttttatcaaacagatttctctatctgcatagatagaaatttctctatctgcagagtgagtagtagttacatagaatcactattgaatagctagttaacataatgcttacaataattccttattattatctcataataataagtgaggttttgaccttatcgggaaaaaataatgtatgttgacatttcttttattcatttctgtagatatttaagattgttaatttagcttggtttcttggggggttttatgttcagttcactgaaaaatggctgacactatatatttttttctatagaaattagtgaatttccatcagaatgttgtagtgtgatggcaggaggtactctgactggatggcatgctgatgttgctactgtaatgtggcgaagaatgctaggcattttgggagatgtaaattcaatcatggatcctgaaatacatgctcaagtttttgattacctctgtgaactttggcagaatctagctaaggtaaaaaagaaatagcggatataagtggagaagaaaataaaaatatttaaaaatagaagaagccttagaaaacatttgtgacaccctttttgactataaactggtaccctgcatggcaaagtcacttaattgtaattaaatagtaagtgtagaaactggatttgaaattcagtttaaggtaaactggaagagataacagttttcttaggtttgttgctttttatttgaaaattacagattagagataaccttggcatttcaactgataacctgacctccccttctccaccagttttaattcctccactgagaattcttacaccttggctttttaaggtaagcttaatatataaaatattagtttaaaacttctcatttactaaatcttaaactttttatagagattttggctattatatagacttctagagcacttagtttttaaccagtatccttaggaagtcattaggcattatatagagaagagaatgtgcatactaaaattactcgggatttattgcttttgattatttcataaaacaaaagtgaatatagagaggtatgtctgtattgtatttaactgaagtataaactttgagttgtatcacagaatatgctgtgtattaaaagttgtgaccgggtgaggtgactcacacctgtaatcgcagcactttgggaggctgagccgggtggatcacatgaggtcaggagtttgagaccagcctggccaacatggtgaaaccctgtctctactaaaaatacaaaaaattagctgggcatggtggtgggcacctgtaatcccagctactcgagaggctgaggcaggagaatcgcttgaacataggaggcggaggttgcagtgagctgagatggcgccattgcactccagcctgtgtgatgagagcgaaactccgtctcaaaaaaaaaattttaattcttttttgtttgttttttaaaagacagggcctcactcagtcacccagacttggagtgcagtggcatgatcacagctcactgcagccttgaactcctgggctcaagcaatcctcccacttcagccttccaagtagctgagactactacaggcgtgtgccaccgtgcctggctaattttttatttttttgtaaagacagagtttctctatgttgcccaggctggtctcaaactcctggcctcaagagacccttctgccttggtcttccaaagtgctgggattacaggcttaagccactgtgcccagccaaaagatttaattattttaagtattgatatgtttggtacattttcctaagtggaacagtttatggttatacctacattgtatcattttggatgatgataatttcactaatcctgaattttagttcattaaagaaattgggccaacatggaaataaatgagattatatacatcgtttgctatattcagttgcttaagttatttagcaaatagtatttctttttgaacattaaaactgatcttttaattttaggcaaccatgttgactgataaatataaacaaggtaaattacatgcatataaacttatttgtaatacaatgaaaagaagacaagatgtttctccaaatagagattttctaacacatttctacaatataatgcattgtggattacttcatattgaccaggtaactatatatatatgtatcatctaagaagtagtttatatcatattatctttgattcttgattctgtttaactcttgctttt

SEQ ID NO: 12204 - DNA, 2300 bp, Homo sapien
tgttaaatgcaatttcgggcctaggttttgttaataaaataaatcatgtttaattgcaataaagcatgtgttgaaaaggtgattctttttatatgcccttctgatcccaagtatggcagaaggatataaaggtcaccaagaataatttggaggttgccaaggacttatttaaaagtgttttcaagtccgaccgagaactctgacatttacaaatagataagatgtgaatatttaaaatcatattttcttttcaggattgattttaaagaagctacttcacacaggaaactccttaaaggtacaactatgtttactttccatgactttaaaaatactgagtagaacatacatcccacctgttaacacttttcctacctaagctttttcctaaagatctctgaattgtcttcagtttatttaattgaagtgagttcccttaaaatgtagcaagaggctgggtgcagtggctcacgcctgtaatctctgcactttgggaggctgaggtgggtggaccacttgaagccaggagtttgagaccagcctggccaacatagtgaaaccctgtctctactaaaaatacaaaaattagccgggcgtggtggcacgtgcctgtactcacagctacttgggcagctgaagcaggagaattgcttgaaccctggaggcagaggttgcagtgagctgagatcaagccgatgcactccagcctgggcgacagagtgagactgtatcttaaaaacaaaaacaaaaacaaaaaaaaaacgtagcaagagtttgtttgacaaaccattctaggttgactggggacattgaaaaaactgttgtactttgccactcaatggactcattcaccagcaatctttcctctttatggtccccagaaggaaaacattgtttagtcattcaacagattattcttcattccaccatagccactattagatgtagagggaagtaggggagatacacatatatatataaacatttttgtttctttttcattatgccattgtactgtagtaagagaagctgcccattccgaaaatatcttgctgtaggttaggtaaagtaacattattacaggtgcttttggcatcatggcttgggtataaaagtacaaaggaataagccttcctgtagcttttctcctgttatctggctgaaccatgaaagtaacagcagttgaatacctttgacagtggccatgaacaagctctggtaaggtaatttacaaagctatcagtgaggttaggttagtggaagactaagtgttttgcttgtcagagattgaattttcctctatttctcttttactgtttttatgctgagagaatgttcattaatcagttaaaatatttattgtcttctgtgtacagggtattgttttagatgctttaatagagtagaacaaagttggtatcttggagcttagaatcaaataataagtacatgagataattgcagagaggttttaaataatttttatttaaattaaatcattttatttttaataatttaattgtaacttaataattttaataatttcagaacttttcaggggcaagaacattgaattcgcagtgtgccaggatccccataaccattcctccttttaccaaactcattctcaccactaacagtcattgctctctctcgcttcttggtttagactagtggtgatgggaggtaggcaaggagggaagtagacaagaaggaaaagattttctaatttttataaatggaacttacagaataaaaattacctgatggctttaaatagagaacaagttcattctatacttgttaaaaatccatgcatttgtatttctaaataatgatttcaatagatgctgtctctcttctcctcaacttccccttccttccctaccctgcctctcgaaagtatcattctgttgtcatcatctagagaactttgtttttcaaaggaagaaaatatttccattataaataaaaatactgtctattttcattttattttagattaggcgggaaggtgttcgtcttttcttactatggttgcaagctcttcagaataactgtagcaaagaacagctctggatgttttcatgcttaatccctggattttcagcaccacagtctgaacatggacctcgaactttagataatctcattaatcctccactcaaccttcaagaaagtaagattcatgggatgttatccgtcagtaggtttaagctctctatgtagtctcttagtgtattttttcaaatgtctgtgcattcattaactgggtaatccaaggcaatgctttaaaacat

SEQ ID NO: 12205 - DNA, 2300 bp, Homo sapien
aggagaattgcttgagcccaggagtttgagaccagcctgggcaacaatgcaagaccctgtctctacagaaaatttaaaaaattagccaggtgttgtggcatgcacctgtggtcccagtgtttcaggaagctgagatgatgagattgcttgagcccaggagattgaggctgcctacagtcagccgtgttcatgcccctgcacactagcctgggcgacagtccaagaccgggttttagggaaaaaaaaaaaaaagccgagcgtgttagctcgcacctgtaatcccagcattttgggaggctgaggctggtggattaattgagcccaggagttcaagaccatcctaggcaacaaggcaaaaccccacctctacaaaaagcacaaaaattatgcagatgtggtggcagccgcctgtgatcccagctacttgagaggctgaggcaggaggattgcttgagcccaggaggtcgaggctgcagtgagctgtgatcatgtcagtgcactctagcctggacaacagagcaagaccctgtctccaaaaaaagaaaaaaaaagtctcttttagctatttttttttttttttgagatgtaattttgctcgtttcccaggccagagtgcaatggtaggatctcggctcactgcaacctccgtatcccgggttcaagcaattctcctgcctcagcctcctgagtagctgggattacaggcaggtgccaccactcccggctaattttgtattttaagtagacacggggcttctccgtgttggtaaggctggtctcgaactccagacctcaggtgatccgccctccttggcctctcaaagtgctgggattacaggcgtgagccactgcacccggcctcttctagctactttgagatacacaatatattgttaactattgtcaccctaccatgttatcaaatgacagaacttattccttctaactagctgtatgtttatatgcattaaccaacctttctttattcctcttcctctgtatgtgatggattctttatgcttttgtttgtctgaaaaagtctttactttggcatctttttttttttttttttgagacggagtctcgctctgtcaccaggctggagtgcagtggcatgatctgagctcactgcaacctccacctctcaggttcaagtgattctcctgcttcagccccctagtagctgggactacaggcacgcaccaccacgcccagctaattttttgtatttttagtagagatggggtttcaccattttggccaggatggttttgatctcttggccttgtgatctgcctgcctcggcctcccagagtgctgggattacaggcgtgagccactgcgcctggctttggcttcttttttaaagatactttcgggaggctgaggtgggcggatcacgaggtcaggagatcgagaccatcctggctaacacggtgaaaccctgtctctactaaagatacaaaaaattaacccggtgtggtggcacgcgcctgtagtcccagctactcaggtggctgaggcaggagaattgcttgaacccaggaggcagaggttgcagtgagccaagatccgagatcgtgccactgcactccagcctaggcaacagagcgagactccatctcaaaaaaaaaaggatacttttgttctgtttagaattctaggttgatggctttttttttcctttgttctttgaagattttactctactgtattcttgtttgtattgtttctgataagaagtctgttattatctgtatcttactttttatggaaaatgtcattttcttttctgggtgcttttaagacctcttcatcactggtgttgaggagtctgattatcatatgccttggttagttatttttcatatttcttggcttaagattaattgagcttcttggatttgtgggtttatagttttcatcaaacttggaaaaattttggtcattattttcccttctttctccccgccttacgtttagaactccatttactaccgtattagggaatattaatattagattagtaagaagtattattagtatattggaaggtctcatagtttactgatttttttcctctgcgtgtttcatcttggatagtttctattgctatgtcttcaagttcactaatcttttcttctgctacatgtaatctgccattctatctagtttattttttaatctcagaaactgtagtttttatctagttcatcttgggtcttgttttatatcatctatgtgtcttcttaactttttgaacatatggaatacagctaaaatgatatacttctctgcta

SEQ ID NO: 12206 - DNA, 2300 bp, Homo sapien
gggtgtgccatatgtaaattacattatactagtttgttttgcaatggtgttttcattttttctcaggtataccagccatataattatttttaacgatatgttacatttttattctctaaaattatgtcactcatttgccaaacatttactgagtacttgcgcaagagaaaggaagggacagtgacattcgttcttctattcgacacagatttattgagcctatcttgcaaagagcactttgcaagaagactgggatacaactttagacaatctatacagtctctgtcctcagggagtttacagtctcatgaaagagagaatctgtaaacagttacacaaattactgtatttaaattctatgaaggaaaggaatgttatgagatgtgtcattatagatgtaactttcaatacttttctcacctaattatcacaatcactgatgtagtttacaaatgaggaaaatcaggctgagactgaactacatgccaagggcccgagagcaagtaagtccttgcaagtgaaaaacagaatgtctaatttaggtctatgtaattctaaagatcatgcttgaaaacattgtattattgcctaaatttcacgaaactgtgagggacagaccttattttgattttattaataagaaaactgatgctgagaggaactagaactaaaatctcttgaacaatccccttatttttctattatgttataagcttcctcaaaacatgtatggcttgtaagtttgatgatacaaacaaaccctacatgtagaaactgaataaattttttgtactttaaaaaatataggattgttgttgaaacaaactaccattaagcaaagcactatattttaacataattttggcaaatgtcttacatctctcttctttgctgattttgttatttttctatgttaatcacatatttcattggacaagtctattgctatgggtgagaacatagaaggaaacagttcaaacaagcaaactcactctttatcaaattattttgtggaggaaatgttcctggccaggcgcagtggcctcacgcctgtaatcccagcagtttggtaggctgaggcgggcggatcacttgagtctaggagttttagaccagtttgggcaaaatggcgaaaccccgtctctacaaaaaacacaaaaattagctggatgtggtggcgcgcacctgtggtcccagctactcggtaggctgaggtgggagcatcacctgagcctgggagttcgaggcttcagtgagctgagatcacaccactgcacttctgcctgggacacagagaccctgtctggaaagaaaaggaaaaaggaaaaaaaaaaaaagggttccaataaaaatttcaatttatgtcattcagaatttcacggatttttttcagctattgcagattcttcagatgactccatcaatgtaataagaaccttgaattcttctttgcagaggaaaaactgacaatatattcatctttatgtggggtgcagatggggaaaagatttttaaaagcacaatagaaaaggaaagcaagattacttttatttaaaaaacctagatacctctgcttaagcctttctgttgtcaagttgtttgcagcaaaaaacagggatattgcaaatagaaaaaatatgaaagaaatcacatacatagtgcaggaaatattattagtaatagatttaggacagaataaattgcccaactgtaacttcgtttatctttctgctagaggatctggtggccacaacaacttatgcacattttcaaagataaatcatggacatatttaataaagattacttctctttgcttattactatcatttggcttacaatggagcacgcagtaactaccttccttgcctttcttgagattctcctttggctgcttacacaggaaaccaaggcggggagtgccacgggtgatctcatgctggcatgacgtcaagaactcttgacgtcagaaggcggttgccacggacaccgttcgccaccgacggcagagtcgtgaaaccccatcactaccacactcgtctccgtttcggcctctgcagggtgtaagctgctaaagaagcttcaaccttaagggggcctcagggagagagttgtgctcctgccgccgagagctccaccttcgtggctctgggtccggggccccggcctgtggcggcgagcggcggccgctggagacgagcggcggcggcaggcggccagcccgggtctgcctcgctccgtgcagggccgggagagggatccgccatattggagctggggccgaaggtgccttggagccgc

SEQ ID NO: 12207 - DNA, 2300 bp, Homo sapien
gaagttttcttagtacagaacaaaatgacaagtctcccatgtctacttctttctacacagacacggcaaccatccgatttctcaatcttttccccacctttcccgcctttctattccacaaagccgccattgtcatcctggcccgttctcaatgagctgttgggcacacctcccagacggggtggtggccgggcagaggggctcctcacttcccagtaggggcggccgggcagaggcgcccctcacctcccgggcggggcggctggccgggcagggggctgacccccaacctccctcccagaaggggcggctggccgggcggggcgctgacccccccacctccctcccggaaggggcggctggccgggcggggcgctgacccccccacctccctcccgtccgggaggctggcctggcgggggctgacccccacctccctcccggacggggtggctgccgggcggagacgctcttcacttcccagacggggtggctgccggacggaggggctcctcacttctcagacggggcggctgccgggcggaggggctcctcacttctcagacggggcggttgccgggcagagggtctcctcacttctcagacggggtggccgggcagagacgctcctcacctcccagacggggtcgcggctgggcagaggcgctcctcacatcccagacggggcggcggggcagaggtgctccccacatcccagacgatgggctgccaggcagagacgctcctcacttcctagatgggatggcggccgggcagagacgctcctcactttccagactgggcagccaggtagaggggctcctcacatcccagacgatgggcggccaggcagagacgctcctcacttcccagacggggtggcggccgggcagaggctgcaatctcggctctttgggaggccaaggcaggcggctgggaggtggttgtagcgagccgagatcacgccactgcactccagcctgggcaccattgagcactgagtgaacgagactccgtctgcaatcccggcacctcgggaggtcggggctggcggatcattcgcggttaggagctggagaccagcccggccaacacagcgaaaccgtctccaccaaaaaaatacgaaaaccagtcaggcgtggcggcacgcgcctgcaatcgcaggcactcggcaggctgaggcaggagaatcaggcagggaggttgcagtgagccgagatggcagcagtacagtccagcttcggctcggcatcagtgggagaccgtggaaagagagggagagggagaccgtggagagggcgagggcgagggcgagggcgagggagagggagagggagctatgtaccctttttttgagaaagtacatctggttaagtatgtatttttcattgaaaactaaagttaaatcaggactgatggcattttccgactgcatttggtaaaaaataaatgccaaaaatattagattgaaaatgccaagataaaacttccttaccttctgtattgtaaaagtttcaagaataatttaaagatttttgcacaacacagaaagtgcaagttatcgtctatagttaataattaaataaaacagtttattaatggtaggtaataaaggtgcttagtaaaacagatggttctccagttccccaggctcaatgagcaggcaaagatccttttaggcaaaagacattttcacatctaacagtaacatctctgatggtcaggcaggtcaaacaatcacttggcgggaaatagataaatacagactaaattcgcacaatctgtttctgtttagtttataaactgcgatccagagtgtcagctttcgtgccttgtgggacttgaagtccagaaggaagaagtgatcagggctgccgagggatggaagcgtgcagcccctgcaggtctgagacctacgaactacaactcccggcaagcatcggaaggccgcgtcgtaattgcgggcaaccaatcgtaccagagcagggcaagcccccgccctctggctcggtggaaggcctccgccaatggcagagctcccatcgcagagcctgcgggttaggttgtgaggcccgggccgggggcggggaggagccaagggggcgagcaagctcggtggctgggtgggttggggcgttccgcgcgcccttcattgaagcggcggtggccgggctgggcgccggtagtggaaagcgacggcgcggctggaaaatgccagtccattcccgaggggataagaaggagaccaaccatcacgatgagatggaggtggactacgccgaaaatgaggggagcagctc

SEQ ID NO: 12208 - DNA, 2300 bp, Homo sapien
acttacaaattattctccccttcccatatcgggcaggttccaatgtcacatttccatttgtcagttgggcaatcttaagcatactgccatcactccaaaagcaacacgtcggccaggcacggtggctcacacctataatcctaacacttggggaggccgaggcaggcagatcacctgaggtcaggagttcaagaccatcctggccaacatggtgaaacacaaaaattatctgagcgtggcggcgcatgcctgtaatcccagctactcgggaggctgaggcaggagaattgcttgtaccctggaggtggaggttgcagtgagccaagatgatgccattgcactccagcctgggtgccaagagcaaaactccttctcaaaaaaaaaaaaaaaaaaaggctgggaatggtagctcatgcctgtaatcccagcacattgggaggttgaagtgggtggatcacgaggtcaggagttcgagaccagcctggacaacatggagaaaccctgtctctactaaaaatacaaaaaattagcttggtgtggtggcacccgcctataatcacagctactcgggaggctaaggcaggagaattgcttgaacccaggaggcggaggttgcagtgagccaagatcacgccattacactccagcctgggcaacagagcgagactccatctcaaagagagaaaagaaaaaaaaaagcaacatgtctgaaatactcttttctttcaccttcatctcaaatctttcacttttctatttctgttgatgctaccgccactctccttgtatcttggtttttctcttaccttcaatcctaaacttgcattcatcaatcctgttttgtgctttctttgaaatcactcacatctatactttcctgttcttttccgagctcaactccttctcccaaggttttcacgctcttttgaataagccccaaactctggcccttgtactttttcttacatccctctccctgcagggatacccaccaccccaaaccaaattctactcattcttcaagataattaaggtaatcccaccttcttcagctaggctttgtgaccacccaatattgaaacgatttcctctgcctctgaattcctacagcaacatttagttaagcattcatttggcaatttaatcaagtggtgacttatgatagctttttaagtgagcccagataataactatttatccctcatattgagtactgtccagtgctgcacaaagaagtcactcataaatatttttggatggctgatttactgattgaaattatatccttccatggagatttgctttgcaagggaaacatgaaaagagggcatctgggtgatactaggctgtcatcaacctatcatcaatgcttcctttacatgaccaaaatcaggccaagacaaagaagtcagtctcatctccatcatttgaatcgaaagaaaataatcccggtaatcacaaattccatttcactttagaataaccattcctaaaagtttgcaaaatttatttgtagtgttaatctgccctcctcccccacccaaaataatttaaaacagcccaaagttagaaaaaactgaagggaagaaaagacttggagaattttcaacgctgccaaaactcagccaatttataagcatatgaagatccaaaatgagcccgaatgttggtcccttcctctcagtcttgcaaacttcagggagctactgaacgggaccgctctcaagttagcccccgaaaagacactgatgtaaaagtgctgaccggcaagttgacttgcaaactgaggttaattactaagccgaccctctgtcccggcaactcacttgcgctgagaagtgagggttgcaaaggtgaaaatagggaaagaggtcggtgggctggggagaggaggcatttccagtttgtctgctgcgggaagttgtccgcctgggctggtcgctccagagcaccaccgggggcaggaccacgccgcgtttgggagctggacaagcccaggcccgccccgccccgccgccgggacccatcaggagccagacagcgcccagcgaccggtcagggtgcagcccagggcccagagccagtctccgccccttccctctgtccccgccccgctttcccagcaggacgcagccgcctggcgtgcggagagcggcctgtcgcgcgctgggcgcggggactcagggtcccagcagtgggtcgcgcacctgagctatctccatcctcggagaccgacgagctctcagtgtcctcgtcctcggagctgctcccctcattttcggcgtagtccacctccatct

SEQ ID NO: 12209 - DNA, 2300 bp, Homo sapien
ctcataaaattctatttgttaaaattctccccctataatttttatgttgactcttgtgatttttaacttttaaaaattccatcccaaaaaataatgaacaacttaatttttgaagaatgtgataataatttgaactacaagtcaaaattttaagtgcaaagaaattgtttaaataaattttgcagtttgcttctgttaaagcatctctgttctaccatatgtctttcatgttaaactttcacagtgttttcttctcaaatgttggtgctgagcaaattctaaggctacggaaaagcctctactatccagagaacttggatagtgagtcatcttgagggaccaagttttgagtagccaagaagtaagcaatcaaaagccagaagtatttttaatctgttttagaaaatgagaaaaaaatgagtcagccttccatgttatataaaaataattgaacatgatttaactctttctcatagtttgacttttatttgatgaagatcaagatgcagatcattttgtgcttcagttattttgatgaatgaatatatgtgatatgaacatagaaaatgtggactataggacagacctggtaattaacagttgctttccttaaaaagtttgtattttcctcctcatttgcctctttctcactgatagtaatatgggtagacggaataagggaacgtaggaatggcagaccaggagagcctgtggtaaacataataagattagttttcctttttctttttctttttttttcctttttttgagatggagtttcgctcttgttgcccaggctagagtgcaatggcacgatcttggctcaccacaacctccacctcctgggttcaagcgattctcctgcctcaacctcccaggtagctgggattacaggcatgtgccaccacgcccagctaattttgtatttttagtagagatgggttttctccatgttggtcaggctggtctcgaactcctgacctcaggtgatccgcctgcctcagcctcccaaagtgctgggattacaggagtgagccaccatgcctggcctttctttcactttttatttttgagacaggatctctgttgcccaggctggcgcaatcttggctcactgcaacctctgcctatcaagttcaaacgatcctcccacttcggtctctcgagcagttgggactacaggcatccaccactatgtctggctaatttttgtatttttattagagatggggtttcaccatgttgcccaggctggtcttgaacgcttgagctcgagcaatcctccagcctcagcctcccaaagtgctgggattacaggcatgagccaccacacccggccacttttctttttttatgtgacaggcaaatcagccatgtgagcagttctgaaagaagaatcccaaaaatgtttttgagcaatgttagcctttaaaggacacagtcattttggtgctacattctggtgagttggtggaaaacaaaccaaatgtgggctaattactttatagttatagcttatagtcagtcctttaaagtgatttaaaaatgaataaaagtaagagggtctagagaccagtatagttttatatactcatctgtattttagattaaatctatagtggattttttttttttttttttttagactaggtcactctgtcacccagggtggagtgcagtgtcacaatcatggcttactgcagcctccaactcctgggctcaggcgatcctcctgcctcagcctcctggtaggtgagactacaggctcatggtaccgtgcccagctaatatttttatattttgtagagatggggtcttcctctgttgcccaggctgatcttgaagtcctgggctcaatctgtcctcctgacttggccttccaaactgctggaattagaggcatgagccactacgcccagcagaaattattatttttgataaatcttgtttattttcttttaaggcttaatataggtcttctcttcatattacagtttttcttcctatttgaattacgttcagatatatttgagatgttcagataaatttgaaaattaagtttatcttttatatttgcctttttattaacagaaatggatgatgaagactgtgaaagaagaagaatggaatgtttggatgaaatgtccaatcttgaaaaacagtttaccgatctcaaagatcagtaagtagtgactttagaaggccattgtcactgaatctcaaccttgtcacttgtatactagcacaagagcaactagattcagtctcagctgttttgtattttatgcgacagaccaatt

SEQ ID NO: 12210 - DNA, 2300 bp, Homo sapien
gtaaaaaattatttttaacattcagttttatgtttcctactgaggagatctaataatacaacgatacttagggatgacacaggatgaagttaggcatgttacaacatacattctaaatatcctttaaagtggttgcaaaagaaaatactgatttctctgggggcaattttataagtatggaactctaattttcactcttaacacttctcaaaatatagagtattatgaaaacagtttgtatttaattgatgaaacaatcatatttttgacacttgtataggaggtcccttcactgtgtcatggtaaagtaaccaaatatttactgtgaacatttttgacaggtgacataagtaaattgtaatcacttctttacttgtacagtacttgaatgtttaaaattttctaatgagtttgaaaaattcagtatgcaaaatatttcaaaagaaatgtttaaatcattgctcagtattttttaaaaatattccatcttctgttaacaggtgagaataaacttttttcatcttgacattataaaataaataaacttaagttccaacgtcgccataaaaagttctctaacttttaaaccatttaaacgtcttgggtcttaagaatggaatgttaataacaaaacaccccaagtctttaaaaaatgtttttggtaagtacttggcaaacaactgaatttaaaagttatatctttaagcagactccattaataactgcgtcatttcataaaaccgtttaacttacagtaatgttctttgtaagacacaacatactacgatttttaaaaatagtaacttcttaaaagactgattctccatctactcaaggctttaaaaataattttcacaaatcagacaaatgttctattttcataggaatttaccattatctttgacacaaatgcctgctttgtccacttgcgctagtaccagccccaaaacaaacttttacggctagaaaatggtctatgtaagatagaaaatatttccttttaaaaggcaggtaaacaagcatacttttaaattgtttctcatttaaaacttgaattttacaccatgaaacgaaacagtgacttgatcgaagaagcccatttcaatttaaaaccaattttactatgacatttctgcaaaagcgatttatcagccagttaaactagttaatagttaaataacgacagttctaacgccaacagcattttacgctagaagtattttaaatgaattccttttacttttctccccatttgaaaggattatagatgcgcaaaacagcccgaaggaaaaaagaaataaacaaaaccaagtaactcataagaacaaattactccctcccccaccaaaaaaagctaataagcgcgcgcttttctataaatctcaggcctactgaccaaccaattcccataaagagtaagttggaggaaaaaggaccctgaacgctaagcgcctcctaaactcgcagtgaagcttttccacattcattctctccaagcctgcctctctcggagccgggttttcacttaggccaacctcacccactcttggggaggacagctgcaaggtaaacgactctgcaaccggtaccgccgtcctcctcactccgaccgaggaggctgggcccgggctccttccacacctcggcttcgggaccgcatcccacacctctgcaggcctagctgcccccggcctctgctagagaaaaagaatggcgaggagggaccggatggtttccatattcccagtccctcaggccacctctcacctgtccaaccagggtgtgtagggagcgaaagatttcgtagagcacctctcgggagaggttgggtctgcatcttcgctccaggttcctgtcaccgctgctcgggcgattaagctccgtggcagcagccatgatatcttctcaggccgccccaccaccaccaccaccaagatttgctcacaaccccgccccctcccttccagctttagtcgcttggcgatgacgtaagacacggagtctggtttagatcgggctttgaggccccaccctctctatgtgaatgacaagcacgttacaccaatcagttgcagctgtgacattgcgccgaggctctgaagtgggtaattgcagaccacagctaggctggaatgctgtgtttggggtggtcattagagtcgtggtctctttagcgttatgaagcctaccttgactcctaggtgttcattgtgaatcttggtaagaggagacatagttaaattttgtagtttgagtccaaaaagtaaaagttgacattttaacatggcggtgtggagtgg

SEQ ID NO: 12211 - DNA, 2300 bp, Homo sapien
aggcatcaagaagagtaagaaaggtccttagaaagaagaaagaatgcacaaaagagttaacaaattttaagtactactggttgagtatcccttatctgaactacttgggaccagaagtgtctcagatttcggattttttttagattttggaatatttgcatatatataataagctatcttggggatgggacccaaatctaaacacaaaattcatttatgtttcatgtatactttatacacataacttgaaggtaattttatataatgttttaaataattctgtgcatgaaacaaagttttgactacattttaactgtgacctgttatgtcggatcaggtgtgaaattttccacttgtggtactggcactcaaaaagtttcaaattttggatcattttggattttgaattttcagattaggaatgctcaacctgtacctaagtaaagaatactaagatacaagtgcaggtctggatatcaaatcacagaattacatggagaagcaatacacagatcaaatggccatcagttaattctgtattagaggctcaaaagaacaagtaaaacttgaaaattcaaaatcaatgatggcaaagaaaggaatagcagcaccttgttaaagacaacattttttaaatatacaaagcatattcccaaatgtgttgcatatcagtgttctccatatttgaaaaaatatgaaacacctcaatgaaaacaaatgatctgaaactgattgctaatttggtacaaaacaaaaacttacagttaccccattaccatgcttgaataagaaggttgctcaatttgagactggacattgtgaagtatttttctgcctgtagaaataggctggaatgtcagttgtatatcttgctgccaacaagggaacagaaaagatttcccaagattctgtcaagcctggtgatcccatttgtctttggaaatgaaagcctaattaagagactccctagggacaggtcaaaggagtttttatccccatcgtccttatcttagttccttgatgcattagtccttccctttaatttagtctaccctaaaactaaagaatacacattgtgcaagtttccacctttgctttctctactgtaaatgcattagactattaacagaattacgagttttaaatcccaccttccttatctctaagctgatgttgatttcttaaagtgtttttgaataaagcttaacactaaaaattattgtaatactttaattggataacactttttaaaaatatcggagtctgactaaaagattacaaaaccccacaaacatcgttataataaagctattatgataaataatactttgtaaaatttgaattcggttttatgtcctaatttcaaagattgtggttgcatgatattatttatccaggttaaattcctgttggaattatattgacagtgtttcatttctttgaaacaattttagggttaagcgtctctacagttaaaacagagaatatcaactgtagtcccagttactcaggaggctgaggcaggagaaccgcttgaacctgggaggcggaggttgcagtgagccgaggtagtgccactgcactccagtctgggcgacagagtgagactctgtctccaaaacaacaacaacaaacttgaagagatgaaaatgttctatccaatcatgataattccgtgtgagttttccaatgtttagaaacacgtgtgggcaccactccatccctgaccagcaagcttcctccagacccactccacaccgccatgttaaaatgtcaacttttactttttggactcaaactacaaaatttaactatgtctcctcttaccaagattcacaatgaacacctaggagtcaaggtaggcttcataacgctaaagagaccacgactctaatgaccaccccaaacacagcattccagcctagctgtggtctgcaattacccacttcagagcctcggcgcaatgtcacagctgcaactgattggtgtaacgtgcttgtcattcacatagagagggtggggcctcaaagcccgatctaaaccagactccgtgtcttacgtcatcgccaagcgactaaagctggaagggagggggcggggttgtgagcaaatcttggtggtggtggtggtggggcggcctgagaagatatcatggctgctgccacggagcttaatcgcccgagcagcggtgacaggaacctggagcgaagatgcagacccaacctctcccgagaggtgctctacgaaatctttcgctccctacacaccctggttggacaggtgagaggtggcctgaggga

SEQ ID NO: 12212 - DNA, 2300 bp, Homo sapien
acaccactacgctccagcctggatgacagagtgaaaccctgtctctaaaaaagtttaaattaaattaaaattttaaaaataaaaataaaaacaaaagaagtgcagtcaatttacagaaaagaggaaaactacatcaagtaatgcttattttatttttattattttaataagatttagatagtttcttttaatttaaatacatatatttattataaatttttatttatatttttatgaactgaaattttattgtatttaaaatacattaagtaatgatcattttattcataacaggagaaatacaaattaaaacaacagtgaaagttcacttttgactgatcaaattgacaaagatcagaaaatttgatagtacattgtaggtgagtataaagtagcacaacttttttggagagcaattttataatatctgtgaaaagttaaaaagcacattcctattaactcataaattccatttctgggaattagctttcatatatacttacacatgaattcaaagcaaaacatatatggatattcgatacagttggttgtaacagtaaaagatctgcaacattctaagtgtctgttaggagggaactggttaaatagattatagcgcatctgtagaatggaatactaagaagcagtttttaaaaatgaagcagctctataatagcagtatgagctgatctctaatacattgaaaatgaaaaaagcaagaagtataacggcatattagtacatggtcatttgtgtaaaaacatatacatgtatatgtttgcatatgcacagaatatgatgtatccctagaaggatatacaaaaagtatagcagtagttgccttaggaaaggggaaatgagatatggaaagatataggcatgggagggagtcttacctttcactccatatgcttctgttcttttaaattttttttacatggttatatattagctatttgtaaatgtattttttacatttaagtacttagaatagtgttggtatgtatcaaatactcaataaatgttatctactcttgttattattattccactgttactccaaccaccatttctggccttatctttcactacatcactgcaaaacctttttacgaccattaaagtgaataataaccagtccccaaatattccatatggtttgctatttccatgcttatattcatgtgcttacttctacttggaaggccatttttccatctttacctgttgaaattctacttattcttcagggtccaattcaaataacacctcctcctgaattatatactagccctataaccttgaaatatttatgtaattgtgtctcagttttcttatctgttaaatgagatataatagaaactgtaaagattaagtgtgataaggtgagtaaacctactcatgcatttattcaacatctatttcttggctgggcatggtggctcatgcctgtattcccagcactttgggaaactgaggcaggaagatcacttgagtccaggagttcgagaccagcctgggcagcatcttgagaccttgtctctacaaaaagtataaaaattagccaggcagtattcaggaggctgaggtgggaagatcacttgagcctgggatgttgaggctgcagtgagccttgatcacaccactgcactccaacctgggcaagagagtgagaccctgtctcaaaagaaaacatacacacatgcacacccccatatatttcttgaccaactattttatatagggattacagtattcactagggctagaaccacagaaaagttgacagtatctctgtcctcatgaagctcacagtctagaaaggaaatttgaatacagttgataaatgctatggcagctgtaagcatagggtatggaaatacagaggaggggcatctaaccaaaaaaaaaaaaaaaaaaaaaaaaaagcaaacccatgggagaaatagttgggttggaaagaaagtcagaaacaaaatcagatttgttttgcttcagaactttgagtgatcttaaagaatttatttacaagcaggaagcagcagaaaatttagaaagattagtcttgatacctctcagggtcattggtctctgtgcttctgataatctaaggaaattcaccgaaaacctccagtagccacctgctctttgccctgacagttctcaaggaagtggtcctcctgctgccccaagcctgtcagcctccatgaaaccaagccttccacactataatacagaaaagtaaagtctttgctttccgggctaccttgtagcaatttgaggctctgtcatcagtttct

SEQ ID NO: 12213 - DNA, 2300 bp, Homo sapien
agaggcaggtagggggtagactgtacaggggtttagtggccaagtgtatttgggggtgaaggaaagaaggaagaccagctttggtgatggtgtcatttgctgaaatagagaacatggaacaagagtagctttggaaagaagatgaggtaaacttagaatatattgaatttgaggtctaatgaagctgtgggatgtccattaagtagctagacatgtaactctaaaactggatctcagaggttaaagtggccaaaaagtcatataatgtaaggaatggaaagtatccaatgagttttatcaatgaggaggctcctggtaacattggtgaaggcagctttagaaagcaggtaggcacatgagcccaatggtaatgggttgaggagcctgtgggcatgaggaaatgaccatgggtacttaatcatttagagaatttgggctttgaaggggaggacagagtagggtaatttccagagtagctgaaagagaagtaggggatgaagaacatatttaagcattactaagatgagtcagtagaaaggtaaagactgcaaatgtaagggaggaaataatgagggggttaaatgcagaaacccacacttagtatagaacgctgttgtgaggggataagtgagtaagcccatgtaaagcattatgctctgccaggcacggtggcccacgtctgtaatcccaacactttgggaggccgaggtgggaggattgcttgtgctcaggagttcaagaccagcctgggcaacatggcaaaaccctgtctctgcaaaaaatactaaaattagctggcacggtggttcacgcctgtagtcacagctacttggaaggctgagacatgggaatcacttgagcccaggaggttgaggctgcagtgagtggtgactgtgccattgttagttcctttcattctctatgcactgcccatcccgtattttgtttcatctgtgccctgatataattactttggcctgtgcctttttggctgcatacctgtggttttagatagttactcatgtaattctggatgggcatctaggtttagaaactagcagactggtttaatggcttgcctatcccctcttcccatatatggcctcagcaaatcccatttctcaaatgtgtactcacagtttcactgtcatgtttagctgctcagcagaggtgatgggctcctaaccacacctgagtcatctcatgtactcattcagacttcaaagtatcttagctttccattctttcaactaagccaagatgggaggtttctgttcattgtggaaagaggctcttttctccttgtagccttactccaatgtttatctttaattattaacaagaattattaaatgcttatttcattgcttgcacagagtattcaaaaaactgaattttcctttccttagttctgcttgacacatttcatttcctcattgctcacctcttagccatttttctgccatacaggccctcctcctcatgccctcttttttttttttagcatttcgatacgtttctttccaattatttctatactttggaaaaatataattgaaaaaaatactgcatgtttttttttcacttgctattttaacataattattttcctgttaaaattattaactataattttgataactgctagatattttatcttacagctgtactaagcttcatctggccattttcctataattaagcatctaggtgctcatgtgtttacacatatatctttgttcacattgtttattatttccctacctaaggtttctagaagtgggattacaatggtaagcattttaagaggaatacaaaagctagtttcacattaagaactagaagtgacactgctgttttctcaccagcagaatactaacttttcaagtcccattcatattacgacaaaaaagaatggcttcacaaatctcattcattttataagtagcatcatcttcatcttaaaaatataagtcatctaattgtttacagtgttacacactgttcaaagaaccacatagctctgattccttccttccaaaaatttacattccaaggaagatatactgatgtgaagactcaccaaatgcagacaagaactattaaaagtaccccatggatggacctccaaatgagtttagggtaattgcgcttaaaatattaggaccaaagtacatttattttatagatggaggaggggaggagacgagtggggaccagcttgacatccagtcttcacctggacatatggaaagaacaaatgtgcgatctgctcgttccctctgaaggtctctgttacg

SEQ ID NO: 12214 - DNA, 2300 bp, Homo sapien
cacagaattcgatgggaggctgttttcgaaagtaaggaagtcattcaggggttttgtttctgtcctaaaacagggacccctctaggggaccagcagcagacgccttcagcccctgctgcttttggctcctttggcctccaacggggtaacactgggtgacaggcctgaggacatcccaggaaggactttgggagctgagatttcactctttgttgtactgggttttatctctgggatcctaaatttttgtagtaatgaatctttctcctgtttacagttcttcacctcccagccactacctcccacgccaagcaaaaaaaataaataaataataaatcatttttgattcctttcttccaacctctaatttcctggtttcctcagcgctcagtgtttgtgttgggagacccattagggatgagagagaggggagaaggaatggttttgaacacagaaaaattgtagtcccctggatgggctgtagcccttccgggtcacccttgccaaatctccggtcgaaaggcagctgagccagctgcgggcagacgcccctcccagcactttcctctaggcctggaagtattggattatgggcaattgattcttatttggcatgtactcacttctcgcccaggttttcaactttctttttcttcctctcttcccctctctcatttcgttattcgtctgcatctcttcccaatccctctctcccgctcccccaccaagagcttgtgaggaaagcagactggccggagtcctcgctccgggcccagcagtcctctttgttaacttcctggagcctcctctggcgtggtgccttaagactgtgggctaggccgggctttctccctcagaaacctgggcctcactgctgagacacagtttccaacagccagagggactcgaagattcccaagaggatggttgggtctagtgagagtgcttgttggaaggcggggaagggagattttaacaggtctcacgttttggaaaacaaacaaatttgaccacttgcgttggaatggtcagctgtggttccgggaccgggagtgtaggtggctaaggcacccagctcaggccggccgggcaggggacatggatactgcagctgctgtttggctctaggtccggatcccacggaattggagcttcgcttaacctgccccagcctagcccaagcccgggcggggacctggctggcggtgcccggctgtggttctggcggctgccccgcaccccattctagctgggaggaagcctttgggagtcacaattttagtaggctgtggcaccctcggccttatcatctttgcattggatggagtttccatcaaatacattcttctcctcgccgtctacagtcggcatagtttgaagtctgtttacttgtcccggggaaaggtgaactcaatcgggtttgcggaccgagacaaacaggacctcagcctctttcttgccatcaattacgctggctccatccgctcccgctcccggctgggggaattgtcgcagctgcgggaagagacctagaacgcaatctgaagcgtttcattagggaaataggtgcgcgctgggagcagtgcaagagggttccgcaacctggggacaccctccgcccctacagcaccgtcggcttctggaaagccgacagtcctcctttctgggaatctcctgcatcaactcgtgcccaatttctggcctcccctctcggagaaatcagcattctgaggatgcccctggcgctgaggtgcttggaagcttccgaggtttgggagcaagtacggttcaccccgagatcaccgcgaagctttgcctccgccaaagtaccctacccatccctaggccccaacggctgagaggagtgggggagattttgcacactgcaccccccttcctcctctccccacccccacttcgccatgtaaacactaggactttctcgagagccttggagagccgctctagtggcttcgggccctgaaaccccaggctgggcttttttgatgtttagcatcccaaagctgctccccaccctggccccagcctgggaactgggagctgtgggcaggagaggaaggaaagcagctctctcagctagcgagggggtcagggactgggccaagctcagaagcggggagaagagcgagacagagatgctctgagcaggggagacagggatcccgggctgctgccgctaccaacaagggtacacactgcggtcctcaaggccaggaggggggtgggggcagggaatgcctcagccaacagggcagcggctcggccctgctgctggcccg

SEQ ID NO: 12215 - DNA, 2300 bp, Homo sapien
tgtggcgggcaggagggaagcggtgaggcagagcgctgggctagggccggcccggcgtcctctcaccaggtccgaccgtatagcaaggtggagcaggacatggtgccgtagtccgagcccgaggagttcaggtgggacaggctggatacctggccctgcagcgccgcggggctggcggcgtggtgcgccaggtccggagactggcctgcgctgcctggctggtggcccgggtgtgcgccaaggccggcgccaccgctgcccacggagatggccgctgccgccgcctgcgcggcctgcgcctggtgctgcgcctgctgctgcgcgtggccttgtaggctggcggcgcccggcgcgggggcacccgcctggcacggtttgccgtctttcaccaggaccggcaccgccacgcgtcgcggcgactgctgctgagcctgttgctgctgcgggcacccggtgcccccgccgcccccgccgccgccgctgtcctgctgcagttgctgctgcgccgccttgtccttggcctggcgcttcattttgtagcggtggttctggaaccagatcttgacctgcgtgggcgtcaggtggatcatgctggccaggtgctcgcgctccggcgccgacaggtacttctgttgcttgaagcgtcgctccagctcgtacacctgcgcctgcgagaagagcacccggcgcttcctgcgcggcgcgcttggcagcggggccatgttcttgctcacgtcccccagcgagcccaggccgcccatgccgctcatgttcatgccgctcgccgggcccatgaagcgggagactgtaagcgacaaacgcacagcgtcggccggggccaggccgagccaggccacccctgttttccgcgccattggcccgcccggcccgccccaaccgacggcgccctcctgacccaggcagcctagcgctggggcccaagaggcccatccgcggggaactgccagcgcctgccccaggccgtaccgtcgagggggctgtactggagcgctcacagccccaaccctggctgccctccctcagtctcagttccctctttcgaaccaaaagacgcagtgggggaaaggccgcttctgctcctttcgtgcccagcccgggtcagagcattaggattagctggccacaggcggcgaactgggctcaggccgggagctggggtcctacggtagaccccagtttggagaggttaggagagggggtgttgacttccaaaagctggagcccccagacgctttgcctcttggcttctctcctgtcaggccccagtgagggcacctgctcggacccttagagtcccctctggaactgcgagtcctcccacctgcccagactccgctggagagagggccgggccgggcgctcgagtgcctcccaacagggcagcctccctcctggcccggtctagcctctccgcgctctgctcgcccctgctccttgagctcggggtcgcttcccttggctccccgaggtcttctgcgccgagcagagctgccagtccaccgcgcctaggagacgccgagtacccgcatctgaccgcaggaccccagcgctaccaagtgcctgttcttggacccccagccgagcagggggaagcatccccagctcccgcacccaagtccctggcgccgctgccgggccgccctccctgatgcccagcgcgcagcctgccggcgccgcgccttctggacggctctcgccgcacctcctgagctcagcccgcggccccgcagtggggcggcctcacttactggcggggaagcgcgggtctgggttggcgccgtaccatccggggccagaggcgctgttcctcatggtgtcctggtacggcggcagctcgctcatgttgcccaggttgccgttgcagtagccccccacggcggagtgcgagagctggggcacccccgccgccgtcatgtggtaggcggcggtgacggcgccgtggtgccccacggcgtgctgctgcatggccgctgttggcggtgccgcctggccctgcctgtacgccgccagcggagccccgaggccgccgccctccatgcccactttcttgtagctttcctccaggggactcaagatgtcagacactgagaacggagtcgtgtgctttggactcatcgacatgattcggcggcggctggaggaggaaggaagaggaggaaaaaaaagggagagggggaaggcgaagcctcgctgctttttttttctccctttgccaaatattctggtgttaccttaacgccgatcttgttggatgtacacgtaacggagtggaccgagtc

SEQ ID NO: 12216 - DNA, 2300 bp, Homo sapien
caaggagccgggcttcgctctggtctttcgcaacaccagcggcgagcgcgtctccctgcgcaaacgtagggtggcctccccagctctgccgtggggaccgcacaaaaacgcgggcgcaggtgggagggcggagggtgtcctgagctttctttaccctggtaaagaaggtaggcggtgagaaaagcgaatgttattatagaagttggctttgtattgagggagtaagagctctcttcaaggagagggctgaaatctttaaaaataaataaaactttctctactgtaattgctattaataaaaaaagggagcccggatgaattaagtagctcaaaactgcctgttcgtcatgatcaggagctccttctctacaaggaggggaaagaaaatgtgaaaacaaaaactaaattcaagaagctccttgaccagcgcgggtgtcttggaggcacctgccggggccggccggggagcgctccgccctcccagcccctggcgcgcagaggagactaaaacagctaaggagaaagcaaaacaaaaacaatgataaaaacgtttaaaatccaaggacaaaaaccggagtcggtctcaaaatccgcgccgttcagtgctccactcggtagtcgactcggctgcaggccccggcctggccggagcaacgcgggggacacccccgattccgctggggagcgcagcccacagctccccctcgccaggcgcccaaggaccctcaaggcgcggggcccacacttgaagcctgggaacgcgcagacaggaaaccctcttcctcctaagcagtttcttgctcgtcggatgagaggcgcccaattgaagcagaatgatcctcatctactaatatccagcgtggccacaaagcgactggccatttacgccaccactttaaacaaagatatttggttattcccgggaagcaagagcacttttgcatggctgagctgcgggcggaggcgagcctcggcccagcctcccgcccgctgagctgcccgcacctcggcattcgccccctcctggccagcgctccagccgccggggttcaggctcagttccgcccggcaacagacagacgggcactcacgccgctccctgctcgcgcgctccctgaagcatcagaggggaaaacagcgtggctctgggctcgggtgctggggctgtgatgtcctcggaaagtcagctccagccccagatccccgcgtgtctgggagatgggcgagggtcagggacaccaggtttgttcgaggtggggcaacttcagtgacggaccctcccgtgagaccccttcccatcctcccagctctgggggccagtgctgtgtttgctcggccgggggtggggggggggggggaagaccttgggggaggcgtgttagcgggggtggcccactgaaaaacccctgagctgcgggggcgggttgtggctcggggatccgggacagcctccgggaggcagtcgatcccctactcagcgccccctccgcccgctcggattctctccggtagggggaaagggggcggggagcagaggtgtccctctgacggcggcagaagagaggcagacagactgacagacacgtagaccaacagtgcggccccagggttcgtccccagactcgctcgctcatttgttggcgactggggctcagcgcagcgaagcccgatgtggtccggaggcagtgggaaggcgcggggctgggaggccgcggcgggagggaggagcagccccggcaggctcaggtgaaacccccaccctgtccctcagccccctcctcctaaagacctgtccgtgcccggggaaccccgaccgaattggaaagtggttccactttgtaactccgcaagttggttgcaaagcagcattcaccttccttcctctcaaccatctctcctcctctgttactcccccaccccacctcctgccctccccgctctcggttccctcctccttcccctcccctccacctcctccccgcgctccgctggtaccccacaaaaaatgggggtgggggtgtccaagggaggggggaaatgctttgggtctcgtctctgcctctctctctctctctttgagacctaaaaatcctgacaagtgaaacttaaaggtgtttaccttgtcatcagcatgtaagctaattatctcgggcaagatgtaggcttctattgtcttgttgctttagcgcttacgccccgcctctggtggctgcctaaaacctggcgccgggctaaaacaaacgcgaggcagcccccgagcctccactcaagccaattaaggaggactcggtccactccgt

SEQ ID NO: 12217 - DNA, 2300 bp, Homo sapien
cacccaactcttccttttactcaggtcttgggacctaagagggggtggggatagtcatgataataactaccgcaatctccagtgctggcactgagctgaaaaacattcaaagctttcaaagcattttgatgtgcttcatcttacttgaatctcacaaaaaccttgtgaagattgatctccatttctaaatggcgttgagactggaagagatgtacaacattctacacttggtgttccttaaacttacaaacaactatgaaataatggcgagtgagagaaagaagctgggtgactgggaaacccaccccgccttcgcaattagaccccattcgggactcaggcccggccaggtcgcgcctgcagacaaggtctgtattcagcgttgccagttctcctctgtggttcgcttaagcccggcgtcgcctcccctccttgcttagccaccacagtgatcaatgctcagttcgtcggggcctgagagcgccccccagagaagcccctgggaaggaagggcaaggagccgggcttcgctctggtctttcgcaacaccagcggcgagcgcgtctccctgcgcaaacgtagggtggcctccccagctctgccgtggggaccgcacaaaaacgcgggcgcaggtgggagggcggagggtgtcctgagctttctttaccctggtaaagaaggtaggcggtgagaaaagcgaatgttattatagaagttggctttgtattgagggagtaagagctctcttcaaggagagggctgaaatctttaaaaataaataaaactttctctactgtaattgctattaataaaaaaagggagcccggatgaattaagtagctcaaaactgcctgttcgtcatgatcaggagctccttctctacaaggaggggaaagaaaatgtgaaaacaaaaactaaattcaagaagctccttgaccagcgcgggtgtcttggaggcacctgccggggccggccggggagcgctccgccctcccagcccctggcgcgcagaggagactaaaacagctaaggagaaagcaaaacaaaaacaatgataaaaacgtttaaaatccaaggacaaaaaccggagtcggtctcaaaatccgcgccgttcagtgctccactcggtagtcgactcggctgcaggccccggcctggccggagcaacgcgggggacacccccgattccgctggggagcgcagcccacagctccccctcgccaggcgcccaaggaccctcaaggcgcggggcccacacttgaagcctgggaacgcgcagacaggaaaccctcttcctcctaagcagtttcttgctcgtcggatgagaggcgcccaattgaagcagaatgatcctcatctactaatatccagcgtggccacaaagcgactggccatttacgccaccactttaaacaaagatatttggttattcccgggaagcaagagcacttttgcatggctgagctgcgggcggaggcgagcctcggcccagcctcccgcccgctgagctgcccgcacctcggcattcgccccctcctggccagcgctccagccgccggggttcaggctcagttccgcccggcaacagacagacgggcactcacgccgctccctgctcgcgcgctccctgaagcatcagaggggaaaacagcgtggctctgggctcgggtgctggggctgtgatgtcctcggaaagtcagctccagccccagatccccgcgtgtctgggagatgggcgagggtcagggacaccaggtttgttcgaggtggggcaacttcagtgacggaccctcccgtgagaccccttcccatcctcccagctctgggggccagtgctgtgtttgctcggccgggggtggggggggggggggaagaccttgggggaggcgtgttagcgggggtggcccactgaaaaacccctgagctgcgggggcgggttgtggctcggggatccgggacagcctccgggaggcagtcgatcccctactcagcgccccctccgcccgctcggattctctccggtagggggaaagggggcggggagcagaggtgtccctctgacggcggcagaagagaggcagacagactgacagacacgtagaccaacagtgcggccccagggttcgtccccagactcgctcgctcatttgttggcgactggggctcagcgcagcgaagcccgatgtggtccggaggcagtgggaaggcgcggggctgggaggccgcggcgggagggaggagcagccccggcaggctcaggtgaaacccccaccctgtccctcagccccctcctcctaaag

SEQ ID NO: 12218 - DNA, 2300 bp, Homo sapien
gagctccttctaccttacacaatctcatagttcaagaccgaatttgggaatcagtcttaacacttgcttccccaggacggtctttgtcagtgcctcagcttctcactagggaggtgggctggcagagattgccaggcctcgggctctggccagagataagtccacgaggcctggagccagtctgcgacctgcccactctctagacgctgggggctcgggagctgaggagcggtgcgcggcgggtttccagactccgctgtcccctgcccactccaggctcccgccccggccccgtctgcagagaggacagccaagtcatttcagtttaatcttatttaaaaagacataactaataaatctattgccagggccgcggaaagacggccagcagagtcgatcgtgctcccaatcccattgaaccccattgaaaaccatgacaacaccggacaagctccgatttatcccggcgcgttaaagcgcattgtgagcagacgtcaatcatgcattattccggactgaacaaatgcaaaatcttgactggaacaaatgcttccaacaggtccggggcgtcgagctccatttcccctttgtccgcggcctagcagttggcctgtattggggttgcctccgcccgaccacccagcgcgcggtgcagctccgggcacctcgggcacgcttgatagggaggctgctggggagggtgcgcggggcttgacagggccgccgccgccgcatccgagccaggttcgagttcagcccgggaggagccaggacttctggtgcagccacccaagtacagagcccttcgctacaatttagcaactaaatatccaaactactagcttcagtaggagaggcctctgagagggcgttcctctgtagattgaagcgcggccagagctaggccatggcccaacaaaatgtatccacggcggcctgttccctgcgcctcctacattgatcattttctagggtggaactgtggaaactagaagatcccagagaaacccatggccggtggtattttctgccgggtaggccctgtcctaattctcccgatcggtccattcccggaccaaggcgggcagcctcgtcagggtctgccatgctgcgagcggggagcgtaggccatgggcaggctcctgggcaaagaccaaagcccaggcagtgagagtgccgttgaggctatggggccaaggcgcacaggcggcaccagttcatctggcgactccaaggaggcctcaaagccctcacaggatgccctgagaagcgcccccgcccaggggctctaaagcgggcctggacccaaatttgtggagctcggcctccgagctccgagatcggcagcggccgggcgaagctgggccaaagagacaggcactgtagacctaagtagcttggctacaagcctcttctgttttgccggcctgtggagacgtggagctggggctccgaatgttgtcccagcccttcctcagcacctctgaggctgttagggggatgtatggtgtgatccgaggctcccagcggccgttgaaacccctgggccaatgctggcagggccaggctaatctttacgccctcctgaaacttgtcatcctgaatcttagaggggcccaaccaaaaagagaaagggagcgcgccagagtttaacgccgctttgtaaatcactttctggataattgcgggaaactaccactccagcaaacaagctcgaagaataaagcaaacagggaataaattcctgggtgctaataaacccacccctgccacccccacccttcccggcgctcccgcggggcctggcctcaagtcagcccaggaggaggaggaggaagctggggctgggtcaggcgggtggtggccaccgctcgccacccaagatgttattcactggtaacaatccccattatctgtccccactttgggctaatcagacagaatcgctaatgccaaatgctgcttcctgcagcctctgggaggtaactgggcgccaaggggcggggtgcggggcggggtgcggggcggggcgggggcggaggtggcaccttccgggctcgccccggctctggtccagtgctcattcaggtacttaacaccctggagacccggacctcggctttcaaagcggcctgggtgggaagagctgtttatataaacagagattccgctgtaaatgcgctaatatcccggctgccagcgcatggcgagcgcctcccacgcccatccgtaggagcggcgtcccggccgcccctccgttcccagcctgccctgcccccgcctccttcccctcctcggcc

SEQ ID NO: 12219 - DNA, 2300 bp, Homo sapien
ggcctgcggggagccgccagagctgcggacaggccccctgcccactgagttgctacccctggcacgcccaggggatccgcagcagctgaggccacatggtcacagccaagttcagcaggtggaaagggagagatggcattgaacctatgtgagaactgggaagatgtgtggcagctgaaggagttggtaggaacaagagggagttgtatgttacctccatataaccagagctctaaaccatatcagtttctgaaccagtctaggctggtgctgcagaactgctaaagctctcgcagagtccccagaccccccgcgggacatgaggtcttgcctgttcgtatgcgaacatccttgtacccgcctagcagccctgcagactgcaaattttccctgggtgcacggaagtagagcagatttggcgcagaggtcgatactcactgcctgtctgtgaggggggaggaggattccttcctggtcaagttgccgggcatgttcattccctcccgcaagcctaaggcagagtcataagctcccctacgatgcggcaaagtctcaactaatttatctaccagccttaagaaggagctgctgcttctaaaatctttagatttccgaaggctctccttgtgtaaaaatgccaggcggtgccacacgatgtcacccaacaggtattggaggtcagaccaggctgaaattgctatcaagtcaaacttcaagaagattttaaacatttgaaaccaaccaacaaaaagggacaagttcaagtatgtctagttgtgggatttcccccaagattccgattctaaagagtggtgttttagttcatctttacctttcacatcctccattctgttaggtaattttgaatttagagtgcatcctaaccatagaagtgggaatctggagatctgttcctttgcagaagcatggctgatcatagttttttcctgggttcttgcaacttactgacctgagatctgggaccagtcagcttctctgggtgtagaccgcagccacacacatccctggggactgttggggaagcagcctgaatcctgtgtgcacaaggagccttctggattgtcaagtagcagtaacagagttcacgaccccaagcagtacaaactcccaaattcacgaaaatatttctcttcttgtttattattttgattcacattctccacaaccctaactgcaaatattaataactttggctgcaaaaaagcatacggtacactttagattagacttacagtgaataaaagtgaaaattcagaagtaggcagaacgacagggcctctggagcttaatggaagacgagggaattacatccatgtgcagcgtcggtgtccactgtcttgggactaagtctctttcatatttaaacaaaactctttcgagagggctcgctggtttggagaaccctcacaaacgctgccaccgagggccaggggcccaggacagtggctgaatgtggcagagccttgggctccgtagtgagtgccccacgcactggcaattggtcgacttggggctgtgcgctagcgttagccgcctgtggttcagttccccgcacacggcgtggcccgtgcctcgagcctgtgtggctagtggttggccggtccacctggactggggggtcgccgcaggaagctggcggtaggaggaacctccctggccttaacagtggcccccacctgtggctcgggctccccgcaacctcctggtttctttggccggcctatcttctcacacctgcgctctcgccacctggcatggactgaagtgaggtagaatcggcaggtgacacagatcctctcctgacagtccccagaggcccgcatgacagattttgctaagacaactccctcacccctgtgcacggtggcgcccgcctcccacctatagccttaacttcaattctgagatgtccatcgttccccggaggaggtctcctcgggccccttctcccttcgagtcattcacattcagaccaaacgctttcatttgtttattcagcattttaccagcctgattttgctgtctttttgtgccgcttctgggaagatgtcaaacacccattttcattgtatttagtcacccaggtggggagctagcctgaaagagacagcggaaggagtttcctggactgcgctgtcgctcaccgacccgcaccaatcaccatgcagcttgccctcggacccgccccttttagggcgtgtccccagtgagtgatagacggagccgccctgccctgctcagcccagcccacgttgctgcttagattgaaatgcagaact

SEQ ID NO: 12220 - DNA, 2300 bp, Homo sapien
tcctaatttgcatttatattagttacatttataagaatatatgatggaatcacacatatttatgccaaatacttatcactcaacaaaacagcataagtaggatcagagtttgatctactttttttttttgagaccgagtctcgctctgtcgccaggttggagtgcagtggcacgatctcggctcactgcaacctccgcctcctgggttcaagcgattctcctgcctcagcctcccaagtagctgggactgtagccggacaccaccaagcccagctgatttttgtatttttagtagaaacggggtttcaccatgttggggaggatggtctcgatctcttgacctggtgatccgcctgcctccgcctcacaaagtcctgggattacaggcgtaagacaccgtgcctggccgagtatgatctacttttaacattctttgagtttagctgtgcctaatacatagtatgatcatataaattagcatacaggtgcttatgagtcatcagtcttagcttaggatgttaatcaattggcctcactttctctttggactagctgagttttctttcatcagggtcatagactacaaatcaacgagtcaggtacagaagacagaaccttaggcattgcggaatttgaccaaaaatggtaaataaattggtgcaaattcatcatcacaattggaaaactgaaagagcaagcagtggggccactgcaattataataacgggtggtggctcacgcctgtagtcccaccactttgggaggtcaagggggtcagattgcttgaacccaggcgttggagaccagcctggacaacatggtgaaaccctgactctacaaaaaaaaaaatccccttcccccacctccccaaaaaactagccgggcatggtggtgggctcctgtagtcccagctactctggaagctgcagtgagaggatcacttgagcccgggaggttgagaccagcctgggcaacatggcgaaagcccgtctctacaaaaaaaattaaaaaaaaaaatagccggcatggtgatgcgcatcggtaattccagctactcaggaggctgagatgggaggattgcttgaacccgggagttggagcagcgagccgagatcgcgccatggcaatccagctccggtgccttccagtctgggcaacagagagagactccatcgaaaagaaaaaggggggaggggaggggaggggaggggaggggtggggaggggaggggaaagattttacaatttcctgtaagcaatgaatggctctaatgtgatattgatgaaataccatctttaagaaagtgtacagattgtaagtgacacgtggctgcttacgttactcctgagatgcaagtagatcatgacataatgataaccagtcataatttgcagtaatcccttacaaaaagtccaaatttgtttgaaaatacagaaacttttactagtcgaagttaaacattaaacattttctagtcattgccttaacaggatttattagagttactataatttattgaaagaatggctagatttataaaatgttttctggttatgagccaattatggcaattattttaattatatatttataataaaaatgcatgactgtaagataaaattttaaaccaaatcataatttatattttaaaatagctttaaaatacttgcacataacacatgtcgtggttagtaactttctccagctacatttaaaagtatttctaagattaattacaacatttttttctaaaggtttattttttccccacagcataactctataaattaacgtgagcccattatatcaaaggtgtttatgtgtgttacatatgcatttaattttaatatccttatttaaggcacgaatatccccaagcaagcacagtatgcaataagaagtcctgtggagtcctgtaagtactttgatgaggaatgcaggatttatgtaagacctgagcgagcttgaagaaagactctacaattgataaaactaagtcagaccgaactggatcattttcaagtaaaataggtagcaaggcaaaaagaccgcctcaaagtcgctgcccttggggctctgccacttgctttacaggctaggaacggacaatgccgggaacccgagagcggccggcgcggacgccgaggcaactttacttggggcacccactactcgcaatcaactcccggcctcctctgctctcgcgcctctaggggctcaagcactgctccgggagcgctgaattttgaggaagagggcagaacttcagtaaggagacctgtctgggcaacggtttcagg

SEQ ID NO: 12221 - DNA, 2300 bp, Homo sapien
acttattggctctgtattgactcttgttaactcccaagctctagaatgttctcatgcctaggccccatatcctctagtattctagaggtataggactggattatatgtgatatcaagtcttgcttttttcactcaaagatatctcttctagtctggagaggttaaaaagaggaagtaactttttaacaaggataactgggagttttccaactgaatccacagagctttttagaggctgggtcttagacacaaacttgctcccacctaccatggataagatcttcagaggggaagacactcatggaaataattatgtcaaaagattgtctttaaatcttgacctaaaagtattattgcatttcctggataacgtagggaaggcaaaaatttacttacaaggtggtaggatctcctccattagattgtaagtgccacagggaagggatttgtagtgatattgtcagtacctaggcaagtgctaacacttagtgagctctcagtgtagaatctgtttcagtgtgtgcactagggtttaatagttgtgaccaaatttttaaaaactaaaaaaaaatggaattaatttgtgggggtatttgtgtcacagaatgtagtttttttagcctgtggttaatatttaaatctacaatccaatgctatcaaaagaaggagtcctgtgatggaatcccagctatactattacgcctagtgtgatcttggaaaactcagcttctgctttgaaaaatgaggaaaacattttctatgagctctgaaattctgtttctatacctagtatataacaggttctcaatatttgttgaataagtgattctatattgcactcaagattccctatttaattagtaaaaagtctgaaagatattgctcaaaagcctttatcaagttagcaaaatttctgaaaactatttcttggtaaacattttcaaacttagcagttttaatcaaatatttaatgaaatgaaaaactttatttttgtatatctgatcacataagcagcaagtctccccaattcctcaagcactttaaataattttgccatatatcactgatcaacttttaatgactcagcctaagaaataaaaaatcaagtatgaaaccaaattattgtactttgtacatttgattagaaaccacataaattgaaccatactaaattgctgatattcaacggtttttgacctccaaaaatggcaatttttacatggctcacactaaatatatttagcaataaataatgtgttttaagaaatattacaatagggcttctaaagcctcccaattctctcttttactcttatcatctcctgtctgttaggggtgtggcaggtatttttggaaaatttcacaatcttatatctctcctacataacacaggcaacttgtagttttaaaagagtataaattagtagttttgttttggtaactatcctaaggggctagtaagaataatcaaacattttattgagagaatatactgttaagttccttaatgttcctcaattgtttaagtcagtggttcacaacctttaaagttcatgacaatcaacagagaactcgtttctgggccctatccccagagattctgattccgtttaggtcggggtgggacccacgaatttgacttcctaacacattcacaaattatgctgatgctgtgggtactaaaaccacttttaagaaccactgacctgggtatagaagaaactatttgtaaccaggctttttcttcttttggtccttaggtaaataaaactcaagttgatgaggtatgattttaccttaaatcaaaaccatttttggtaaagtactaccttagctctattgtaaggtaagtgtaaattagatttgctttgacttagttgctacagaccacaattataggacaactaactgaggaatttattcacttgtcccttcttttgaacctcactgtgctctggcttgccaggaggtgcaagtgtcgtccccgctttgtacttggcgctccaggcctgggtcacttcacttgagttatcagaggcaaccgtctagtttgacaaactaccggaggctcctgatagagaagggcgtgggcgccaatctaggagacaaagcctgagccgctgcggtgagccaacccaaacccatccgcgggtcttctttccagagacattttcggagccgagggcgcctctgcgagagcgctgcgaacaggttccgacgcgccggagatcgcgcgacgaatctgcgcctcgaaccctcgctttccagcagtcgccggattgctgctccacagggagcc

SEQ ID NO: 12222 - DNA, 2300 bp, Homo sapien
tatctttgataatcattttgagaaaagaaaaaagctctaatttatctctttcatttcttatagacaggcaactgttagaacaatagaaaatgaagaaatggatatgttggttatggtggtggtggaggggagtaggggaaaacttacctgttgtggtatcaaaagtttagggaaagaacattaatgagttacttcaggtatgttagggaaaaaggaaaaagaatagggagaattagtcctaatgtttgaactcactgcataaaacagagagagagagagagaaaatcagcttactaaaaggaaagaaaatatgaggtttctctttatgccagagactgtaagcacccagataatgggctttaaaaaaaggaggaaatgaactttactcaatgaaaaatattataatttttctctaaatttattctactaattcattacatggtttgaatgttctcattgtggtagtcactatcctgttttatttattatttcctagccaggaaaatcaactttttcctttgttttacacataatttgatttggccctaagcctttgcacaagctatatacttcctgattggagtatttgctctgataaactgtacactctttgtttttgtctcatagatttttatggtactttatgttcataaatatgattcaaatcctgactgaagtaaagcaaaaaagaaaaaagcatttcaaagctgaatctgtaacaaacttcttgagaacactgttcattacagcatacataacgaaaatttggtgaatattataacctctgttgttccaagttaatctacgtccaacttttccattttgttagttttcacagcgtcatgctctgtcccccaggctggggtgcagtggcgccagccatcgtagcttatttcagtctccacctctggggctcaagcgattctcccacctcatcctccctagtagctgggactacgggtatgcaccatcatgcccagctaatttttttgatttttaataaagtcaaggtctcgccatgttgtccaggctggtctcgaactcctgggctcaagcgatcccactgcctcagccttccaaagtgttgggactacaggcgtaagccaccgcgcccggcctttttcagttttttaaactctcttttgtacacttactaaaggataagttcctttcattaactttaaccacaaatttaggaacccgtcagcacctcatattatgcctattctctggggtgtattaaaaaatattattgcttattactcagcacccagaagagtacctggcacatggtatgtggtcactaagtatttggtgtctgaaggaatcatgagtaacaggagttaaagtgacatttataaaaccaattctgaactatggaacaaaaaacccaaatttaaattactagcagttaattataccattcttagttcacggaggtaggccaattgaaaactttggacatttttaaattctgtaaggtttaacattttttcttagaggattcacatatcgtaatctcatccagcacttcagtcaaaaaaaaaaaaaaaaaaaaaagtcaccagctccaaggttttagtgtgaaacgttctttggccaggatctagatagtacttttgctcactcaaccggagcccgatctggtgccattttcacttgaccgccgcttcgaaacacgtccctcccacctctcatcccaaaccacacacaaagaaggaaagcacaatttcgacaggtcttgggaaaactcgacgaggccaagtatgaggccacaagacaccgtttttagttccgcgttctccctcttctaatcctattaggttttgtccagacaacgttttgctctttcagaagagaaagagcgttctgcgctcgtcgtcttggattcgacaaccataagcatcccgttagggcaaccaccgcagcagactaagttcgactactttctctccaaactcctcccgggccttcttcccaagctctctctttctcctggaggccccgcctcgcggcccggcagcgcggcacgcgcatgcccggtgctcgccgcttgcgctctcccctgcggcgcgccgccgccccgtaggccccacgcgccgccccgctcctccgccggatcgtctgtgggtgagtctcgagccaggaggctctgagccagtggcgattggctgacgcggtggctgcgcactcggcctgagaaactcggcaagcgcgcagtgtcgactccccggtctatgccaggcgcatctcaggtaaacggttgggcagggaggtttgggcgacggagaatgatagtg

SEQ ID NO: 12223 - DNA, 2300 bp, Homo sapien
agaaaataacctagtcttgctcggtgttattgaagagccaagagggtattggagaatcacctccagaaggaacaaggaagctcattagcactgaaagtcccccggatcaggcccaggaagctaagcatccgtatactttacaaatggaactaaagtcagctactaatgggaactttgcacaaaagaattagtttctgacacacaattcgcagatacatttacacaaactgatgggacaacttgcagtcacaggagcaggctgcattagggagggttcctgccctactgagttccaggtggatttaatttcactcattcctttccttatgatgtgacgtttctacccccccaccctttttgtaaaaaaaaaaaaaaaaaatgtaatccaatgcttttatctttttttatttccttaactgcacatcttcaccctctctgctcccctgctgacttaagagatttgtttggttcagggatttaaagtgattctcttgccagatttcaagtaaaagagatttaaaagaacaaagcacagggaaaaaggtatctgtttggaagacaagttaaaacacatttcttaaaatgagattaataacattttaaaaactttgcaaaacaagaagattttgcggattcttaattactttagattttattttattgttacttaaggaaacctagtggttctacaggcagtacaacaaacacatggtcacagacactcagaaacacacacagtcacacatgctcagaaatatacaaacggtcacacactcaaaacacacgcaccatctcccaatctatcaccaactaattgcctatcacccggtcacttcagttgttctctctcccaggacaagtgggcaaccaccacccagggcctcatgagagtaaagagactttgcgttgggaagactctcccaccgacgtccaggaccgattaggaaccaagcgagcccctgagatctcagcccggaccctccgggtcacagacaggaccaagcgccgctgcgggcagtctcgggcttctgcctggcatctctttcgcagtgcagatgcgttcccgcgcccaggcccttgctctcccagctaacgcgcgtgttatgggagatgtcccctccccctgaccttttcctatcagaaaccagacggtcgtctccagctcactccctgaagcggctgaaggggggcgggaggaggagcccggcagggggaggacggcccgacttgggtccgcctgccctatcacacagacatctgctctcagtttcttcctctttgtggtcgctacagatgacaaggggagaggagcggaccgaggcggaacaaaaaaaaaaagttatgtcataaagatataaaccggtgctgtgactcacctgctcttagccgcaggtacgagtttcgtggcagcgcctccgctctgctagcccggggcccgggtcggcctaacgtcacttggctcggctgactcagatgacccggtttctagtgacgaagcaaaagtggggctttttcccttttctagtctgaagctctcaggaggaaagaaaaaaaaaagtctgtattctccagtctcccggggttgaactttgggtcaggaatcaggagggaggaagcaaagagcaggaggggcgcgagactgggccgcagcccgcgctcggaaggtggcgtgtacctctggggagggaccccggggtcagttatcccacaaggtctctaagcccagtctccgacgccaccgcccccggccttctccggctgcgaggttccgatccagagccctagcccgcccgcccgcctggccccgcctattttttctttttccaaagggggttacaccccctccctccccatttccctctttccctagcctccgggcctaaaccaattacactgctttgcaaacaaagtgagggccccgcttgggggaggggtcgcgggggaggggtcgcgcgcagcggtgaagcggcggggcgggaggcgcggcggccggactggcgggcggccgccttgcaggtgcacctcgggctttgtaggtgcgagcgtctttgtgcggcggacaaatggggagaggacgaggaggtgggcactcaagcgacgtaagatccacatcagctcaactgcacttgcctcgcagaggcagcccgctcacttcccgcggaggcgctccccggcgccgcgctccgcggcagccgcctgcccccggcgctgcccccgcccgccgcgccgccgccgccgccgcgcacgccgcgccccgcagctctgggcttcctcttcgcccgggtggcgttgggcccgcg

SEQ ID NO: 12224 - DNA, 2300 bp, Homo sapien
gcttgtgcatgtaacccaggcactttgggaggcagaggtgagaggattccttgagcccaaaagctcaagcctgggcagtgtagagacccctgtctctacaatatatatatataaaattagctgggcatgctggtacactcctgtagttcccgctacttgggagactgaggcaggaggattgcttgagcctgggaagtcaaggctgtagtgagccgtgtttgccccactgcccaccagcctgggtgacagagtgagaccctgtctcaatcaatcaatcaatcaatcaataaactagacctagaacagaggttcctagcacaggattactagctaggggacctcaggtgaattccttaatctctttgtacaatctcttatctgtacaatgaagatgataatactgcctagttcatggattgtattatcctatggtatggatacctgagtccttagttactgttttttgattacataaagtattaatgaacactatttatttgtcatttaaattgtttcctgactatatgatagacatatttcaaggttacattaatttgaactattttttcagtttaggaacatggcatgtatattatttttgtgcagcattcgggatggtaccatgaacaattagtcacttcacaagcactttggctatttgtttattattttaattagcagggaaaagtaatttactcctggcctgaagcggctactcctacacttagagtaaagctgcccatacagagtgctcacagggcagtgagatgtgatgtaaatgcagtaaaatcgcagggttggcagatctttttctgcagaatgcttctcatcttgagagcattcagcaaccatttttgaacacattgtattagggagtgaaataacagaccttagagggtggattatgatctcaattttacagatgagcatgcagaaacccagagagggaaagcaactggcccacatggtaaagctgtgtgtcccaggctggctttgtctgtttctacagcaggagctaccttctgggaggcctgaggatgcctgagtgcatcagtctccaaagcaaggctgttcagaggccccgctctagggaactgtggagcacgagacttttatcgtgaacttctgagaaacatgttgccctcttccagcacagatctcatggaggatctctagagcgtttatttcttttgactattcatggcaacaaactccagtacattttatctgccattctccccacctcattttttagttgcctgaatttggagagagaggggttggtacagaggaatataaaataaacatgtgtgggcctgctaagtgtactgagcaaagcacattcatctacactatattatctaattggtttttctttttctttttgagcttttaaaaaatggtgagatattacacaagaaaatgaacacaacacaaaacaatggtttatcacaaagagaaaatctgagaagccatcaccaaggttaaaaagcagaatgttaactagcatcccgactgccgtagtactgcctgcccactcaccatcaccgtcccactcccaagatggctactctctggacttttatggttatcactttcttgtgtttatttgtaatacaccagctgagtctacatccataagcaccacagtttttgaactttgtgtgatgaaatcatacattatgtacccctcggtgtctggcttcttcgctcaacattatgtttgtgagacgttcatctgtgttgcttcccaaagctgaagttttaagtctcggggtccagcattattcttttaaacgcagaaagagcaagagtgttaagtaagcagttggttaagctccgcaaaagctgccaatccaggcggcttcagtccaagaggctcttcgggagcagcgtctttttagcgccgggagaagtgaggcctgggtttggggtccaagtccgaggctgccccggagcgggtcccgcaaggcgggtgcacttgaggtgggcgccacggtgctgggggctcctacagggcagaggcgcggagaggcggggcgggggagggcgcgcggctcgttgctgggcgaccgagcgcgtcctctcttcggtggagccagtcgagcccacccggcccctaggcacaggaaaggcctgttggacactcgccgagcggcggggccaagctcaccgccacctgaattggagcggaggcgccctcgatgccgggtgagaggagaacgcggcctggggcgcggtgacttcgtgtgggcgctttgcgaaggagaggtgcgttgtttgggcggagcggttgtccc

SEQ ID NO: 12225 - DNA, 2300 bp, Homo sapien
atttggggtggagagttctgtagatgtctattaggtctgcttggtgcagagctgagttcaattcctgggtatccttgttgactttctgtctcattgaactgtctaatgttgaccgtggggtgttaaagtctcccattattaatgtgtgggagtctaagtctctttgtaggtcactcaggacttgctttatgaatctgggtgctcctgtattgggtgcatatatatttaggatagttagctcttcttgttgaagtgatccctttaccattatgtaatggccttctttgtctcttttgatctttgttggtttaaagtctgttttatcagagactaggattgcaacccctgcctttttttgtttttcatttgcttggtggatcttcctccatccttttattttgagcctatgtgtgtctctgcacgtgagatgggtttcctgaatacagcacactgatgggtcttgactctttatccaatttgccagtctgtgtcttttaattggagcatttagtccatttacatttaaagttaatattgttatgtgtgaatttgatcctgtcattatgatgttagctggttatttcgctcattagttgatgcagtttcttcctagtctcgatggtctttacattttggcatgattttgcagcggctggtaccggttgttcctttccatgtttagtgcttccttcaggagctcttttagggcaggcctggtggtgacaaaatctctcagcatttgcttgtctgtaaagtattttatttctccttcacttatgaagcttagtttggctggatatgaaattctgggttgaaaattcttttctttaagaatgttgaatattggcccccactctcttctggcttatagggtttctgccgagagatccactgttagtctgatgggcttccctttgagggtaacccgacctttctgtctggctgcacttaacattttttccttcatttcaactttggtgaatctgacaattatgtgtcttggagttgctcttctcaaggagtatctttgtggcgttctctgtatttcctgaatctgaacgttggcctaccttgctagactggggaagttctcctggataatatcctgcagagtgttttccaacttggttccattctccctgtcactttcaggtacaccaatcggacgtagatttggtcttttcacatagtcccatatttcttggatgtttgctcttttctttttatgctttttttctctaagcttcccttctcgcttcatttcattcatttcttcttccattgctgataccctttcttccagttgattgcattggctcctgaggcttctgcattcttcacgtagttctcgagccttggttttcagctccatcagctcctttaagcacttctctgtattggttattctagttatacattcttccaaatttttttcaaagttttcaacttctttgtctttggtttgaatgtcctcctgtggctcagagtaatttgatcgtctgaagccttcttctctcagctcgtgaaagtcattctccatccagctttgttccgttgctcgtgaggaactgctttcctttggaggaggagaggcgctctgctttttagagtttccagtttttctgttctgttttttccccatctttgtggttttatctacttttggtctttgatgatggtgatgtacagatgggtttttggtgtgaatgtcctttctgtttgttagttttccttctaacggacaggaccctcagctgcaggtctgttggagtaccctgccgtgtgaggtgtcagtgtgcccctgctggggggtgcctcccagttaggctgctcggggatcaggggtcagggacccatttgaggaggcagtctgcccgttctcagatctccagctgcgtgctgggagaaccactgctctcttcaaagctgtcagatagggacatttaagtctgcagaggttactgctgtcttttagtttgtctgtgccctgcccccagaggtggagcctacagaggcaggcaggcctccttgagctgtggtaggctccacccagttggagcttccctgctgctttgtttacctaagtaagcctgggcaatggtgggcgccccttccccagcctcgctgccgccttgcagtttgatctcagactgccgtgctagcaatcagggagactccgtgggcgtaggaccctccgagccacgtgtgggatataacctcgtagtgtgccgttttttaagcccgtcggaaaagtgcagtatgcaggtgggagcgaacggattttccaggtgccgtccgtc

SEQ ID NO: 12226 - DNA, 2300 bp, Homo sapien
gtgtttagaataaaagctaaattctacaaaagccaaaggtctgcaagaccccacaggagctagcttctaattgcctttctacctttgtctcctgtctatgctggtttcagccaggataagctaggctatactgaggtaaaaaaacaaaaaaacaaaaaacccaaaaaccaaaccttcaaaattactgtattaaaacaaaggtttattccttgctcacactgtatgtccacagaggactgcctggaggctctgcctccattatctacatctcaggacccagtgtgactagagtcccattcagagtccttactctgctgacaatggaggtagggacctagggcaggttcaatgttgccactaggtcatgttagttcttgactctgtcagggaaaggatggacaatactcatagtgtgtggttcttttgcttaaccctgttgatgaaggtaagaccatctgcggaagttggagtttcctctgagcacatagagaaatggaaacactagcatgatagcaaggtgtaaggatatagtcaaaggctgttctgagagacgaaaatctctgtgcagtaatgattgaataatttgtggtgcattcacatcatagaatgtaacagagatggagacaagagtgaatagaactatgctagctgacttggaaggttttccatgagatatttttaagtaagaaaagtagggctcacaaaagagtgtgaagtgtgtacaatacgattccatgtaaataaaacaattgtaaataaacccttgtgtatgtatgtacaagaatatatactcccattatgtgggttcagcctccagggtaaatctaatctaaggctacctggtagtggtctaatgtcagggaagcttgtgagatctgcgaatgagcctccatttgtcttaagtcaggatttcctcaatgcatagacatgtatggttggtagaacaggtatagcaatgtggacatatgactatatgatttattaattacaccatcctgaatagggttagcttaggaagcagcaggcatgaagttccacagaaattttccaatttgtttaaactaatctcaaacttcctccttttttgtttcctcttttgagtccatccaccatttcctccaaacatttataccatctctacaggtactgcctgcttccatgcacaaattagttttgtacatttgcttctttgcatcattgtgccgtaacaataaaaggattggttggttgtcccaggttaattttgctctggtctgtagagtgctcttttggtaatattttcaatgatagttgattttgtcccaaagttgtacaaattcagtttctgcgaccagtattaagggaataattaatgtttacttttcgttacatattgatggtaagcagattactttttcatcatttttttattttgttatattcattcattcatttacttaatttttgtgcaggcctgtttttcctcccttatttttaagtggaatagagttttagtttttatattaccctcctttgcatgctactttatttcttagtctttattcctattattgtttttgtctagatggagtctcactatgttgaccaggctggtcttgacctcctggcctcatcaagcgattctcctatctcagcctcccaaagcgctcgaattagaggcctgagaccagcctgcatgctgcttgattaagatggatcaggtttgctgaaaaagttgttagggttgagggagaaaaactggaaactaaatgataaaagagaacacaaacacgtacacaatccagaatgtattatataatcacatttatgtgaaatagtatatgtagatatgtataattattatttaaaattaaagatagatgatttttaaaaactaagaatatatcataaatttttctttttacttctctgtatcccatttgctttgtagattcttaagaaaaacatgtatgttaggagatgtccctgcaaaatttctgtagaaagggtgggagaggataaatatcagaaaggaagcaatcgatgttattaggagctaaatttctgtttctcactcaacagttgcataaattgaaaaaggcagtaaatgaattgtctcgtgctatccaccttcagccagatggaatccaattatacataagaaggtatgagcatagaaactgaattcttcttgggataacttagcatcagagaaattgaatggggatcttcagttccctcttgaacctttcaggctccccattttacatttaatctcccagcaattgccatttccccaccagcaagccagtttgttaaac

SEQ ID NO: 12227 - DNA, 2300 bp, Homo sapien
aatccagtgctgctgctgatctgacaggaggcacagctcaggcagtaatgcttacctgtggctcacctcctgctgtgattgagatgtaagactgagatggagattgagattgagatgtagatctacatctcatataccaggggtccccaacccctggtatatagagctgatgggagaaggggaggcatgtgaagtggtagtgtgagacagctaaattctattctatgtggtacacattagtggctgtgtggtttgttatttatcatccttatattagagagataattaatgcagaagagaaaaattataatattaaataacagtggctaactttattctaagtaatgctaatagtcatcttttatgtctattgttgataattactgcctaattaccatgtagtataataatgattatatatagagagtcaagttcacttttgaaagtttcatctgattacaaaactaaatttattttagccttttaagttacatggtcatccttgaaacttccaaaattaatgggaatgtttgtaataaagctcacttacacttgtaagtttgccttaattttagcaaaaaaaaaaaaaaaatcctcctagagagatgtctggaagcattttattagattatatttgatcagacaataattaaaaaaattttcttccaaatagttccatttggtgtcatatatgcttcttgaatcaatgtggggtgtccacatctacagattggtctgtgactaatactgcgtcctccagcaggatctctgagtgctcagattaaccttaatactccctcttccacccccaataacagcagaaaatttatcctacccttcaaagacagcctcttccctctgacatagccagggagggtttgtggaagggaggaggagtgggagggagagagagagtgtgggctttgattagctcttttctggctgggtagtgtcctttggggctgcagatttctgctgtctggcttccaggaaggaagcctggagggatttccttttgccactccacagaagagtgtaatattccccactgctctgcttgatcaagtgacatcacaacaaatactttccaggaagattcctgctgaagcagtcttctggggaaaaagcagtgctattttcattccttcatagattcaggactctttcagaagcccttcctatattatagcaatcagtaaaatcaatctacatctcatatataaaatgtatgtaaatatcatgcagttgacatgatataatattttgttttgccgttatatatttaaatattttcttaatttaaatgtagcgatgttcttattttactttaggcctcaaatatttctgtaggactttgaaaagccatgagcttcagacactgtccctggggcctgataaaggaaagagctctgggctacggtggcaggatctcttgtggacttagcccttccagtgctttgaaacagcctcttcctaggggccactgggatccttcccagctgacttccctaacttcagatctggggattagagtttccatttctcccttgcaggagagcttatggatccttgacaagagacaatttctcaccagaagtgtggattccaaaggcaggagcagccccagctcatccacacagaccctttccccaacctggatgcctgcttgtcctatagtcacataacatcaaaggttctctcccggtacatttccttttctgtctagatagagaagtctccagaggagttcactgggaataaacaatagaaagaaagtaaatgagatagatacctcattacccattgcaggtcaaaaccataggaaaaaatccccattcttgagtagagaccagtagtacaagattctgagtgagtctacaataataggtttcctttgtttcatctgttcttatttgatgtgatactacaaggaaaatataaagttttagaaagatgtgtattttaatgcttgtgtcacatgtatttaggaagatgtatatcttaatgcttgtgtcattgtggaatcacagttagaaggaagtttaagatagcacataaaataatgttgcaaaattaacaaaagcttataacattatttcaggattttaaacaagctgcactgataagccggactaacgggagcctttgtcacgccactgccatgtgccatcacaggtatggagtgcaattgatgtcaaagtggaatcaagcaggaccatcagacttatctaattatcaccccataaacaagccaggagagaatggaagaaactgggagaaattgtgaatgttatagagta

SEQ ID NO: 12228 - DNA, 2300 bp, Homo sapien
aaacagataacattggagggtgaaggaagaatattcctaataaatgagatagcatggaaaagtatacaaatatccaaacagtgacaaacagcacaatatgactaaggtgtgtggtgtacttaaagacagatttcttctttatcaaaagaaacagtttcggaaatgtagatttgaaataagtcagagattgctcagaatgacaacctaaaagacttggattttccttagcaatctttccagtaaataaaataaacttcgacattttatttacttaaaaaattccaactgaagatttgccagttttttctgtctgaatttcttatctaaagcaaaaaattcaaaatctacatatttaatgtgttacagtatcaatcaggtgatttttaaaaataaattgaaattattttactttattgcttacattatgtgttagacagcgacacctcatggtaaaatattattttacagccaagtgtatgatcgaggaagaacacagacgaaagcccgcgaatggcgtcagaagagttttctcagcatagagattgcccaggattatagcaaggggtgtgatggacttagctaagggcagtaaaagagatggcaggagattgggagggacccaacatttcctgagggaattactaagttccaacacagcatcagtattcggaactctccatgcccatgttccctgcatctgccagacaatgacaagctcaaaatatttctaagagtagcgtaagagtgaaaaatgcacatctagaatttggttcctgcaggtccctgggtattaatgcatgcataccaacaagataaactccaaatgtctaaatgtttggacaccacccataaatgatgaaaatttataagaactgtcttacatatattcttgaagtctttcaaaaaacagaggtaatatggcacagtgttataaaaacactttcattcccatgaggctactgttctggtcaccaccagttcaaaggccactgcatcatctgtctacagatggtcgtggctttgtgctagaggtatcttctcttttgattacatcttgagaatagagtaggtaataatccgggctaggatagtggggacaaactgattctattgacaaggttgagtctctctcatgctcacacaacaactccaataatgttcaaagcatacattctcttgcccaccaaccatctacaattggcaaactcagaaagaaaatgttcagttgtttcaatgaaaagggaacttatttctcatttaggctctagctgtgtttaatatgaagacctgtcttcactctacatgactggaactccaacctttagtgcaatgtatcttggacttgaggagaaaacatgaaagtcaatgcaaaacatctctgtcatttagtcttccactcacattttcaagtactactagtactaataaccctgtttgcttacatgattctaactgggtacatttcacttcaacttttagctcagcattgtaattttagctcttcttcgtggatcagaccacataacaactccgaatcatgtttttattatgacaaaagtttgtggataaaattcactttgctaaatgacattaatttaacacgatgtattgaatatctgctatgtgcccattacagaactaggttcaaggcaaaggccaacagaaaataagcatacttagtttccaacatcaaatgtgtgtttttcctctacatttgcatccaaagaaaatactcttatgcacatcaggtttaatctcttagcttgacttacgctaaatttatattatatagagactaaaatatgctttcaaaattttcaatttctattcttgtctgttttgtaatctcccaagaacatctggaagctggggaaaacatcagagcaagtgaagaatgttcaaatatacagggaccatccagagacatgtggcctgcacgttgatgagcaatgtgaactgaattactgttgtatctggaggaattccataaaagagagtaatcagtctatttggatcccaactgccttttcctgtccccaaagggcgggaactagtgtgggtggaaaaacccaatgcatcccaaggcagtcctgccttctaaagcgcccgccaggacaggctcctggtgggttgtaaggagaacggcaggaagaagtgctcccaggaagctgcctagccaccgccaccaccacagggttccatccaactggtaggaaacatgccctcttggcaagacatatcctaaagagactgattctccttctgtctctcctgttttctccacttctagcagaacaatg

SEQ ID NO: 12229 - DNA, 2300 bp, Homo sapien
tccctctctttgtctttctctcatgctttttaaaattgaagtaaaactcccataatataaaatttataattttagtcatttttgaagtgtacaattcagggatttttagcatattcacaatgttatgcaatcatcaccactatctaattccagaacattttcaccactcaaaaaagaaagctcatacccattaagcagtccttcctctttcccctctgcccccagcccctggcaaccactaacgtaccttgtctgtatgtattgcctgccctgggcatgtcatataaatggaatcatgccacacgtggccttttgtgtctggcttctttccctttgcatagtgttttcaagcttcgtctacgctgaagcaggtattagtacttcatttctttttatggttgaatactattccattgtatggatataccacaatttattaattcagcaattgatggatatttggattgtttctaatttttggctattatgaatagtgctgctatgaatgttcatgcacaagtttttgattaaacacctgttttcaattttgaggagtaaatagaagtggaattgctggctcatatggtcattcttttaaacttttaaactttttaagcaattgccaaaatttttttctgaagttgctgcatcattttttattcccaccagcaatgtatgagtgttctaatttctccacattctcactaacgtttattttttgtttttaaaaatgttcttatagccatcctagtgggtgaaaagtggcatctcaaaaaaataaaaataaaaagcattctcacgtcaggtcttaagttttcttcttttgtatatgaggccacaaaattgagagaaattttccctaagatgagctgaaagtgaatttaatgaaattctgaacaacagagctgtttttcactgactcccatcacacacttcccaaagagcaaccatgatcaaagccaaggcatctaaataatgactgttgaaatccaagctcccagaggtacagatagtcaggtgtctttagtcagtgattggcagaggcatctaaggcattatatgaggcttggctagtaaaatgctcttctgggattctgggacaatacccactctcttttcttttaacttaatgaacatttattttctctccatatgtgctgtatttgtaaaggaaaaataaatataactaaacaccaattgtacattccactttaaagaaggcaatttgttcaggtaaaataatgggttaaaacagtttcagccgtatgaaatttcaaattccatcctagcacattcctcattaataattgcacacattcctatgaaagtctgtcatttattttagtctttgattgctatcatcaacacactacagaagttattctttcctgttcaagacaattagttttgggaactaaaacacatgcagtatatgtaagtgattacctggataaagcaacagggcattaggaaatatacttttttgtttttaatttctgcatccatttcttcattctggaccggtacagatagcctccatgaggagtttagcctctccttggagtaaactctactgagaggaggaaaactgagacttacagtacagcgggcacagcctggttgaggagaaggagaaactaaggaaaaactggagacagcaaagcttgaaggaggcagagcactaagctgctgcgggtcactcttcctgtgaacaggctagtttcaaataaaggcttgcagggatcttaccgagcaaagcaacgtttatgaaaaggaacagggaagttgcatggagtgtgattcttccttccacaggaacagttggaaagccaaagagaccctagagtaagaatggtggtaagtcccagggttcgtttaaaatcctgataacggaacatacattctttcttacgggaaaaccgttttgattcttaaatgaagtcagtgagcttcaggcttgcctacattgatatctcctaatggtttgggcacgtgacccagagccagctcacaaatcaagcctcagaaagagctgacatcctagctcttcccggaaaaactcgaatgtcgccctgccgttcctggggttggtgacaggtctggtcatcgcacggcggcagctcctcacctggatttagaagagctggcgtccccgcccgcccaagcctttaaactctcgtctgccagaacccgccaactctccagggtacaaagtacagcagggacgcgggtggagcccttccaagcggcgcagccttatctttcccgagtgaacacctaggtggattcccaacaccgcg

SEQ ID NO: 12230 - DNA, 2300 bp, Homo sapien
tttccaaagtggttgctctaatctgtaacatgtaaaagagccaatagattcacatttggtattataagatttttaggcatttggaatccagtgggggtaaaatggttctatattattatcttaataaatattattaaaaaatagaaactttcctccatttctaatttggtcagataaactgtctatttcaaactaattacaaaactatttacgtcctactttgagctaattttttctaactcttgtgtcattccatgatatggtcatggtcatggtcagtactctcatatagtcgttatggccaatgtgttctctgctataatcccactcccctagacagaatgtcagggagtgagatcatgtatttacttaagctttccagctattcattctttcttactgtagacacctcatctcatcccaaacgatttttaaagctatctaagaaatttccattgactacttaagtttgaaaaagattttattaaaaatattgcactacatggacacatttacaaacacagtcataagattgcaatggtctatagagagctggcccaagtgactaagtattttttaaaaaccattcaatttgatttctggattttcatgtttctttcttataagacactaagttacctaatttaaacgcaaagccacgtttaaggtgattctcagacatctgaaggaaggactaaggaatgttctttaaattgggaaatagggcaggagagaaatcctagtgcaaagctccatactcagcaaaagcaaggtaagtatgatgatgactcataggcttactgttgtttgttaagatacatggaatttccaggaggaaagaagaatgagagttatggtaaaaataagatggaagcatacagatgtgatcctgaaaccttccctcccacccctcatcaacctgaatgcagtaaaacaaagtgagcttatatgcattatccatggaatggcaactttcattctgattaaagatatttaaaagcatcagacatctctaagagggcttagctgaaactctctatgtatttctgatggcaacgtatttggccattatgaaccaagatagaatgtacgttttctaaactgatactgaattgtctaagttgctaacaagaaatcctttcataacagtacagtttttaacctttacttctttattcatctttaattccttgccacttcccactgagttgaaatgtttatattaaaacaaaacacccactggaattctaaagaaattggctcacccatctttcaaattacaagatattttttgacagtatacaatattcattataatggaataaacattttaatttcttaaggaactctaattttccttaaaggagatgtttacaacttactattataaatgctgccactcaatcataggagaaaatgatactaaaatagttcaaggctaaaatcacacatagggcagttgttctcgaatatttataaggccacgaactcatttatgtataacctataaacttgaagaatttttgaaccaatacagtggcaaggaaagctaacaacctaactgttaagatctatggtcattatttttcatttagtcctagaaatacatttcctttctgtaatgaatcaatatggtctaactcaaagagaaacacgtggaagtgaaaaataaatttctaaagcaagtgctgatggaagaagcagaatttcccatttaaaatacccaaacaactccaaattctttagtagttaggactcctgaaatctcttgacataatagagaagcaaagacccatagagagatatgcggttaaatagtgctgcctctggtggcaaaagcagttgctaagttgtttcacaacatatttttcccccacaggcacaggccccccaaacactggagccgtctacgaattattctgacgctaactccacagctccggacagaaacacaatagacgggcgtggtcttataatcataagccagttcctttctcaagtccttcctgcctatgttcgcttacgtgttatgggttctgcggtcctgatgaaactccctgaacggagaaaaaccacacacttcatcccagtggcgaatttctcctcttgctctaagcagggtgtttgaccttctagtcgactgcgtcccctgtacccggcgccagctgtgttcctgaccccagaataactcagggctgcaccgggcctggcagcgctccgcacacatttcctgtcgcggcctaagggaaactgttggccgctgggcccgcggggggattcttggcagttggggggtccgt

SEQ ID NO: 12231 - DNA, 2300 bp, Homo sapien
caactgttttgatttccttttcaagtctatctgtagttcttagtttggagttttattcttcctcctctatatctagtgtgcctgcattgtttccaactatttattcctgtcctttgacttgcgaaataacttttcaactttgtatttcaaattatgaatgcatttttctccagtgtaaattctactctgatgtacagtaaatccttattgccttgttagttatcttatatgtccgttttcattttagttttttcattttttttttctttaatgtcatttgttttccacttcatctcagcatattctgaccttgtgactttcaggtcctgcgtgttattgtcaaaagttttctagaatgttattttggtttctgtagcaaattgttttcagatgactgttcttcccttccatctttaagataactttttttctgaagttaaaaaaatagatggcatgttgttgtttttcttttagtttctaccactgatccttggatctaggtgtcagtcaaagcctttcctcatatttatagcatgaaggtaagttgatgtacatagctcagttctcactgtctatcagctgcttatctagggcagctctgttgtacataactatgattgcttcatatctcggtgtgtatttctctgacacttcaaggaaacaggttatgcaaagactgcagcctttcctttgcacagttaccaggacacttcctgcctcattcacttgcagaagtttttttttttttttttttaatggaaatataattactttagagcaatgagtcatttttttatgtctggatgttttctgggagttcaaactccctgcatgtaggaatatggtgtctgagggtggaggtagggtggggttaggagtacgtggatagttcagtaacattttgctgccttaaaaatcagtgcttttgtctaggggtctgctgcctgttttgctatttggcttataggatggtctctgagggaggtgtagataatggggagaagcagtattttaattttctttcaggtacaaagggaacaatgtttcgtgaagtgaagaacgggctattcaataattgttttatttttgtctatctcagtgtttctcaaactttagtaatgtatgatcctcttttaatggattgatttctcataggtcctgagcattgactaaagggcttttatgacaatgtttcttaaaatattccagcttaaagctagggataaacttctaactctatactactgtaaaagcaaacgaattctcagattaaataccctctccagaaaaccaataaattaaaattaatttgatgtgacttaagatgttcttttttttttttttttttttccagaaatcagtgtttactgcagagaacacagaagccagcaagcagcagggaagggaggcgaaccaatgcagcagcccaccgggaccgaggaggacacacgcagagcaagtcacaggaagcgcagctgaaaacaaatggacgcttatcccaaatgcacaggacacttaccaagaactgatggtccgtcaaagtaaagctcaacagctttggctggcaggacagtcaaacttttggacgacagaaagtaacagtgggaaatgggacaacatctgccagcaacgcgagaggccaagaccatggctgctacaggaggggtcagcgtcacagtacacgcatggcggcggttgcacatgcatgcctggggaatgtgagtgttcagacatgccaggagtccagcctcaccaggaaacaggcacacggggacagaggcgcaaacactgaaaactctcgctgaatccactcggctgagcggtggtcacgagagcacggccctgcgctccccacaaaactgcacctgggccccagggcgagacaggcgtggaaggtgcaggggtgtgtgtgggggcaggggctcctggctcagagccgtatccaggaaccccccttcaggctggagccctgccctgagccccctgtggagagactgtggagagccccctgtggagagggtgactgtgggagagcagcatcaggcctagtctcggctgtgaagtaccccccacctccacgcaggatcccggggattctgtcaaggtgggggccgcctgctcagcccaggctccctgaacgtgtggctagctgagtttgcggaagaaaccaggagagtgccaacaccaggcttgcaagcaagaggctccctgactgcctgatcctggagcgcaccccatcctccctgtgttccctgggcctcagctgttccccagtgaccttggagacaccctgccccacc

SEQ ID NO: 12232 - DNA, 2300 bp, Homo sapien
tagtatagctaacaaatcaaacatccatttgttttgaatggtctggatgtttctaatatctgaataacagttcctattttgataatttgctatcatgttatacgctgcttctgggataacctttagttcaaattcaagggaaaatgcaattttcattattattgtttgggtgggagaattatgggagctaatgtttttatgagctaaaaagaaactcaaagaagaaaacttatctccccattgatcaagggtaggattctggagtttggatggcttctagacctcataactgcgcccagaaagttcctctcaatgtctaagctaaggttatattgctctggtttaaatgttttcctgcttctcttgctagtggaggtagaaactttatagtcagttatttttttttcatattttagaaacatttgaaaaactttacaaatgacaaaggaagatctaaattgcattgcttgttgctcctgtccctttactgcattgaggtagcctggtggtgaaaacatatctcatataaaaacttcagtggaaatcttgattttgttaatcttattagtgaaggctgaaataaattttgtcctccaaaaatgtaaatagctaattcaactggtcattcaaaattttgataactggttgattattctttcaatcatcatttactggtaactactatgtgctgggtacctcctatatacatgtgttataagcccacaaaagtgtttcttgtttctgaggaacttgtctatctttatatgatgacgttattcaccagatctcataacccttctttatgggtcttacagtagaaaatatcagttgtaggccgggcgcggtggctcacgcctgtaatcccagcactttgggaggccgaggcgggcggatcacgaggtcaggagatcgagaccatcctggctaacacggtgaaaccccgtctctactaaaaatacaaaaaattagccgggcgtggtagcgggcgcctgtagtcccagctactcgggaggctgaggcaggagaatggcgtgaacctgggaggcggagcttgcagtgagccgagatcgcgccactgcactccagcctgggcgacagagcgagactccgtctcaaaaaaaaaaaaaaaaagacaatatcagttgtatatgtcttgagcaaaagacaaatatagttgactcctgaatggcctgtgtttaaactgcgtggatctacttatacataaattttattttttggaggttcttaaaaaaaaactaattttaacttttattttagaatcagaggctacatatgcaggtttgttacatgagtttattgcatgatgttgaggtttgggctatgaatgatcctgtcccccaggcagtgggcatagtatccagtaggtagtttttcagctctggccccacaccctctctcctccctctagtagtccccagtgtctatttttatttttattattattttttattttttgagacagtgtctttctgtgtcacccaggctggagtgcagtattgcgatcttggctcactgcagcctcaacctctcgggctcaagtgattctggtgcttcagccttccaagtagctgggactacaggcatgcactaccaagctgggctaagtttttatattttagtagagatgaggtttcatcgtattggtcaggctgctctctaactcctgacctcaggtgatcgacccacctcggcctcccaaagtgctgagattagaggcataagccactgcgcccagcccccagttctattgttcctttctttatgtccatgtgttcccaatgtttagttcccacttataagtgagaacatgtggcatttattttctctggggtatataactggtaatgggattgctgggtcaaatagtaagttttgttttaagttctttgctaaatctccaaactgctttccacagtggctgaactaatttgcattcccatcaacaatgtgtaattgttctcttttttctgcagccttgccaagatctgtaattttttggctttttaataataaggccattctagctggtatgagatgggtatctcattgtggttttgatttgcattctcgggtgattagtatacatgaatttgcttctgcctttgccacccctgagacagcaagaccaacaaccccttctcttcctcttcagcctactcagtgtgaagatgatgtaagtatattttttacttataattttcttaacattttcttttctctagattatcttattgtaagaatacagtatataaatatatgcagcatacaaaatatgtgtt

SEQ ID NO: 12233 - DNA, 2300 bp, Homo sapien
ggtcacctcattgtcgtgcagaatgaggtccaaggagatacagaagaacttgagatggaggccatgatgtgggcgagtgcagggctggtgctgcctgacatggtgctagtcacctgatgaagtgagggtctcaccccagtgtggtcttggcttcctcataagaaccgagaaccttggtggcagctgaggagagagcttttatttcttaacatttcacttaagaactaaatacttttagtatgtttggtgagggaagttattttgagactggacgatttttagtgtaggaactatggttacatatgttttttagtggtttttatcactgggacaaattgaagctttctcttccaaggcaaaggagttatgtgtagcatactaggatcatctgctcagatgaacatctttttttctgcccagagattttgatagtccataagagagtaataagtgaatgtctgtttgtattgggggatagttggtatatataccttatatatataatataagattgttcatgtaggtactttgaaaaaactttctaagtaattctggtgcaactcctagttgagaacatttaccctagaagatgatagataagcctggcataaagttgacagatgtaaaatcagactttagaggcttccaggtagaccaaaatgaagaagaaaggaagagatttttgagggtgagtctaatttgaaacttggcagactgaggtagtggtgctgcagttaactaagagaacatactaggggaatttgcaggtttaaatggggaggataatgagtaatgaatgcgttagtcaatgaatagtgaataagatttgagaaggtagagaaagttgaaatttgttctttttcttctgagacaagagtctcgctctgtcacccaggctggactgcattggcacaatcttggctcactgcaacctccgcctcccgggttcaagctattctcctgcctcagcctctcgagtagctgggactactggcacccgccatcatgcccagctaattttggtatttttgtagagacgtggtttcactatgttggccaggctggtcttgaactcctgacctcaggatatccaccttcctcggcctcccagagtgctgggactacaggagtgagccaccgtgctcggcctgaagtttgttcttttaagaggtttgttgaaggtaatgaaggaggagatagcatgggaatttgagagagaactgagttaaagagatgtactttaggaggaaggagaaaggaaagagactaaagagggtgagttaaagcaagagtgagatgaggaaagtcaggtttaggaagacatagtagggattccttcaggagcacaggaagcggagtaccttagagaggagaatcatgtttccatgagacaggagagaaagtgaaccagttgaaatctctgtgctttagtttttttcaattgtaaaatagagatagtaatagtatataccttatagtgtagtcatgagaattaaatgaattgtacatttaagcatttgctactattaatgttattattaaattatgaatttatttagaatagtttactgttctgattgtagagtaccttttacttatataatgcatatgaagcacataaaacatcttcctttttttttctttttttttttttttttgacacggagtcttgctctgtcacccaggctggagtgcagtggcatgatcttgcaatctccgcctccttagttcgagcgattctcctgcctcagcctcccgagtagctgggactacaggcgcatgccaccacacccggctaattttttttttctgtatttttagtagagaccgggtttcaccatgttggccaggatggtcttgatctcctgacctcgtgatctgcctgctttggcctcccaaagtgctgggattacaggcgtgagccaccgcgcctggccaatttttgtattttttagtagagacaaggtttcaccatgttagccaggctgcttgaattcctgagctcaggtgatccccctgcctcagcctcccaaagtgctgggattacaggtgtgagccactgaggccggcctagtttttttttgtttgtctgagacagagtctcgctctgtcacccgggctggagtgcggtggcacgatctcagctcactgcaacctctgcctcttgggttcaagcgcttctcttgcctcagcctcccaagtagctgggattacaggagcataccaccatgccttactaatttttgtatttttagtagagttggtgcttcaccatgttagccaaggttggtcttgaactt

SEQ ID NO: 12234 - DNA, 2300 bp, Homo sapien
atctcctgacctcgtgatctgcccacctcggcctcccaaagtgctgggattaccggcgtgagccactgtgcctggccaggaatgatgagtttttgaaaagacttcattgagctggatggtaaagatgcctttctgggaaccatgaaatgaatgaatctaccaaaggtactatgctttgatttattcctcgctggattccaggatttctgtggatcttctcatcaatgttgctatggtctgaatatttgtgtcctaccaaactcataggttgaaatcttaactgctaaggtgatggtatagggaggtagggcctttgggaggtgaacaggtcatgagggctggcctctcatgaatgggattagtacccttgtaaaagagaccccagagagctagccagccccttctgccatgtgagaacaaagaaggcaccatctatgaatcagaaagcaggtcctcaccggacaccaaatctgctggcatcttgatcctggacttctcagcctccaggacagtcagaaataaatttctgttgtttatgagctacccagttgagggcatttgtgttagcagcctaaatggactaagatctttttatcctactcattcttagatcttgtcgcttttggtgggtgtacttattccacctttataacaacacctctgctgtgtgctgttaagaatcttcattaaggtagcaccttgaacctactttatttggaagcctacactaatttttggctttcgattcccattgccctcttcaggattgtattacaatttgacaagcaaacatcctcttccaccttccaaaacaactttagtacacacattatagaaagggaaatatgtttggtgcttttttttttgagacagtctcactctgtcacccaggctggagtgcaatggcgtggtctcggctcactgcaacctccgcctcccgggttcaagcaattcttctgcctcatcctcccgagtagctgggactacaggagcgtgccaccacacccggctaatttttgtatttttagtagagacggtgtttcactatgttggccaggctggtctcgaactccttaccttgtgatccgcctgcctccgcctcccaaagtgttgggattacaggcgtgagccaccgcgcccagcctggtgctgctgtcttatttctcatgaatatgagctttcaaggacagggacttgatctttttttccattccataaaatgttgatatggctaaactttgcaggcttttaggcgttgtcatatatgcaattaattccatgggcacttaatttcattcccctcactgaaggaaggggttgtctgagaccaccaagctctaatgtcttaccaatctgttgctttctcattttgttcaacttttttcttggaaagaaaaacattgaacatatcaagatgaatcagccaaatattgtactgtgtgtgtgttttgggggtggggggagacagagttgaagtggcagaggcaatgtaggaggaaaagacaggctgactaaaatacataaatagtacgtgaattctttcgggccagggatctgggcctactttgcctgcatcatattaccagcatctcaattgtgtctggcacatagtaagtttcagtaaacatttgttgcactaagtgaaagaatgaacttttcacttttttcagagatgtgatttgtgattctcggaatcaaccagggtcctaagatgtcctggaggccgtctccatttctctcggtgagctaaggtgtccgagtggcaccagttctccactctttctgcgacctgcagggagtgggatacgctgtggctttagggagctgggaaaggcgctctctcccggtcccgctctgcccggtcccacgcccctcggccgtccggctgcctgggtcttccgggttcttccgcccctctggctcggtccccgctacctctcctccctcctcccctctcggtaccttcgcccgccgcgcgcctttctcaaatcctccggttattaagcaagctcaggggtccggtggcctgccctggtaactctgcgcccgccccttcctgcccccttcctgccctcacgccccgtcccctcctcttgacgtggcagaggcggcgccagccatgttggccgggcggaggtcttcgctgaggcccggggcggggtggcgccacccctgattgcggtgccacggactgctcctgctgggcggagaggacagattttgcaaagcggaggctgcgacgggtcctgcagggggacagtgaggaaagggccgcctcgtctccgctcctgggggaccgc

SEQ ID NO: 12235 - DNA, 2300 bp, Homo sapien
taataatttacagtaaaaaataaaaattaaaaaaaatgtatttgtggcctggcccagtggctcacacctgtaatcccagcactttggtaggccaaggtgagtggatcacttgagcccgggaggtcaaggctgggtaatattttattttattttattttattttatttttttgagatggagttttgctcttgttgcccaggctggagtgcaatggcacaatctgggctccctgccacctccgcctcctggattcaagcgattctcctgcctcaggctcccaagtagctgggattacaggcgcccaccaccatgcccaggtagtattttgtatttttaccaaagacggggtttcaccatgttggccaggctggtctcgaactcctgacctcaagtgatgtgcccagctcggcctcccaaagtggtgggattacaggcatgagccactgcgcctggccaagattctttacggatgcaaaatttcctccacaaagaacagctttgcagggccatttcaaaatacggcaaagaaacatgttttggggtcaaatatttttattttcttctttgtctcgtaatgtcatttcgaagtgaggttgaaaagtaaatcgtgatatatagggttaaataaaacccatctgatgagaatttatgatttgtagggcatgactccccagaccccttagataggaatttgggcaaaataaaaaaatcaggccgggcgcggtggctcatgcctgtaatcccagcactttgggaggccgaggcgggtggatcacgaggtcaggagatcgacatcatcctggctaacaaggtgaaaccccgtctctactaaaaatacaataaattagccgggcgtggtggcgagtgcctgtagtcccggcggctactcgggagcctgaggcaggagaatggcgtgaacccgggaggcggagcttgcagtgagccgagattgcgccactgcactccagactgggcgacagagcgagactccgtctcaaaaaaaaaaaaaaaaaaattcagtttagtcctcacgtcactacttactttttcaaatttgtccttgattatcaccaaaatgttggacgacaggagtatttctccctattctaagtctgtttttcccaaaaccagtgaaaatttgttaaccaaataactgtagtttgcagccaggtgatatctttccaagtgtcccaattgtttagttacagttcctaagcattaagtacttaaataagctaaggactatcctcactttatcttcaatttagacttacatcctggtttgaaatcaattccttgcaaactaaaggcagtgccataaataaaaatttttaaccttctaaaataaacatcagtgttagaaaataagtcaattgtattcactcaattgtatttgtttagaaataatcagatattatacttgtttcttgcacattcttgccttgtttcctcacctatgaaatggagataataatactatctacctaacaagattgacctaacatttttgttaatttctgggtgttagcattagtttcatttttttcactatttgtatttaaacgaagagatttttctttaaaacaaaaattaaaaagtgctggctattctaggagtaatattcattccaaataaacatacagtgatctttgaagtggtcaagcactagaaatttctgtagaaaattaatttttcattcatttggcatcgcataaatctaggttggaattggttcttcctctttggaaggtcagtccctgccctaagagagcggtatattaccacccacttcacaagactgttctaagaatcaaatgagaaaatgtgtttatgaagagtttaagaatttagagctccatgaatgataattacagtaatattgttcattaattcaaaaaacatttttaaggatccctcactactagggatgcataaaagttgctaaccctcggcctttacccagcgttagaagacaaaacagagggtaaaagtcccagaaacgcgttcgaaccaattcagctaggaattaaattctcagatcctttattacaccaccggagccttaaccttgaggcaagcagcaatttgttcatgcgcagttaacgctccctaaactgccacttgctcagctccgcgcctaaggtgtctattagtacgcctgcgctgtgacctagaatgggcgcatgcgccgagcggaactggctggtttgaaaaccatggcgtgggtaccagcggagtccgcagtggaagagttgatgcctcggctattgccggtagagccttgcgacttgacggaaggt

SEQ ID NO: 12236 - DNA, 2300 bp, Homo sapien
cctgggcaacagtgagactctgtctcaaacaaaacaaaacacacacagctgggcacagtggctcaagtctgtaatcccagcactttgggaggccgaggcaggcggatcacctgaggtcacgagttcgagatcagcctgaccaacatggagaaaccccgtctctactaaaaatacaaaatgagctgggcttggtggtgcatgcctgtaatcccacctactcgggaagctgaggcaggagaatcacttgaacccgggaggcggggttgcagtgagctgagatagtgccattgcactccagcctgggcaacaagagcaaaactctgtctcaaaacacacacacacacacaccacactcactgtccttgcttccataggatctattcctaggagccttggcaatttaactttatggagaaggataagtaggatgctgtgttcaatagttagtaggtcctcattaaataagtttcctttctatccagaaacgtactttaaaagcctcatgttattgtggttggagaagtcaactttgataaattggccatttacttactttttgacttgtgtggtggacttggactcctttttcttgatggtagtgatgagggcaagaatgtcatctagacataaaggacctgatttcgcataactgaaaatttagtgctggaaaaattaagattaccatggcaaaatactcttcaaaattacacaatttagtgttttcaaaggcttaagtggagcttttatgctggatttacgtgatgaatggaataaactgattcaaacattagaagggacatgcttaaaaaaaaaacctaccacaattaaaattttggaacatgatcttaaattcctgtgaaagggcatgaagagtttgtgtgtgtgtttcgttttttgagacgaagtcttgctctgtcgcccaggctggagtgcagtggcacaatttctgctcgctgcaacctctgcctcccaggttcaagtgattctcctgcctcagccccccgagtagctgggattacaggcacctgtcaccacgcccggctaatttttgtatttttagtggagacgggttttcaccatgttggccaggctgctctcaaaactcatgacctcgtgatcccccccaccccccgtgcctcggcctcccaaagtgctggattttacaggcatgagccaccttgcggtatgttaatttgggggaaaacaacagggacaattggggaaaaattttgttttgtgaattaccaatggaagaactaatcacaggctaagcaacatgcttacggttgaatttgccaaatttaagatgtacatactatgatgtagcatgtgtatttatttgcacatgcagtgggacaattcctacagttgtctcacactgctgtagattattagcaactccatcctgcagtgacatcgcttttctgaattctatagcacttttcacctaatcctctgattagtctgtattttccggttcaagtgtatcttgtttttcgtttgctccacttcccttgtcccttgcaccccactaacaggaaaattcctggtggtcaaaatggctctaattctttttgtatacccgggcttaattcaataggaattgggataacttttcaatatttaaaaaatttgcactgtgaaaacgtatattttaaactctttctacaacttttcatatttgaagaacatatggcaggaagtggatgcttttgatgaagccaaaagaatttttttaacttctattgctaattaacaaggaggtggccgcgggagctctttttttttttttttttttgagacggagtttcactcttgttgcccaggctggagtgcagtggcgcgatctcagctcaccgcaacctccgcctcccgagttcaagcgattctcctgcctcagactcccgagtagctgggattacaggcatgcaccaccaggccccgctaattttgtacttatagtagagacggggtttctcaggctggttcgaacttccgacctcatgtgatccacccgcctccgccacccaaagtgctgggattacaggcgtgagccaccgcgcccgggccaggcgggagctttaggtcttattttatcttgctctgcccccgacatcgtggtgagaggggaaccttcctcatatctgggcgctggcctctccgggcttgggagagaggaactcagtgatcatagagctggccgaatgccggggtagaggggaccggaagttgtttttttcgcccccgcccagcggccggatcgcatctcagctggttggctttggttagagctcccgtca

SEQ ID NO: 12237 - DNA, 2300 bp, Homo sapien
ttatttatttatttatttttgagacagagtctcactgctgcccaggctagagtgcagtggtgtgatgacagctcactgcagtctcaaactcctggactcaaacaatcatcccgcctcagcctctccagtacaatttttaaaatttttatttttagagacaggatcgttgctatgttgcccaggctggtcttaactcctgggctgtagcgattctcccacctcagtctcccaagtatctgggattacaggcacaatccactggacttgctcagagatctttattgtacactgatatacccaagtgcctagaatagcacctggcacatagtgggccctcagtatttgttgaactaatgaatgatcattgctcctttggaagcctacaaaccccacagaagcaggaatcacaactatcttgttctaggctttattttcaaaccctagcttactgctgatacacaatggaagctctaaaagattgctggattaaagtggtagcttgagttaattaatacactgggcccactaattctttgtacaaggaagatagatgcctggctgagattatttaaagcattgtttctgtgggaaagtgttttgtttttttgtttgtttgggacggagtctcactctgtcgcacaggctagagtgcagtggtgcaatctcggctcactgcaacctccgcatcccgggctcccgagtagctgggattacaggcgtacaccaccactcccagctaatttttgtatttttagtaaaggcggggtttccccatgttggccaggctggtctccaactcctggcctcaagtgatccacctgcctcagcctccctaagtgctgggattacgggcgtgagccactgtgcctggcctgtgaaaaaatgttttctgagcttcaatttgtatatatatttatagaacaaaactagttcctacattggcagtgcaggtagggcagaaccagaagcgggacaacacacacagacaccactaacaacagggccgctcccttaggtctggtcttaaccagctctaggccaggtgaagaggctaactcaaccatgactgcgtgtctgtctcgccattgctttcttttctctagtatagatgctcagcgtctaatcagagactgattctcaactggcgtgaccaaaggacagttatattatctccagtctcaatttccttatcagtaataacaggcattttatccacactttcagtttgtgagaaataaggcatgtagacggtttcacagagggtcgggaacaagatcaacccctaacaaacgttagccattatgactaatgacttttactagttttcatttttgtcttccctcttctcactttaacctaatcaggctgggcgtggtggctcacgcctgtaatcccagcaccctgggaggtcgaggcaggcgaatcacctgaggtcaggagttcgagaccagcctgcccaacatggtggaatccggtctctaataatacaaaaattagccaggcgtgttggcgcgcgcctgtagtcccaggtactcaggaggctgaggcaggagaatcgcttgaacccgggaggaggaggttgcagtgagccgagatggtgccactgcactccagcctggacgacagagcgagactccgtgtgaaaaaaaaaaaattaacctaatagaggaaagcacgcgcccaccccctctctgagcatgcgcaccaacagaatagccgcgccctttcctaattaaatcattaaccaaggtgagggtaaggaagaaaaggaggcttggctaagtcccactctgatgtgatcacgttaaaacggtgtaaggcacattacatcataggttaaaaggcctagaaaactccgcgctccccttgccagaactgcagactcgcgagcctaagtctccgagaactcagggattgtgaaacccgccccgactctgcgctagcagcgggatccaggcacccgcagctaactggggagggagatgactgcctggctgacttttcattggctcagagtcacaaaggctgcaggttcttcccccttccggtcgctgagtggttgaggccggaagacaacgctcatcgtcattggctgagcccggctgtcagtcctttcgcgcctcggcggcgcggcatagcccggctcggcctgtaaagcagtctcaagcctgccgcagggagaagatggcggtcgccgtgagaactttgcaggaacagctggaaaaggccaaagagagtcttaagaacgtggatgagaacattcgcaagctcaccgggcgggatccgaatgacgtgaggta

SEQ ID NO: 12238 - DNA, 2300 bp, Homo sapien
ctgggtatttgtcctatttgtgtcaggcactagaggggagtgtgacatcatacaagtgctgggttctgacctaagaatcagaagaccaactgtgtgctcactgatatgcccaaatacagtgaaaaagtacagcaaaggagggcttagacaaatattttcccaagaatgaaataggacaaccatggtttctgaaaatcgactgagacctacagttttacccaaaaatttccaatgtgggattttgatcctttttgagtgacggtaaccttcaaatgactggattttcatagctttattttagtatttatttatttattttttcattattgttatttttttgagatggactctctctctgttgcccaggctggagtgcagtggcgcaatctcagctcactgtaacctttgcctcctgggctcaagcgattttcctacctcagcctcccaagtagctgggattacaagtgcctgccacaacacctggctgatttttgtatttttagtagagatggggttttaccatattggccaggctggtcttgaactcctgacctcaggtgatcctcctgccttggctttccaaagtgctgggattacaggtatgagccaccgggcccggctgatttatttttttatttttattttttaattttatttatttatttttttgagacggggtctcgctctgtcgcccaggctagagtgcagtggcaagatcttggctcactgcaagctccgcctcccaggttcaggccattctcctgcctcagccttccgagtagctgggaatacaggcgcccgacaccactcctggctaattttttgtattttttagtagagacggggtttcactgtgttagccaggatggtctcgatctcctgacttcatgatccacccacctcggccttccaaagtgctgggattacagatgtgagccaccgcgcccagctgatttattttaaaataatatacgggccaggtgtggtgactcatgcttgtaatcccagcactttgggaggctgaagcaggaggattacttgagtccaggagttcaagatcagcctggccaacacagtgagacctcatctctactaaaaataaaatattagccagctgtgtcccgcatgcctgtggttcagctactcaggaaggggaggtggaaggattgctcaagcctgggaggcccgcctgggctagagtaagactctgtctcaaaaacaaaacaaaactaaaaaagacatatgctttcttttttaaaaaagaaagccaaacaatataggaaactacaaagaagaaaataaataccaacggaaatcacactgtatacttctaccatgtgggggggcacttattcagatatctctctttcattctctgtccacttaaagaaatatgcatacagtttttaaagcatggagtaatactctacctgctgtttctggagtagtattgttgtagacagagtgacctctttcaatggcagatgacttgattcttggtggtaaagcaagtggttggttataagtatggggtctcattgtgcctaggttaacatttcttttccactcatatgtgccattgagtaagtgatttaacccatctctctgtgcctcagtttccttatacacaaaagtggggacgataatattacctacctcagagagttggtgtgaaggttatatcagatcatatatttaagtacttacttaagacagtacctggaacatagtaagtacttactacatttcaactattgttcttaactaaataagttttaacttcatagtaacaataaggggtttttaaatagaaaagtggaatctttttaaaaatacttttcaccatatttcaaagccattcttttaacataaattattactctttttgcacacagctatatacgttatccactgaaattagtatttgcaggtaactacccttttgcggaggcctacttaaaaactatcctgttgaacacaaggtacctttaagtgagacagttttacatgggcttcctttataacacattagtccaactaaaaatccttgttaattattaaacccttaggtattacaggaatacctgacactgcagattgaaaacagacagtgtttgtctctcaagttaaaccaacaagccgatagaaaaaggtagttatcaagagatttttaaaacttcaaccctttttctcttatagttagtgaagagagtagaatatctccagttttggctgacatctctacaacctgaacaattggcttaaacttcacttgggattcccggttgcttgttttagca

SEQ ID NO: 12239 - DNA, 2300 bp, Homo sapien
ctagctaaccttttttttttttaaagacaggatcttgccttgttgcttaggctggaatgaagtggtgcaatcatggctcactgcagcttgacctcctgggctcaagcagtcctcctgccttggcctcccaaagtgctggaattacaggcataagccactgtgtccagcgttttggtgcaacttttaacaaggttttcatgctttagagcagaggtgtccaatcttttggtttccctgggccaccctggaagaagaagaattaattgtcttgtgccacacataaaatacactaatatagctgatgagctaaaaagaaatattgcaaaaaaaaaatcccatagtattttttaaaagtttatgaatttttgttgggccacattcaaagccatcctgggctgcatgcagcctgtaagctgcaggttggacaagcttgctttagagtctctggtctgtctgagctataaccatatgctgtgaaattcccctcttagtcaatgttgtgctgctataacagaataccagagactggataccttacaaagaaaataaatttatttctcacagttctgaaggctgagaagtcttcttgatgcaacatctcatactggaaggcaagatggggagaaagcgagagagagagagcaagacaggcgctgaactggtggtccttttataagggaacccactcctgtgataacaagcccgctcatgtagtaatggcattaatcccacccattctgcccttatggactgatcacctctcaccaggcctcacctgtcaacaatattgcatttgggattaagtttccaatatatggtttttggggacacagtcaaaccatagaaccctacctcaaatcaaggcaaacacacatgtgttcagtcagtgtgttcttaggaggtacaagattttgtggatatgcatgccttttcatcagattttgtttgcagaatacactgaaagcattgattgcctctgcttctcaaacatttcaattatttttaaaaatttttatttatttatttatttatttatttattttgagacagagtctcactctgtcacccaagctgaaatgcattggtgcgatcttggctcactgcaacctctgcctcctgggttcaagcaattctcctgcctcagcctcctgagtagctgggactacaggcgcccaccaccatgcctggctaatttttgtattttttagtagagatgggtttcgccatgttggccaggctggtctcgaactcctaagctcaggcaatccacccgcctgagcctccctaagtgctgggattacaggcgtgagccaccatacctggccccaaaattccaactatttaataacaaataaatcataatgggcctggggcagtggctcacatctgtaatcccagtgctttggaaagctgaggcaggatgaatgcttgaggccagaagttcaagttcagcctgggcaacatagcgagactctatcttcacaatttttaaaaattagctgggtatagtaacagctacttgggaggctgaggagggaggattgtttgaatcctggagttcaagcaagctgtgagctctgctccagcctgggagcagagcaagaccctgtctctaaaaacaaacaaagaaacaaaaaaccataatgtaaaaggtttttcatttaggtttacataattagccttgaagtcagttgtgatacaagtgtttgagtttttgctctgctgttgagctagtcatgtgtcttgggaatatcacaatcatccattttaaatgactcagggagaaacaaggagctctagtacattcatgttaatcatatatatattttttccttttaggaatctgactttctttgtcttcttggagtaagttacacatttgacaatgaagatagtgaattaaacggtgattatggtgaaaatatatatccttatgaagaagataaagatgaaaaatctagtatatatgaaagtgattttcagatagaacctggattttatgcaacttatgaaagtactttgtttgaagaccaagttccagcattagaggctcctgaagatatcggaagtaccagtgaatcaaaagactgggaagaagtagttgttgaaagtatggaacaggatcgtattccagaagtgcatgtcccaccatcttcagctgtgtctggagtcaaagaatggtttggattgggaggagaacaagctgaagagaaggcttttgaatcagttattgaacctgtacaagaaagctcatttcggagtagaaaaatagcagtggaagatgagaatgacctagagga

SEQ ID NO: 12240 - DNA, 2300 bp, Homo sapien
caatacctagtttattgagagtttttagcatgaagggctgttgaattttgtcgaaggccttttctgcatgtattgagataatcatgtggtttttgtctttgtttctgtttatgtgatggattacatttattgatttgtgtatgttgaaccagccttgcatcccagggataaagccaacttgatcttgatggattgttcttttttttttttttctaaattttttgtagagacgagagctcactatcttgcccaggccagtctggagctcctgagctcaagggaatccttctgccttagtctcccagagtgctaggattacaggcttgagccatcatgcccagcatctttcttttcttttctttcttcttttcctttcctttcctttcctttcctcttattttctcttttcctttattttccttccttcctctctctctctctcttttttttttttttctgagacagagtttcactcagtcaccgaggctggagtgcagtggtgtgatctcagctcactgcaatctcggcctcctgggttcaaatgattttcctgccttagcttcccaagtagctgggattacaggtgcacactaccatgcccagctaattttttgtattttttagtagagacggggtttcaccatgttggccaggctggtctcgaactcctgacctcgagtgattcgcccgccttggcctcccaaagtgctgggattataggtgtgagccaaccacgcccagcccttcctttctttcttatttccatgtttattttggattcaaggggtacatgtacaggtttgttacaagggttgatttcgtgatgctgagatttgggcttctattgattctgtcatccagatagtgaacataatattcagtgggaagtttttcagtccttgacctgctcccttcctcatttttgagtccctagtgtttatttttctcatctttatgtctgtacgtacccaagatttagctgccacttataagtgagaacatgtgatatttggttttcagtttctacgttaattcgcttaggataatggcctccatctgcatccacgttgctgcaaagaatgtgacttcattttttatggctgcatagtattccatcgtgtatatgtaccacattttctttatccaatgcaccgttgatgggcacctagggtgagtccatgtctttgctattgtgaatagtgctgcaatgaacatgagagtgcacgtgtcttttgttagaacaatttactttctttgggtatatacccagtaatgacattgctgggtcgaatggtggttctatttttaacactacttttttttctattttacaattgaggagcctctttgagttctaatgtttatatattcttaagtagaatgcttcatttattcacagaatatacaatggaaattatccagctattgttcaacaggtagttcctgattcaatatgttctgagaacaactcttacatcactagtacagagattaaagatgtggctccacaattttgattttcttccaaaagagtaaatcttaaagtctgtgacactgcctgtttaattaaaagggagtaactagtacttacagctttgcaatggagcccttcataagggaaatcagtgtctaggttgtgaacaaagtttactggttagcatgtttccgatgttcttggatgttttctagtatctatcacaaacactaacagcatttgttctaacatctgctttaaaacaggtactatataagaccaaaaaattcccatgtctacttatggaggacagtctttgaatatcttttaaatgatagagatcatgtactctatatgaataggctatagaataaaacattttagtttttatcagttatcaaattcaggatttttcttttcaattatagattgtaagagggtagtaatatgtacattttaaaaaacatatataggtgcatatgtatgtgtgtgagtatatatatatatatatacttaacaacgagtgaggtccatgaaattgggttatgggttggtagtcacaactccacctgtagcacccctttaccacacaaatgtcaaaacgggatcacagtgtggaaacagaagagtgcaggatatattagaatctgaaatctttctcaaggatatgaggtgcctggtagaactttatttacatgttaggaaattttaacatgagcttttcaagaaatggaattgaaaagtccagaggaagaggtgagtttataactattaagcatactgaaacaaatgaggtttggaattttgcactaagtttgttaagctt

SEQ ID NO: 12241 - DNA, 2300 bp, Homo sapien
cctttattttccttccttcctctctctctctctcttttttttttttttctgagacagagtttcactcagtcaccgaggctggagtgcagtggtgtgatctcagctcactgcaatctcggcctcctgggttcaaatgattttcctgccttagcttcccaagtagctgggattacaggtgcacactaccatgcccagctaattttttgtattttttagtagagacggggtttcaccatgttggccaggctggtctcgaactcctgacctcgagtgattcgcccgccttggcctcccaaagtgctgggattataggtgtgagccaaccacgcccagcccttcctttctttcttatttccatgtttattttggattcaaggggtacatgtacaggtttgttacaagggttgatttcgtgatgctgagatttgggcttctattgattctgtcatccagatagtgaacataatattcagtgggaagtttttcagtccttgacctgctcccttcctcatttttgagtccctagtgtttatttttctcatctttatgtctgtacgtacccaagatttagctgccacttataagtgagaacatgtgatatttggttttcagtttctacgttaattcgcttaggataatggcctccatctgcatccacgttgctgcaaagaatgtgacttcattttttatggctgcatagtattccatcgtgtatatgtaccacattttctttatccaatgcaccgttgatgggcacctagggtgagtccatgtctttgctattgtgaatagtgctgcaatgaacatgagagtgcacgtgtcttttgttagaacaatttactttctttgggtatatacccagtaatgacattgctgggtcgaatggtggttctatttttaacactacttttttttctattttacaattgaggagcctctttgagttctaatgtttatatattcttaagtagaatgcttcatttattcacagaatatacaatggaaattatccagctattgttcaacaggtagttcctgattcaatatgttctgagaacaactcttacatcactagtacagagattaaagatgtggctccacaattttgattttcttccaaaagagtaaatcttaaagtctgtgacactgcctgtttaattaaaagggagtaactagtacttacagctttgcaatggagcccttcataagggaaatcagtgtctaggttgtgaacaaagtttactggttagcatgtttccgatgttcttggatgttttctagtatctatcacaaacactaacagcatttgttctaacatctgctttaaaacaggtactatataagaccaaaaaattcccatgtctacttatggaggacagtctttgaatatcttttaaatgatagagatcatgtactctatatgaataggctatagaataaaacattttagtttttatcagttatcaaattcaggatttttcttttcaattatagattgtaagagggtagtaatatgtacattttaaaaaacatatataggtgcatatgtatgtgtgtgagtatatatatatatatatacttaacaacgagtgaggtccatgaaattgggttatgggttggtagtcacaactccacctgtagcacccctttaccacacaaatgtcaaaacgggatcacagtgtggaaacagaagagtgcaggatatattagaatctgaaatctttctcaaggatatgaggtgcctggtagaactttatttacatgttaggaaattttaacatgagcttttcaagaaatggaattgaaaagtccagaggaagaggtgagtttataactattaagcatactgaaacaaatgaggtttggaattttgcactaagtttgttaagctttactgtgtttttgctatggggggaacttggatttttctttttttttcattttatcctctgtccttaatatttttaatatttggagtggtaattactgaaaattggagagggacatagagtgacttagggagggcaaagggaggttttttttttgtttttgttttttgaaagttctaaaacctgaaaattattctggagtcttccgaaaatgttcagacacatttaagaatttttattgagtaatacaatgttctaattgaggcatacacgttgttctaggagtctgtgaaattctaaagataaaagtttgattatgcttgttttgactttaatgaactattcacataattttaatacacagtgtctaacacgtatgaaagttgtgtaataccttataccttaacaatg

SEQ ID NO: 12242 - DNA, 2300 bp, Homo sapien
gcttcatttattcacagaatatacaatggaaattatccagctattgttcaacaggtagttcctgattcaatatgttctgagaacaactcttacatcactagtacagagattaaagatgtggctccacaattttgattttcttccaaaagagtaaatcttaaagtctgtgacactgcctgtttaattaaaagggagtaactagtacttacagctttgcaatggagcccttcataagggaaatcagtgtctaggttgtgaacaaagtttactggttagcatgtttccgatgttcttggatgttttctagtatctatcacaaacactaacagcatttgttctaacatctgctttaaaacaggtactatataagaccaaaaaattcccatgtctacttatggaggacagtctttgaatatcttttaaatgatagagatcatgtactctatatgaataggctatagaataaaacattttagtttttatcagttatcaaattcaggatttttcttttcaattatagattgtaagagggtagtaatatgtacattttaaaaaacatatataggtgcatatgtatgtgtgtgagtatatatatatatatatacttaacaacgagtgaggtccatgaaattgggttatgggttggtagtcacaactccacctgtagcacccctttaccacacaaatgtcaaaacgggatcacagtgtggaaacagaagagtgcaggatatattagaatctgaaatctttctcaaggatatgaggtgcctggtagaactttatttacatgttaggaaattttaacatgagcttttcaagaaatggaattgaaaagtccagaggaagaggtgagtttataactattaagcatactgaaacaaatgaggtttggaattttgcactaagtttgttaagctttactgtgtttttgctatggggggaacttggatttttctttttttttcattttatcctctgtccttaatatttttaatatttggagtggtaattactgaaaattggagagggacatagagtgacttagggagggcaaagggaggttttttttttgtttttgttttttgaaagttctaaaacctgaaaattattctggagtcttccgaaaatgttcagacacatttaagaatttttattgagtaatacaatgttctaattgaggcatacacgttgttctaggagtctgtgaaattctaaagataaaagtttgattatgcttgttttgactttaatgaactattcacataattttaatacacagtgtctaacacgtatgaaagttgtgtaataccttataccttaacaatggagaattactaagcaattttggctactctgatattagcatttcctgaaactcctcaggctgatgtggcaaaggagaaatagcaatcttgagttctgaaaagctaggccgcattttggtcctgaaaaatcacttgctgtgaacttgggccagtttttgattttttaaatggcataacagttcgttgctacaagaggttacatcaggaaaatttcctaaggatttaagattttgttcatctattgagttcttttgggtgatttgtttaggaggaagtatctgctcctttttgagttgcttcaccaaagtacttgagtgagaaggcagaatataatgagaatgatcatgctggcaaggaagacatatatatgagatgggttatcctttacacctacgtcagctaaaaccgtctcctacgaacaaatccagcacttggcactttattcgacggtcctaaaaatagagtcctaaatttagaaggcaaggtgctacttttagctcctcttctcggaggaaaacagcacgcaccgcgccaggccaaggtccacggggatttgatttagcatttgggtaactggccgctaatggaactgaagacagctgggcctaacaagtgcccaggtgactcaggtaagcgaggaaaccagatcgaggttctcttgcgtgggacaggttaaactctgaccaaaccacagctgagccgggacgccttcctgtctaaagtccaaagtccggacgtggttggcagggcgcaccggcgcgtgccccgcaggccatttttctgactggaatgacggcggcggctggcttctcggggctgccggggtctcccggggtacgccgccgtcaggacttctgcagggcgcagacagcaggctccagcgaggctgcggaaggaaagccttgggtgtcggggctgggcctggcgtcggcccctgggtcgggggggtgggggttgcgccgagacgcctctagg

SEQ ID NO: 12243 - DNA, 2300 bp, Homo sapien
ttcttttcaattatagattgtaagagggtagtaatatgtacattttaaaaaacatatataggtgcatatgtatgtgtgtgagtatatatatatatatatacttaacaacgagtgaggtccatgaaattgggttatgggttggtagtcacaactccacctgtagcacccctttaccacacaaatgtcaaaacgggatcacagtgtggaaacagaagagtgcaggatatattagaatctgaaatctttctcaaggatatgaggtgcctggtagaactttatttacatgttaggaaattttaacatgagcttttcaagaaatggaattgaaaagtccagaggaagaggtgagtttataactattaagcatactgaaacaaatgaggtttggaattttgcactaagtttgttaagctttactgtgtttttgctatggggggaacttggatttttctttttttttcattttatcctctgtccttaatatttttaatatttggagtggtaattactgaaaattggagagggacatagagtgacttagggagggcaaagggaggttttttttttgtttttgttttttgaaagttctaaaacctgaaaattattctggagtcttccgaaaatgttcagacacatttaagaatttttattgagtaatacaatgttctaattgaggcatacacgttgttctaggagtctgtgaaattctaaagataaaagtttgattatgcttgttttgactttaatgaactattcacataattttaatacacagtgtctaacacgtatgaaagttgtgtaataccttataccttaacaatggagaattactaagcaattttggctactctgatattagcatttcctgaaactcctcaggctgatgtggcaaaggagaaatagcaatcttgagttctgaaaagctaggccgcattttggtcctgaaaaatcacttgctgtgaacttgggccagtttttgattttttaaatggcataacagttcgttgctacaagaggttacatcaggaaaatttcctaaggatttaagattttgttcatctattgagttcttttgggtgatttgtttaggaggaagtatctgctcctttttgagttgcttcaccaaagtacttgagtgagaaggcagaatataatgagaatgatcatgctggcaaggaagacatatatatgagatgggttatcctttacacctacgtcagctaaaaccgtctcctacgaacaaatccagcacttggcactttattcgacggtcctaaaaatagagtcctaaatttagaaggcaaggtgctacttttagctcctcttctcggaggaaaacagcacgcaccgcgccaggccaaggtccacggggatttgatttagcatttgggtaactggccgctaatggaactgaagacagctgggcctaacaagtgcccaggtgactcaggtaagcgaggaaaccagatcgaggttctcttgcgtgggacaggttaaactctgaccaaaccacagctgagccgggacgccttcctgtctaaagtccaaagtccggacgtggttggcagggcgcaccggcgcgtgccccgcaggccatttttctgactggaatgacggcggcggctggcttctcggggctgccggggtctcccggggtacgccgccgtcaggacttctgcagggcgcagacagcaggctccagcgaggctgcggaaggaaagccttgggtgtcggggctgggcctggcgtcggcccctgggtcgggggggtgggggttgcgccgagacgcctctaggagaagtctcgccgccgccgccaccgcggccgcccgaggcgggtgcccttgggacatagccctggtctttggggttgtgcggctcacacgacagcgcggagtatgaggccgaatctcatcctctagtcccaagcctctccactaccagggctgggtggcttcgccaggtagagcgccggcccctttaagagcaaacgacccggacacgtctgcgaagcttgcgcgaagaaggggaagtttgcggctgtccgcgcctccccgccttctcgcggctgcccggccgaaaccaaaccgaggggtggggtggcgaggacagggtacgtcgcaggcttgtgcgggtcgggctcggacctgcgctgcctcgggatgtaaagtataacaagagggtcgggatgggcagcgtaggcctgtgaggcctgcgggtgcccctgtcccccagctccccccgcagccggctccgcagtggtccactccggttgccgggtgcggattcgggttccggacc

SEQ ID NO: 12244 - DNA, 2300 bp, Homo sapien
aaatttaaagcggaacaatgttgtgccatcctagcccccaggccagggtactcgcatttagcaaaaaaaaaaaaaaaaaaaaaaaaactgtgcaggtgaagatacaacgcaccagactagagaaaactgcaaaatctggctgcatttctccatgtatttctgcatttctccatgtacactggcagtcctataaaaactaaatcttgattattattgtttttagtgaagaaagggaaatatgcttctctttctaaaaaccctacctccatgaataagttaccacagccagaaacctgggagtccttctagattccttctctctcacccttcacatgcaatcaataaagtcaaacatattttagctcttagaggctatttctccacacagtaccctctttcctatccttactactgtcacctctcccttaatccctatttcaagttttgtttccctaacatctaatctacatgctactatcaagaagagcttaaattttaaaccacaagtctaaccacggaaaagccttcaagagctctccaacacctacagcacttggaacctacttacatctccggcaagcatcattgcccatcactccctaagcccactttacactctaagtaatacagctcctagttccctgcactgtgtgtgtatgcttaggtaagcacttcatcagtttctactttgtactatttttttttttgtcttctctctcttaacagacaacatgatgctagtggccaaaactaagtcttagtccatttagaatctccataaaggtgctcttttcatattaaatacatatatatgcgtatgcattagacaaactatgaactcataaacaccatggcaacactacctttaattcacctaacaagaaaacataatcgtaactgcctcaataattaagtggtctttttaaagatttaatccagtttttaaaaacacggcgacataaatgcccctacacatgtcaacaaagatacctagaaacacttaaggagaaaaatctctacaacttgattataaactagacctgaaaaataaaaaacaaaatttgaacactgggagtttactatctctagactgtacattaacaagacagaagcgaagaacaatctcactcatggtagagcatctcaaaagggcattcattctttaccaaaaaaaaaaaaaatgcagaatcaaaatttcaactccccgcccaacctcaggtgttctttcaaggttcaacgagaagttacatcagtaaatgtaactaatttaaaggaacagtcctcaagtttctcacagtcgaaggaaccacgtgtctctgctcaaaataaacaacatagcggaaaggctaattagttttaggaatcgggaaacatttacatctttgcaaagtccagctaagcaagtgctttcttcaccttcccagagccccaggtcctcctccatcacacaaaaaccactcaagcgccctacgagcctaactactgcctcgaacacgggcgggagccgggcagcagacgaggactggcttcgggacctctgaccacggcggcttagaccccaaagccggtctactgcttccttcccccggcggctcccgcgacccctgggccacgtaacactcatcgcgcctgggctcaccctgcgtagctcctccaggagcagccccaaatacggttgaggggtaaccccgggctcctccatagcgccaaagctgctctcgtggtcgccacagtaaccccggcctgtcggggccacaataaacggcggagaacacacagccttcggtccggaacccgaatccgcacccggcaaccggagtggaccactgcggagccggctgcggggggagctgggggacaggggcacccgcaggcctcacaggcctacgctgcccatcccgaccctcttgttatactttacatcccgaggcagcgcaggtccgagcccgacccgcacaagcctgcgacgtaccctgtcctcgccaccccacccctcggtttggtttcggccgggcagccgcgagaaggcggggaggcgcggacagccgcaaacttccccttcttcgcgcaagcttcgcagacgtgtccgggtcgtttgctcttaaaggggccggcgctctacctggcgaagccacccagccctggtagtggagaggcttgggactagaggatgagattcggcctcatactccgcgctgtcgtgtgagccgcacaaccccaaagaccagggctatgtcccaagggcacccgcctcgggcggccgcggtggcggcggcggcgagacttctcctagaggcgtc

SEQ ID NO: 12245 - DNA, 2300 bp, Homo sapien
gttcagctgggattccaggcatgtaccaccacgcccagccaatttttgtattttcattagagacaaggtcttgccatgttggccaggctggtctcgaactcccgacctcaagcgattccccccgccttggtctcccaaagtgccaggaccacaggtgtgagccaccgcacctggccttacatagttttctacttctgttgttcataagctgtatggtttgatcataaaactggagaaggttctctttagatttcagttaaggaatatttcttaactgagtagatatcttcagggcagtgacttaccctggagcatttaacatgttgactaaattaactggtttgagacatgtttatattgtaattatcatctctataaaatttagagcttacatagtttgtcatatatcattgtgtcatttatccttaaaccctataaggtaggtattgttattactgatgaagaattgagtctcacgcacattaagagacttttccatggtcattataaatttagttcctgaaccaatctttataccctggtccttgttctttaaagcttatgccacttctcctgtatcatgttgctttgtatgtataaagaaatctgaaccccatctctactaaaaatacaaaaaaattagccgggcatggtggcgggcgcctgtagtcccagctagtcgggaggctgaggcaggagaatggtgtgaacccgggaggcggagcctgcagtgaaccgggatcgcgctactgccctccagcctgggtgacagagcaagactccgtctcaaaaaaaaaaaaaaaaaaaaaaatctgaatatatgtataaagcaatctgaaagtacttaactggattctaattgagttataaaatagaaaccttcctagaatatcccctttgcatattcttattttttatatttatattttttaagtataaattatttagcaaatcattttaaatgattgttcttgtaggaaccttcagaagtttagtctttttggagacataagtgttctacaacagcaaggaagtttgtcaaatacatacctcagcaaggtggaccctgatggcaaaaaaattaaacagtaagttatatggttaatggaaaggaggttgtactattaataatatgtttttcctaagaaattatgagatacaaacagaagagtaatgatttttttcctaaaaggaacataggtcctggaaatgttttaatggtgaaatacagtgatcagcatctgccattccatctcataaatctttaagaaaaatcaagtaacttagtggataattattgctatttaaaattattcctctacttgcctttgctataacataaattgtatgttatcctacttttctactaaacgggtataagtggtgcttttcttggatgaggaacatatttctacgtgtttaatagatctttatgtttaatataccttattcattatattttaatgtgaattttaatggtatttactgtgggttgaatcgaaattacctaatgaggaaaaatagatctcaaaattgcatgcttttcattgcctattttcaaaagtcagtgttaaaagattagaactaaatgttaatgggatcactgtggcatgtgttttccttatagaattcagcaactgtttgaagaaatcctgagtaatagtaggcaactgaaatggctgtcctgtgggtttatgctggaaatagtaaccccaacatcactgtcatctctctctaatgctgttgccaacaccatggagcacctcagtttactggacaataatattcctggtaacagcactcttattactgcagttgaactggagcgatttgtgaatctgcactcacttgccttggatttttgtgactttacagctgagatggcaagagtcttaactgatagcaaccatgtgcctttgcaacgactgtctcttctggttcacaatgtttctgtaatgcacaagtctctggacaacatgccaaatgatgagcattggaaagccctgtcacgaaagagcaccagctttcgggtctatataatggcttttgatatcaagagtgaagatatgttaaagattctgaaacccagtataccactagagaggattcattttgatagctatatcacttgtgtttcaggggctattgttgatcttatatccaggcaatatgacaagttcctcactcattttattttaatgaatgatgtgattgacacatctggttttccagatcttagtgacaaccgaaatgaagatccgttggttttattagcatggaggtgcacaaagctctctctt

SEQ ID NO: 12246 - DNA, 2300 bp, Homo sapien
ctggagcttagtactactaggtacttatgagcttcataacgtcagtacttcctcccacactctgaatcatagctcagattttataacttcacaaaatgtaattccattctgtcctatatgagtcaattttattttagcagtatagaatatatgtcaaaagaatctaactcacttaacatgctaaatatacatactcaatatacatttaattaatagtaaatatattggcctgataagataaattttgtgcaaccattggaattcactgatttattattgaaactgggcaagattcacagctaattctttagcttacagttgttaaaataggattcctaccacacttcatttaagaagaaagtttgaaattctaaaataatgaatttcatttatggcagactgacatattttcattttactcaggaaccattcctaataattaaagactaattattaatgatctccaagatggtagcttgttgctagcaaaatgctaagaaaaaaatatcaatctcaaattacagtgcatttctagaatattaaaaaaaaaaaagtcagagaactggaaaccctcatacatggctggtgggaatgaaaaatgatgcagccactttggaaaaagtttccgtttctcaaaaagttatacatagaactaccctacgacccatcactttcattcctaggtatctacccaagacaaattaaaacatacgtccacataaagacttgcacatgaatgttcacagcattattcataactcgaaacgacctaaatgtctgtaaactggtaaatgggtagtgtttcatcctgccgaacccacgactggggtcgccctctaagagttcattaaaattaataaggtataattacctaaaactcttgtaaacaggggctcgaataagtaacctatcacaattgataaaccacaccatgttgttggcaacctgatatgtgcaaggcattaaacggagagctttgccctcaaagggttaagaacatctagaatgggggtctcctctttcgtcttgggagccccctccgtctgtctctgtagtggggagcttcttccttcagccttcttccttctttcttgcctattaaattctccgctccttaaaaccaaaaaaaaaaaaaaaagtccaaaaagtcttggtgtttaccacaaaagaacgatgctattccaacatcacagcctccctaaagcaactctcaattattacataaagaggcagcctccctaaagcaaccctcgattattacataaagtcacttaatcttttctgacttcaccactctttgcaaccagagtttactttgcagtaggctgtggtgaagttagggacatggtttggaaaatctaagttagggataccaggcaaaaaaagaagaagaagaaagaaaaaaaatcaaagctctgtcattactgtgaacttttcaacgagagccttaaatctcagcacagggaaaagagacccttcctcaagccctggagaagaggctggtcacaacctgcggatctcagatccctttgccaatttttttctctccctctgaatccaaagggtgacgctgtcctcactgcttccccacacaccagcgagtgcgcggaagtccacctgcgtggttggaccgagggggcaggtccattcgcggcctccgccacgccccacaccgcccctcccggcacagcccgccggggttagcccgcccgtccgccagctccctctcagcggcgcaatctcaggaattcttaaccctactctgggcaggtgggatggctgagaaagaccctgcatgccgccactttggctcagggtcctcagcccaaactgagaaacgttttacaaagaagcgtgacgacctttcgcactaaaccagagtaccgccacctccatcgaccgagcgccaaaattaaccgacttacagatgtgactgggcgcagcggccaccgtaaggcgtaaggggtgccaagtgccggttccagtcccgcccagccccgccccgccccgccccgcccagccccgccccgccccgcggcctgcgtgcgtcagagatcacgtgccgcgcctcccgtccctacaggcaatcgggcgctcccctcttccggaagtcgcgccggtgcgcgccggactcctcccaccagcggcgacgtcaaactcagctcctaccacttctctgtctctgccgaccggcgcagggagggctgccttttccttacagtacgccttgaggcttccgggccgctgaagtttacgagcgagggcagtgcagttactcagtgtgccggcctcggacgcac

SEQ ID NO: 12247 - DNA, 2300 bp, Homo sapien
gttaccagggcttctagtttatagtaaattacaatcagaaaagtatataaagaaagaggtctgccattcccattggagaaagggagatgcagctgcctacctctctcccctcaaggatcagccactactgagctgctttagaaaagaagtcatcacatctcccaacccctcacatgcctcaatccctgagccacagccatccttcaagtgcctgtactccaaacctgggctctgtggccactctgcaagtacccacatttcaatcctgggctctgtggtttcatggtagtcacccacatctcaagtactggaaccatctccctggtgagctaatttacactctggatcctgataccaaggtctctctgagtgtgccatgctccaggcaccaactaagcctccatagagagctaggccctgccctgacttcagagccgctgtaactctgtgcatgcctgtgatcccatttagggctccttgactgcttcatgaacatctgcaccagtgcagcagcagaaatataagaaaatatgcaacattacgtataaggaagtttcaataaagctagcccagatttctcagcagaaacctgatagactaaggtaaactgggatgatagatacaaagtgttgaaggtgaaaaactaccaaaaaagcacagtttacttggcaaagctgtccttgaaaaatgaaagaaagagaaagaccttcccagataaacaaaagctaagagagcttatatcgccagcagaattgttatacaaaaaatgctaaaggatattcttcaagctgaaagaaaaagatgctaacaagtaacatgaaaacatatgaaaatattaaactcactggtaacatttagtacacaatcaaatttagaatattctaacactgcaatagtggtatgtaaacaacttatatttttagtataggggctaaagggcaaaactataaaaatagtagtcacaataatttttaagggatatacaatataaaaaatgtaaattgtgacatgaaaaacatgaattgtggggcagggagtggagtaaatgtgtagaattattttatgtgatcaaggttaagttgccatcttagaatagcctattattactataagatattttatttaagcctcatgtaaccacaaaacaaatacctgtagtagatacccaaaagataacatgtaagaaatcaaagcatgccactaaacaaaaatcatgtaatcaaaaacaaagacagcagtagaggaggaaacgggaaaaggaactacaaaaaccctggaaacagttaacaaaatgacaatagtaagtccttacctatcaatagttaccttgaatttaagcagataaaattctttaatcaagagacatagtggctgaatggataaaataataagttcaaactatatgctgcctgtaagagattcacttcacctttaaggatgcacatagattgaaagtaaaagaatggataaagacattccattcaaatggaaaaccaaagagagcagaagaaactatacttatgtcagataaaatagatttttaagtcagaaactataaaatgagacaaagaaggtcatcatataataataaaaacatcaactcatcaagaattgattgttaatatttgtactcaacataagaatatctaaatatatatataaaacaaatattaatagatctgaaaagagagatacactatagtactataatagtagaggatttgatatcccagtttcaacaatggaaagatcatccagacagaaaatcaataaaagacagtagacttaaactacaagttagaccaaatagacctaacagatatatacagaaaattctatgcaatagaagcagaatgcacattctgctcaaacacacatggaacattctccagggtatatcatatgttaggccacaaaacaagcttaaacaatttaaaaagccagaaatcatatcaaatatcttttctgaccacaattatatgaaactaaaagtctataatggggaaattttaggaaatttacatatatgtagaaattaaataacaggcttcttaaaaactaatgggtcaaagaagaaattaaaagagaaataaaggccaggtgcggtggctcacgcctgtggtcccagcactttgggaggctgaggcgggtggatcacaaggtcagatgtttgagatcagcctggccaacatggtgaaacccagtctgtactagaaatacagaaattggataggcatggaggctgaggcgggagtatcacttgaacccggaggcagaggttgcagtgagccaagaccatg

SEQ ID NO: 12248 - DNA, 2300 bp, Homo sapien
atatttagtatagttagctcttcttgttgaattgatccctttaccattatgtaatggccttctttgtctcttttgatctttgttggtttaaagtctgttttatcagagactaggattgcaacccctgcctttttttgttttccatttgcttggtagatcttcctccatccttttattttgagcctatgtgtgtctctgcatgtgagatgggtttcctgaatacagcacactgatgggtcttgactctttatccaatttgccagtttgtgtcttttaattggagcatttagtccatttacatttaaagttaatattgttatgtgtgaatttgatcctgtcattatgatgttagctggttattttgctcgttagttgatgcagtttcttcctagtcttgatggtctttacattttggcatgattttgcaggggctggtaccggtttttcctttccatatttagcacttccttcaggagctcttttagggcaggcctggtgtgacaaaatctctcagcatttgcttgtctgtaaagtattttatttctccttcgcttatgaagcttagtttggctggatatgaaattctgggttgaaaattcttttctttaagaatgttgaatgttggcccccgctctcttctggcttgtaggtttctgctgagagatccgctgttagtctgatgggcttccctttgagggtaacccgacctttctctctggctgcctttaacattttttccttcatttcaactttggtgaatctgacaattatgtgtcttggagttgctcttctcgaggagtatctttgtggcgttctctgtatttcctgaatctgaacgttggcctgccttgctagattggggaagttctcctggataatatcctacagagcgttttccaacttggttccattctccccatcactttcaggtacaccaatcagacgtagatttggtcttttcacatagtcccatatttcttggaggctttgctcatttctttttattcttttttctctaaacttcccttctcccttcatttcattcatttcatcttccatcgctgataccctttcttccagttgatcgcatcggctcctgaggcttctgcattcttcacgtagttctcgagccttggttttcagctccatcagctcctttaagcacttctctatattggctattcttgttatacattcttctaattttttttcaaagttttcaacttatttgcctttggtttgaatgtcctcccatagctcagagtaatttgatcgtctgaagccttcttctctcagctcgtcaaagtcattctccatccagctttgttctgttgctggtgaggaactgcgttcctttggaggaggagaggcgctctgttttttagagtttccagtttttctgttctgttttttccccatctttgtggttttatctacttttggtctttgatgatggtgatgtacagatgggtttttggtgtggatgtcctttctgtttgttagttttccttctaacagacaggaccctcagctgcaggtctgttggaataccctgccgtgtgaggtgtcagtgtgcccctgctggggggtgcctcccagttaggctgctcgggggtcaggggtcagggacccacttgaggaggtagtctgcccgttctcagatctccagctgcgtgctgggagaaccactgctctcttcaaagctgtcagacagggacatttaagtctgcagaggttactgctgtctttttgtttgtctgtgccctgcccccagaggtggagcctacagaggcaggcaggcctccttgagctgtggtgggctccacccagtccgagcttcctggctgctttgtttacctaatcaagcctgggcaatggcaggcgcccctcccccagcctcgctgccgccttgcagtttgatctcagactgctgtgctagcaatcagcgagactccgtgggcgtaggaccctccgagccaggtgccggatataatctcgtggtgcgccgtttttttaagcccgccggaaaagcgcagtattcgggtgggagtgacccgattttccaggtgccgtccgtcacccctttctttgactcggaaagggaactccctgaccccttgcgctttctgagtgaggcagtgcctcgccctgcttcggctcgcacacggtgcgcgcacccactgacctgcgcccactgtctggcactccctagtgagatgaacccggtacctcagatggaaatgcagaaatcacccgtcttctgcgtcgctcacggtgggagctgtagactggagctgttc

SEQ ID NO: 12249 - DNA, 2300 bp, Homo sapien
gcttgagtggattcctaagccaaggattggatccggagtaccaggggcagagagggggagcagaggaaagaaaggagatgtgaggagtttccacctaaagcacttcactcctcgtgttcttccccgacagagatagctgtgtggttcttccttacgcgtgggtgcaggtgtgcgcgcttggggtgagcccatggttgtgctcgagtatacgggcgcctgtgcacctccagggcaatggtaaagcctggcagagctctttttggaacaaaatgaaggagctccatatccacggaggccacccgtatgggcctttgccaagtagggcagaagaagcccttgttagccagcttccctttgcaacttcctactcttcctttgggtacagactggtgtctgggctagctaggatcacagctgagagcgaaggtgctctcagtgtccgaagaccacgtgctggtgaacccacaatgagaagcgaaagggtttcaggactctagcagaaaggaagagcaagatttcactcagggtttcttagaagaaagagttaactttgctcactggcttttccaggatggagggagtggggatagggtcggggagagaagcattgggagtcttgtcggagtctcaagcaaaaccaggcgagggctccgggcagatccattcccgcagggccctgtctaacctcctttccagtcgcacctctttcctgctttagaccctgcgtctgtgccggtgaccttagagactaggtctggcttatgaagactgttgggctccctttctgcccttcacatagtaaaatgtgaccaactgcagtattcgtaatgtctgatgctgagctgagttgattcccaaatataaatgttcttttcagaatccgctcccatctgattagtaagcaaatcaccacccacaactaaggggacagcggaagccagcctcagatgactgaaacccccaagtcagtagctctcctcaaaatttccggcgggttattatagataatgacttttcccaccgccctaagcagccgaagcttgactcagtgatgattctctctatcccgtaactgcgaggaagtgggcgatcagcaaattgcccttttgcaggaggctggggacgcccctggaagttcgctttcattctccaggttttctgccttttcccttcccccttcctgcaacgcccccgcgcctcctcagcctggggatttcctggcgcttcgccggccctctccgcaaccccctgataaatcggttcagaaccagtctggctgggaggcccgagggctgacagcagcggagcggccccggccggggtctcacggactctcggggtctggccgacacggccgctcccgtcactgcagcgcgggctgagctcacggccgcgcgcccgccgccgccgccgccgccgccttcatgctgcagcgcagggctcagttccacgcggccaggaggccgccgttgcccacacgcgacgctttgggaagcccagctcccgggtccgccccggccgcggccgcagccccggacctcggctgcttgcctcgcgcctgaactgcggactcgccccagcgcggtggccagcgggcggggcgctgtgttccgcggcgcgcagggaggcggtgagcgtgtgcagagctgcccgaacggaggactatgtatgtgtgtgcgcgtgtttgcgtgtgtttgagcgtgtttttccttcttcccttgaggatgtgaattgtttagcagctggctgctcccttaggatccttgactttggggagctctggctgtgaacacagcccacccatataatccattttgcacggtccgttatatcagaaaaaaaaagcgcaactggacgggggtggggcagaccaacgaaacctagacagacacacacacactcagaggagagaggaagaattgaaagacttgagaagactttgataacctccctgctggcccttctgtgttccggaaagatcctggatgttggctaccttttcaagtcatcttggcatgtctctagtgttttgtaagccgctttccagctagctgcgtgtgtgtgtgcgcgcgcgtgtgtacgcgcgcgcctatctgatgcatttgactgtcttttatccaactgcccagaagcaaatgtgttaactcggcgatgccccttcatgcccgggttcttgcagagctctgaggacgcccagacccattttcctggctggatttggagcggctgctgggctgtggacccaggtgtgtggatcgctttacccagaagcttggaaagcgccaatattaacctgcttc

SEQ ID NO: 12250 - DNA, 2300 bp, Homo sapien
atggagggagtggggatagggtcggggagagaagcattgggagtcttgtcggagtctcaagcaaaaccaggcgagggctccgggcagatccattcccgcagggccctgtctaacctcctttccagtcgcacctctttcctgctttagaccctgcgtctgtgccggtgaccttagagactaggtctggcttatgaagactgttgggctccctttctgcccttcacatagtaaaatgtgaccaactgcagtattcgtaatgtctgatgctgagctgagttgattcccaaatataaatgttcttttcagaatccgctcccatctgattagtaagcaaatcaccacccacaactaaggggacagcggaagccagcctcagatgactgaaacccccaagtcagtagctctcctcaaaatttccggcgggttattatagataatgacttttcccaccgccctaagcagccgaagcttgactcagtgatgattctctctatcccgtaactgcgaggaagtgggcgatcagcaaattgcccttttgcaggaggctggggacgcccctggaagttcgctttcattctccaggttttctgccttttcccttcccccttcctgcaacgcccccgcgcctcctcagcctggggatttcctggcgcttcgccggccctctccgcaaccccctgataaatcggttcagaaccagtctggctgggaggcccgagggctgacagcagcggagcggccccggccggggtctcacggactctcggggtctggccgacacggccgctcccgtcactgcagcgcgggctgagctcacggccgcgcgcccgccgccgccgccgccgccgccttcatgctgcagcgcagggctcagttccacgcggccaggaggccgccgttgcccacacgcgacgctttgggaagcccagctcccgggtccgccccggccgcggccgcagccccggacctcggctgcttgcctcgcgcctgaactgcggactcgccccagcgcggtggccagcgggcggggcgctgtgttccgcggcgcgcagggaggcggtgagcgtgtgcagagctgcccgaacggaggactatgtatgtgtgtgcgcgtgtttgcgtgtgtttgagcgtgtttttccttcttcccttgaggatgtgaattgtttagcagctggctgctcccttaggatccttgactttggggagctctggctgtgaacacagcccacccatataatccattttgcacggtccgttatatcagaaaaaaaaagcgcaactggacgggggtggggcagaccaacgaaacctagacagacacacacacactcagaggagagaggaagaattgaaagacttgagaagactttgataacctccctgctggcccttctgtgttccggaaagatcctggatgttggctaccttttcaagtcatcttggcatgtctctagtgttttgtaagccgctttccagctagctgcgtgtgtgtgtgcgcgcgcgtgtgtacgcgcgcgcctatctgatgcatttgactgtcttttatccaactgcccagaagcaaatgtgttaactcggcgatgccccttcatgcccgggttcttgcagagctctgaggacgcccagacccattttcctggctggatttggagcggctgctgggctgtggacccaggtgtgtggatcgctttacccagaagcttggaaagcgccaatattaacctgcttccaggtacatcacaaggtcaagagagtgtcttgcagccctcttgtttccgtgtatctacaccttcttctcttggccagaaggatatttacgttttggttcacagcatttgaagccaaaagttcagcccttcgaactggtttgctatacaaaacaaaacaaaacaaataaggtaatgaggattgcttattaaactgcttaacaaaatccccgactcttcctcagccctttctcggctccctcctccccaccaaaatgtcaccagctcttgaattacgtggattcgggttggaggagaacttgaaggaaacgtgattaaagggctatgcgagaacgctctctttgctgcccgcggtccggtgggcttcgaagccaatcgtgagaaggaccggttccctccgtgctgcttcctccccgtgcagtgctgggtgtgcgtgtgcgagtgtgagtgcaagtgcgcgcgcgcccgggtgcgagtgtgtgtgagtgtgagcgtgtgtctgtgtgtgcgtgcgcggccgccctgcctctgcccgctccccgggcgcggagccgcgggtttcatggggcgatt

SEQ ID NO: 12251 - DNA, 2300 bp, Homo sapien
atacattgttactatgtttgctttacaaatcaataatcttttaaaaattattcaaatcagaagtggaagttagtttaataattttgtttcagtactttataattactgttagacatgtgttaaaatatgccatcataatcatggatttgtctatttcttcgagtttggtcaatttttgattaaatatcttgagactgtcttatttaaaacagagattttgttaattttaatatctttcatgtggattgacttgtccatattaagtctacctttttattaagagttttgtattaaactgtattaactaatatgaatatagcttcactgctctttttttttttttgataggagagtttcttgtttccatctatttattttcaacattcctatgtcctcctacttaagatatgactattacaaatagcatatactagtttttaaaagaatgtctttgtattttaaatgaaataatggtgtgtttacattttatgtagttgataatgtattcatccaattttattttatatcatagatatagtgagttattaaaatatttttagaaattaaaaaatatgagagttatagaagaagtaggctatgtcactgatgaaggcaagggatgaggtagagaaatcagtcaggagattggtacaattaatagtttgagatgttgctatcctaggaattatagagactaggggaaaaattgaacagaatcctgcacatgaaggggatagttgtaaacattttgttttaaaaagggaagggctatagatttacacttaggtgctggacaaatttaagaaatgtgtaaagcaacaaattcctataaaaatatagggaaggaatcaaagattacaggagaacctggatatattacatccagaaatccttcctcctggactagatggtttatattatcaaatatgataaagccttcttattattgaagtgcggtcctagaacaagcagcattcactttctctaggagcctgtttaaaatgtgaaaatttaggcactgctccaggcctactatatcagattttacattaaataattgccaaatgatgttttttgcacattgaatttgagcaatgtatggaacactggttctctaccttatttgcatattagtatcatctggggagcctttagaaataccattgcctgggccataccctagactaaattggagcctgtgggtttggcactcgggtatctatatgtttaaagctccctaggtggttctcttgtgcagccaaggttgagatccagtgctgtaggcacatggaagagaacaaagcaaaactacacaattactaagaaatggtgaggattttagagactggattctagtctttgttgtttctttgagagttaattcatttattccctataaatcaattttatttttgtatattttaaaattatatttagcaaatatgctctttcagttctaaaattatgtgatttttctgtctatggattgtaatttaggagatacttggcaaaatataataatgggtggtaatcattggtataggattaatttgtgtatggtaagaaaatgtgctgactgtaactgttcagaaattgagtgagcagtagtgatcagaaaatttaattatatcagaaacagaaaagcaatcaaaactggtttgcagaaataaaaatagataagccaataaatttatgagagtgtaagttgagatgagtttgagaaaagacaaaacaggcaaagtacatgacagacttgtagaattttttttcatttttaccactacaaaagtgagaagaacatgatcagtgcttctcgaacattaacgtacagaggaatcgcctggagatttttattaaaatgaatattcttaccttgtatgtctctggggtaggttatgaaattctgctatttaaataaggttctaggtgatgaaatgctttttctgtgggtccacacttaccgcagcaaggagctggaacctagttatcgctaaaagtagtgcaaaggtcttgctgctcatgcatctttctcagttgccttagtaactgcgccttttcaggataagacacaacttataaaattcaaatgaaaatgagataaacttcagtgagagatagaacaacatgttaaaggattatgtggaaggagttttgggggaggaattcctgaagttcataaagatgagactacttgaagaagaatttgattcctctctaaaaagattaatagaacttacgagcttaggaacttagaagttcagcaggactgttttatctgcagctgtctttggtcatagtca

SEQ ID NO: 12252 - DNA, 2300 bp, Homo sapien
ttaaactatgtaaaataagaaaagaggtatattcaaaaatgtacattttgtatgtttctcatatcaatccagtgtatttttaccagtgccaattctttctgtggatttgaattaatgtttaatgtccttcagttttagcctgaaggactcagtatagaatttcttttacagcatatctactagcaaaggattttctgtcctgtttacatggaagtgtcctaagtcctttttggggagaaggatagttcagctgtatgtaagattctttgttgaaagtctttttttaatttttttattttttgagatggagttttgctcttgttgcctaggctggagtgcaatggcgcatcttggctcaccacaacctccgcctcctgggttcaagtgattctcctgccttagcctcccaagtagctgggattacaggcatgcatcaccacaccttgctaattttgtatttttagtagagagggggtttctccatgttggtcaggctgctgtggaactcctgacctcaggtgatccgcccgcctcagcctcccaaagtagtgagattacaggcatgagccaccacctgcctggccaaaagtctttttatttcagcactttgaacatattgtggcactgttctctggctttcataattgctgatgagaagtcagccattgattttgctgaagattcgttctcaatggtgagatgcctgtgtcttgctgctttcagttttctctttgtcttttgatcatttgattatgatgtttctactgtacatctttaaatttttccaatttggagtttattgaattttttaaatgtgtggattaaagtttttaattaaattttgaacattttcagtcatttttcttcatattctttctgaagctttctttctttcctcacctcctgtaatttatccaaaagttggtacactgatgatctaatgatgttccacacatttcagggttttattcatttttctttattctttttctgtctatagtttatactggattgtttcaattgacctatcgtcaagtttactcatccttcttgcagcttaaatatgcctctacgccccactatgcagtgatttttcctttcagtgattgtattttcaacctcagacttagatatcttttaaaaataattttgttctttttatttatattctctgtttgaaaagacattattatcctgctctcagtgtttctagatatggttttatatagtactttgaatacatttataacagggtcttgctctgtcacccatgttggagtgaagtaacatgaccagagctcactgcagcctcaatctcctcggctcaattgatcctcctgcttcagcccctcgagtagctgggactacaagcatacaccactacaagtaattagatcatgggggcagtttccccatgctgttctcatgataatgagtaagtctcatgagatctgatattttttaaagtatttggcatttcctctgttggcactcattttctcccctgccgccctgtgaagaggtaccttccaccatgatgttcaggttcctgaggcctccccaggcatgtggaactgtgaatcagttaaacatcttttctttataaattacccagtctcaggtatttttttacagcagtatcagaacagactaatatagacggaggagtctcactatgttacccaggctggtctcaaactcctgggctcaagtgatcctgctacctcagcctcccaaagtgctgggattacaagtgggttccaccatgcccagcctataatagctgatttaaagttttttttctagtaaatctattcactgggcttcctaggggtattttctattaattgcttccccccacttcatactggaaatatttttttctgtttcattacatttttcataattttttgttgagtactggaaattttaaataacaaaaaattacaactgtagtcatcagctctcttgctcccaagtgttggctgtggttgctgtttgcttttttagtaacattcctgaacctcacaatatctctattgtgtgtcatatgttactactgatgtctcttttcagctgatgtttaggcaaagatttccttaaatgccctgcaccaataggtctccccaccttggtcaagaggttcagtgtatgtgctggcacacactttcaatgttgtggcaagtagtttaaaatattttctaaaccttcacgccttctgtttgtacagaacctcagtgtcagctacaggtgaaatataagaactttctaacgtctttcttgggcatgcacaccatttt

SEQ ID NO: 12253 - DNA, 2300 bp, Homo sapien
aaatcttgaagccctcaaagtgatctatgagggttggaatcagcttcttccagactcctgttaatgttgatatttagacttattaccattattcataaatattcttaatggcatctaaagtggtaaatcctttacagagggtttaaatttaccttcaatttcagatccattaatggaatcactatctatggcagccatagcattatgaaatatatttaaataataacattgaaaatcaaaattaacccttgatccatgcgctgcagaatggatgttgtgttagcaggcatgaaaacaacatgaatttcaaatgagaggtctgtgattcttcttttcacgtgaacacttagaggccattgtagggctatcaatttgcctaatttcaatattgttgtgtctcaagcaatagaaaggcctgaggagagagagagagagagatgggggaacagctggctggtggattagtcagaacacatacaacatttatctattaaatttgttatatatagggtatgatgctgcaaaatatttacagcagtaacattaaagatcactgatcatagatcaccacagcagatagcataataatgaaaaagtttgaaatattgcaagaattaccaaaatgtgacacaaagaaatgaaatgagcacatactgtttgaaaaaaatggcatcaatggactttctcgatgcaggcttgccacaaacattcaatttgtaaaaagtgcagtatctgtaaaacacaaaaaagcaaagtgtaataaaatgaggtatgcctgtaactcccaaagatcccatctttaaataccataactttgggggttccaacatatgaatttgtgggtaaggagacagggccacaaacattcagctcataacaccaatgcatgtgaaaaaaaggggaattattcaattcactatgttttctaggggcaatatggcataaagaaatttaaaaatattcccagattaatgcagtcataattattatttggcatatggttattacattgtctcctataactgtattttaaaagtctattttctcttcttgattttcctcagactaatgcacaatgtttttgcatactgtttgatcaatattcatctttctagtaaaattcttgagtgatatgagttaaaattttatctgtattccaaatctaatacaatgtcatctacaatctgcttgactggaattcctccttttcatagcttcaatttaatgtttttatcttcagctggtgcagtggctcatgcctgtaatctcagctactggggacgcaggggtaggagtattgcttaagcccagaagattgaggctgcagtgagctatgattgcaccacggcactccagcctgggtgacacagtgagagcctatctcaaaaaacaagacaaagataaaaataaagtttttatctacattggggcattcattcccatgtaggtactcagcagagtctaatgtgactacttcaaaaggtgcattttatctcacttggcatgtatttagactcattcttttagttggcaaattttggatgcaactacactctaaaatagttaaataaaaattaaaatatctcatgatgttttagaagataaacctgccttctatattttgataataggctgttgtgttactgaaggctaaggatgtagaaaagcagcttatatgaagatgaacttcagaattcaagtttttcaaacagtagtaacttcctttcaagtcatataaaatacattgatagaacatcctcactcatgttatgggttgttttgtacaattgaaaataggctgcagcattctgagttctgcattactgtctttgataataggatgaaaagaacagaattgaaagttcaaaaaagcatcaatttcagcaattagaaagtggcattactggaatttacctgatgttcttttgtagacaaatgctttttttcaacttgtttcaaaaagtagattctcacttgcagccattacctatggatgtatactaagtttaaaagtcctaggaataccactgatggaatcctgaaggcagaactggctatgatgtcatagacccttgaaggaaacttctaaaagtgatatttagttataacagagactaaagaagaaagacgcttactgaataaggtgggatccaacaagagtgtagtatggaatgcaatagcttatgaattactttttttctgagggagctcaacagaatgacacctaagaaagggaaagtctttgacacttggtacgtttgtgatttttggtcattacttgaaaattaataagtttgaaa

SEQ ID NO: 12254 - DNA, 2300 bp, Homo sapien
gaggtatgaacaaagagccgtgggggtctggaggagggcagatggtgccaaaagagattgagggaagaagatgacatttgacatggatcttgaagggattttaccagatgagagattaggggatggacattcagagagggaacaggtgatagagagggagagttccctgaatggaccctcagtggggagggacagttaaaggtggtgcttgacaaaaagttgaggctgactgtgaagggccttgtatgtctcgctaaggatttttgatcttactggtaggcagtgaaggacttacagagtttttaggcagcacagtgatatgactaaattctgctttcatggatatgactgcaatgacaagaggatggactagggcagatatgattgttggtaaggagaccaccaggaggccttcctagcagcccaggtgggatgatcggagcatgagcagaaggagcaatcataaggacataatcgagaaggtggctttgggaaatatttctcttagaactaggcatttgcttgtggaagtatgtgtgtttgggtgcaggggtcatgagtactcggagctgagtataactgatgtttctagcttgcaaaatgatataggtcttatctaatgagtttaagaatttagaaagaaatgcaaggtattttgaagcaagataataagttcaatttgggatgttaattttttaaaatatctgtgtaggggacagttggagatatgaatttggaaataagagttgagagagagagattctgatgtcatcctcacaaagataatggttaaagctctgggaggagggtgtcttatctcaattttgcacattaactgagactgacagaggttagtgacttgtttaaggtcactagagataccagggtaaaaagtcaacatctaatcaggtcttctgatcccacagtcaattatttaatttctttgaccctcagtttctttacatgtaaagtgaggataatgatatcttcctcataatacttatgattaaataatataatatgtatatgcagtaccatgaagtgacacagggtcacaatcagacagtcattaaaagtgtgttaatttccttctccctttccttcttttgtttacaaatgctgttgtgggttgacactctcgcctcgaccaaactttagacaggcttctctgaaacctctttcaactagggctctgtcttccataagcctactgagtctggtcttagcaagagtcctgttaagtcagtttacggaatgtctctccactcttggtatctgatcactcttgatatctgatcatatttctcatcccacacccttgatatctgatcatcctgaactaacttcagcaggaatcatgttaagatggtttagcaagaattccgctacacttgatgcctcttcttagtaattttctatccattgacacccctcacctcctactccttggctgtaaattcccaactactttaatgtgtttggagttgagtggaatttctctctcctattgtaatagtcttgacacctattgcaatagtcttgaataaagtcttctttgccctttcaacaagtgccagaataattgtttttctttaacagggccttaatatgactgtacctaataatattccaagaggttcattaattagacagctttctatatgtctagcatgacacccttactacctagggctgggagttcaaacatgggtcaaaaccagaaagcaccaagtgggcatcagattgaagctgggtgccaatagatatgattgtgggagcagtcaaggttgaagatatgagtcatcagaaaataaggagagctgaacagtcgacccagagttgcaagagagcctggaaactggggaaatagccaagatcatgggaaataagaatatgagaagcaggtattcaagtgatctgactaatcccacaggatgagaattttttcttccccaggaatgcttttaacaagttaaatgctttttggctccatgtgaagcctttttggctaccttgaaatcttacacacagactctgcaggggatagaagttggctatgttgttccataagcatattttcaactcagcacaatgaagaccattgtcctagatggcctgctggggaaatggattatgtaattatgaagagctgagatttaacacttatgccagtatctgctggccaggctggagggcagtggcaatcatagctcactgtagccttgaactcctgggcttaggtgttctcctgactcagtcttccaagtagctggaactacaggtgtgtgccaccatgcctg

SEQ ID NO: 12255 - DNA, 2300 bp, Homo sapien
aatccataaaataataaataaattaaactttattaaaagttaaaacttctcttcaaaatacactgctaagagaatgagggccaggtgtggtggctcacgcctgtaatcccagcactttgggaggccgaggtgggcagatcacctgaggccaggagtttgagaccagcctggccaacatggtgaaactctgcctctactaaaaatacaaaaattagctaggcatggtggtgcacgtctataatcccagctactcggaaagctgagataccagaaactcttgatcctgggaggcggaagttgcaataagccgagatcattcactgcactccagcctgggtaacagatcaggattctgaaaaaaaaaaaaaaaaaaaaaaaaaaaaaaggcagagttggggggcggtaggtaagcagaaacttaagtgtgatgggcatactcatttgatcacagtgatggtttaaggggttatacatatgtcaaaactgataaaaattatacactttaagtatgctctatatattctatgccaattatacttcagtaaatatatctaaaaaaaccctacaactcagatgtcagattttgaagacggtggaaaagatgcagaatggaaatttcagttaaaggcctcagtgatgtttgtgagttatccaagtattcaaggaatccatgcttcctccatctagctgagactcggcagagtttaatgagcaatctcaatactattctccagaaatggtgtcatccaccatactatggctgttttcaggaagagaatgacctaatcagtataaaatgaactccatgtcttgtgagagatttataattaaacacataatccacatttacaaacatttttaaagggcttttctacctgtaggagaggattaatattgagagtgaactttttgcaagttttccaacacactagtttatctctaagagcctcagtttcctcatctataaaataccataagaaataagaaaaaacaggaaactaaaaagagcaggctttgccagagctattaattattcttttttgggcagagccaaaactcaagaaatggaagtctctcttccatttctagacttttttagagagatccatgaggaagttcccctccatagctttggccgaccatcacaccggtcaagaaggcatccagcctctcccaggctcagcctgtgacggaaaaccacactgatttactaggatagccttgagctctctcattagccctcacgtgttctgaacgttagagctaactttccagaccctcattatttgttgaaaggctggatggggaaaatctcaaccagatctccatgcctacttgcaaggagaggtagtttttgcagggtggcctgtgttctccagatgcagagccatacagggccttgcttctttacgggagatacaaaaactcggccctaataaacagaaatagtggttgagcccacaaactagcattaagttgtcctaactgtaatttccagctccgtcacttgctgtgtgggaccttattatctccaaaacccaattttttcaacttcacaatggaattaaaacaatctaatttttcaaaatggggttaacttccactgtaagttacagtatattggccaataattaacttgaacactaaagctggcatttaacagatcaattcaactgttttctaagtaaatacttaaacgcttaaaaaaccgtaatttactgagaaaacaaagctttctttctaggttaagaatttgagaaaacaagacccagaagcaaactaaaatcaagtcctaaaatggtacaaacctcaaaaagccaatcaggtttgccaataaagctccgcctccgtgcaaactctgcccacttccggcttccccacccaccttctaccagtggaaccccgcccctctctgcgaggtcccgccccccacacctgatcctggttcccattgggcgaatctggatgctgtatacacagccgacacacgcacattaggctggggcgtcttcgcgcctgcgcagctgcgctgtcaggcggctgaaaacgggggggttggggggaggggggcggaggtcgtgccgaatcttcctccgtaataagaagcgacgtgtcccactgtcctggctccgtgggtccagtgagattgggcctgggcgctggagctgctgtggctcccgccgcggcggctgccatggaggccatgccagagcccagaactcacgccgggggaggccgagacagccggcggtactcatagatgaggcagcggcggcggcggcggcggcggcagcccgggc

SEQ ID NO: 12256 - DNA, 2300 bp, Homo sapien
ctcctcccgttttttccagagaaagactaaagtttcatgccacatatgtcattatagtttaattctcttagagtgtaagggtagttacacttcatttggtcatgtctgaagataatgtgaagaaaatatcctagagatttatgcttccttcccaatgcactattttaggaatccgaactcaggctctttaagcaatcttaaaccttgctacaaagttctttaaaattcaacggaaataaatcaaaccataaagttattttcgtttttaaagtatttgaatgcataactgttttttaaaatctttgtaaacaaaacgaatcagtatctattacgaagaaactgagtttgtgttttcctaggctgcagatttgccacaccctcttcttcctaagtggatgactagaatcaatgtgttggccaactagatataaacatccactcttcatactaaatatagttactggatattttagagtccacagtatcttgcttcaaactgaaaacactgtgttcatgtgtgtttaatatattgcagaagtgaatttttactcgcgttgcagaatgttttggacttagtttcttacacaaataaaacacgtaggactgcagctttattaagtgttgagttcatgttgtgtttgggaggatgcagcacttggaaaagatggtcaaaataagacactgatctcagtcactcatttctctgtttccactcctcagatgcctcccttttttcataacaatacttctccataaaagtaacctcggaaaacaatatgatgttgttagtttatttgcttgtcccaagtaaagtgaaggagttttttcaatacaattgtaaaaagaactcattctttcaaaagtatgtgcgctatataacatacatataacacaacatatttattaaaatacttactgtggctttaaaaacaaagtgcctagtggtcctcaaggttggggaagagtgccagtttgaaaagggaggatgctttgcttcattctgaaaacatgcatagggaataatcaggatatttatcaagttctgaatcagatcttcatagtatagcctctgtagttaaaaattatagtatatctaaattgcacaatagcacaattctcagttgcaaataaaaatcccaaagtgattagcaatattagctatgctactattcacttaagattgattttcatgattactcctcatgctgtctttcaaagctaaatgtcagaattagtcttagtctatatagcaacaggagtttttttttttacatagtttttctctacaacaaataaaatatgtagtatagttaatataaagattatgtaatggctattattctgtacccccaattaaggatcccattatattagtttcttaagtggaatcacccatattaacaagaaaatgaagcaagcacagcctgtattttggaaagatgaggaggtttacattaggaatatgcctaaccaaagttaatgtttttaatagctttattttcatttaggaattttttttttttttttttttttttttgagatggagtttcactcgttgcccaggctggaatgagatggcgtgatctcggctcaccgcaacctccgcctcccaggttcaagcgattctcctgcctcagcctcccgagtagctgggattacaggcatgcgccaccacgcccagctaattttgtatttttaatagagagagggtttctccatgttggtcaggctggtctcgaacgcccgacctcaggtgatcgcccgcctcagcctcccaaagtactgggattacaggtgtgagccaccgtgcccagcctcaggattttttttattacagggtttccctctgtcacagataaaatctgcaatgtaattaatataaagcctatcaaatggccatctgtacctcaaaaaaagactgcagcttcttaaatggtctttccagagagcatgcatagtgcgcgaaaagtggctcatttaaatttttttgctatgttgggaggcctaataaccacatttgatttgagtctttagatggatttattttcgtttaaacatattatgcatttaatatacaaagttacaattttatgtgttctgttttaaacttttaaaatgtaggatgaagacactgtttgaagagatcaaagcatcaattaaaaataactataaccaagatcgatcattttgtaggcctgttcttccttgggggggtgtttttactatcaaagctggccgcaaagcagtatcctgtacaccactctatgttgaaataagactgaaaaatacctgcaccatag

SEQ ID NO: 12257 - DNA, 2300 bp, Homo sapien
tacattatgggatattcaggaaactaaaagctaattggtattcagaagtaaagggttctaaccaagaagtgtcaagcagtggtctttgaaccaagtcaaagaagttattgtatgccatgatttaaaaaaaaaaaaagacttttatgtgggttgcaaaaccattctaaggaggttagtgaaattattagatttgtatcattctggctgtattatgggaaaaattgagaggccaggattaatatcagattgattaaataagatgttattgtagaacctcttatctaatataggcaagagatgatgagatcctaaattagggtagaagtagtaaagatagagaatggggcattcattttaaaaaatgttttaacagagtaaattgacaggatttggtgtttgaatggatatgagggagggatgatgaggaagagggaggaatccaagatgaatgagttcttttgattagatgattacatgggtggttcatatatgcagagagagagagaatatgggaggagaagccactttcaggggaagagttttggacacattgagtttgaagtgcctatgaaatatccaggtaaaggatattctatggtagctggatatgagtgcacagctcaaagaagagctcagggctggaaatttgaaggtcatcagcatatagtatagtttagaggtatgaattaaaactatgaagtctttgatggagttattgacagtttaaatgttcctccttttgcctggtgagaaaatatagagaggaaaaaggattgattgtgaatgaaaatctgggaaacattaatatttaagatgagggcagcaggaacaattttagcggtaggggaaccaagtgaatagagtcataaaagccaaggaatttgtgtgtcaagaaggaaggaatgtgatcagctatgtaaaatgcactggaaagatccagaaagataaaaatggaaaagtggctcttaaacttggcattatggagaacataatgacttttggtgggtaatttctttttctttttctttttttttttttttttgagacagagtttcgctgttgttgcccaggctggagtgcagtggcgcaatctcggctcaccgcaatctccgcctcccaggttcaagcaattctcttgcctcagcctcccgagtagctgggattacaggcttgcaccaccacgcccagctaattttgtatttttagtagagacagggtttctccatgctgaggctggtctcgaactcctgacctcaggtgatctgcccacctcagccttccacagtgctgggattacagtcgtgagccaccgtgcctggccttggtgggtaatttcaagcagagttgtagaaatgctgtagatacattacagtgggcctagaagtgaatacaaagtaaggaaataaactgaatgaagacttttcttttaagaatcttgctagagacaggaaggagagagttaaggcagtaactgatagcatcaggggaagttttgtttggttttattttgttcttgaagagagagacatgagtttttttttgtttatttggagacggcatctcgctctgtcgcccaggtgtctcactttgttgcccaggctggaatgtattggcatcatctcaactcacagcaacctctgcctcctgagttcgagcgattctcctgcctcagcctcctgagtacctgggattacaggcatatgccaccacacccggctaatttttgtattttgggtagaaacagggtttcaccatgttggtcaggctggtcttgaactccagaccttgtgatccacccgcctcagcctcccaagtatttttataattagatgaataaagagataagtaaagagggatagggtaaagatataagatagatgaatgcttattgatgaagcaagatcttagaggaaatagaagagattgatatcaaaagcaatgatagaaagttgtgaataggagaaagagagactctttatgcctcaagacaattgaggtttactggctggcgggggggttgaaagcaagggtttaaaacagcacttgtccaatggctttagtttttttctttaattaagagaggaggcctgctagagaagaaagtggggattgggtaggtaacttaagaaaattggggaagctctgagaactgtattgtttctacttatacataaggagtcataaggatggcaatacattgaaagcattttttgaatagttgtgcaaatatgttaaatgttgaatggacattcagccacatcactcatctcaacactataaaccacaggtctaattcaaga

SEQ ID NO: 12258 - DNA, 2300 bp, Homo sapien
ataaattgcaatctgtaatgtatagtgatccacagggatctaaaaaaacaagaatcaaaaggaagactcatcttgctttgttcccaggaaaagggcatgataactgcttaagtatccacgtctctcatttaagactttcgaagttccttttctgtgattccatgattaccacacaacctctagttattaacttggcttcccaagttcttggatacaagaaagagtgcactggattttcaacttgaaaattctgatccaacataaactggcactgtaatgtgtacatcattgtctaggttagtttgaactgggttcctcaagtctgggcaatacatgactagaagtctacacatttgagcttcttaggttggaactgtgagaaccagacactttctcattgacaactgctacaatcatttcttgtttttcacctccctgtctttaacctgtccctaaaatgaaacatgctagctaaacctaatttaggcagattcatttaaacacgaaaatggctcattaaaaccaaagtaacagcctagaatttaaaccaaaacataggatgtatatttacacagcctcatttacattatagtctattccccacccccacccccccaaaaacaaaacaaaacaaaactgatattcaaatcgtactttaaggcaaaaatccagaaattatttttgcacttgcatcagctgggagcattatttataaagctgtttggcatatgtgactcatttattccaagactttaaaaagtatttaagagaaatcccacctggtacagagcagggtaggaatacttgcatttgaagtgcataaatttgggtcttcaaatgataacttagacttttcgcacgagtcattcaaaagtaatagtattattccttcaaaaaaaaaaaatatctcttccacactccaaagcattcaggctcacactagacactccagctcttccactgtgtccgtttaagtatcacttatgaggagaaaatgcacacaaaattctcagttcgcctaaaataaataaatgtctactatcattcctaaatccacaaggcagaattctcttagaaccatgatgccaagaacttccaccgcaagtgaaattgtcttcgcaatctctgtctctaggagactgaaaggctgcagagacgcttgaggatcctgcagggaggctagggcggcagacggagggggcggaggttaggggagagtcccacagaggaactgcattagaaggaaagattttgataacgtctaagggagaggcggttagctacagggggaaaaaaacagacctatttccatattatgtacgttgtaaagaaaacgcaaagtgatgagggtaaggaaacgttgccaaaaacaaacaaacaaaaacaaaaaaaaattaaccctctgcggccggagggttaagagaagtcgacaaaaggagaagggggaggcgaataaaggccccaaagaccaggaattgaaaaaaaatacccgatttgtgagcttggccgtggtccagatcttctgtcctgataagcagatggcaagaggaaaggatcgcagttactcagggtggtagagagtaacgcgtttacaagggtgacgagccctgcacaagaagatgtcgcctctctttccacctgctccgctcagtcctttgcctcttactctagcaccagtggcattcgggcaaaacactgccaaagcctgcaccgctggaggacagcaaaaggaaaatacctgagtctcagtaatcacacgggcagcgacaggaggaggaaccgcggacaactggagcctgggctggatcctcactagctccggtcaaaccctaactcttacgggtggggcgggcaacttccgcccagagcaaggaaagcgtcacatccgtcaaatggcttcacccctcctcccttctccgctgtagctgcgtttacaacgttctgacttcctcttccaggagactttggcctagtctcaacacctgacgtggactacataacccagcattcatcacggcaagtggatttccgggtcaagaggtccgcgctgggtacatcaccatggaagcaatcggtttggtcacgtggtgcccttggttacgcccggtggcagctgtggggtctagggctcagacgggggccattttgccagaggctgcctcccggagttgggggcggcctggcggcaggctgaagctgttcttttgcctcttctgcagcttggggcttggagaggatctggaagtctgggctccatcgagccctttggagacggcaatggtttcttccaaccaccacca

SEQ ID NO: 12259 - DNA, 2300 bp, Homo sapien
cttctgtctcctgatcaccaagctttcgggctagggatattatcacctcggtgagatccagaccaagcaacaagtcctcagtagtaagcaagatgggaagcagtagtgctgtggaagctctaagtcgggcatcggtactttccagtccttgttgtataagcgttctcagcacctctccaggactacgtttcagacatatatgaaggatctgcagcgcatctttccgcagggctggattctcttcccgtaacgagacaactagttgaggcaaaagtgctaagctaaaggcctcttcaagctggcctgcctccccctgaccccggagaacgtccgagagaagttgcaagcagagccgcttctcatcactacctccttccacaagcactcggcccagtgcccgatacaaagcttccttgcgtcgggggaagccaagtcgaccgccccgccgcggcaaagcagcttgcaaagcctggaaggcctcagaaggatcccgggcagtgcggaggagttgaaggagccgagtgtcctcttcatctccccctgacaaaccgcctccagactcagaccagctgcttgagactgcctccgagggcatcaagagggccgaggccagaggcgaagttgtagtggggcaggaaccgtggtcccccgcagctccacggaagtagtagtttttctctcctctcataatgcccccaactcgactatcatcggtctctggggcggaaggacgactgcggctctggagccgataggtagagaggactggaaagggcggcagcagaagcagcgcggagggggcagccgccatgcagggttgtcaggtggtggtggttggaagaaaccattgccgtctccaaagggctcgatggagcccagacttccagatcctctccaagccccaagctgcagaagaggcaaaagaacagcttcagcctgccgccaggccgcccccaactccgggaggcagcctctggcaaaatggcccccgtctgagccctagaccccacagctgccaccgggcgtaaccaagggcaccacgtgaccaaaccgattgcttccatggtgatgtacccagcgcggacctcttgacccggaaatccacttgccgtgatgaatgctgggttatgtagtccacgtcaggtgttgagactaggccaaagtctcctggaagaggaagtcagaacgttgtaaacgcagctacagcggagaagggaggaggggtgaagccatttgacggatgtgacgctttccttgctctgggcggaagttgcccgccccacccgtaagagttagggtttgaccggagctagtgaggatccagcccaggctccagttgtccgcggttcctcctcctgtcgctgcccgtgtgattactgagactcaggtattttccttttgctgtcctccagcggtgcaggctttggcagtgttttgcccgaatgccactggtgctagagtaagaggcaaaggactgagcggagcaggtggaaagagaggcgacatcttcttgtgcagggctcgtcacccttgtaaacgcgttactctctaccaccctgagtaactgcgatcctttcctcttgccatctgcttatcaggacagaagatctggaccacggccaagctcacaaatcgggtattttttttcaattcctggtctttggggcctttattcgcctcccccttctccttttgtcgacttctcttaaccctccggccgcagagggttaatttttttttgtttttgtttgtttgtttttggcaacgtttccttaccctcatcactttgcgttttctttacaacgtacataatatggaaataggtctgtttttttccccctgtagctaaccgcctctcccttagacgttatcaaaatctttccttctaatgcagttcctctgtgggactctcccctaacctccgccccctccgtctgccgccctagcctccctgcaggatcctcaagcgtctctgcagcctttcagtctcctagagacagagattgcgaagacaatttcacttgcggtggaagttcttggcatcatggttctaagagaattctgccttgtggatttaggaatgatagtagacatttatttattttaggcgaactgagaattttgtgtgcattttctcctcataagtgatacttaaacggacacagtggaagagctggagtgtctagtgtgagcctgaatgctttggagtgtggaagagatattttttttttttgaaggaataatactattacttttgaatgactcgtgcgaaaagtctaagttatcatttgaagacccaa

SEQ ID NO: 12260 - DNA, 2300 bp, Homo sapien
gcccattgatgatgccaatacggcaaaagcttctaaagctgcttggcgtaccctgcgtttgctatctacaagagctggggcaagatcaaaggacagtttgggcaagtcaaaatcctcactaggataggtcagcagggagcagatgcaaatgttcaccacctcctctctcactctggaatgcttatgtttgagatgttccaggagtaaacaaagcacctgctgaggtcctacttccttcattagcttgaggaagattttcatgtattcttgtttgatcaccaacttgttgtccgccagcactttgacagaagctgctataactggtcccaagaactgctgtacctgctctccaaggcgaataaccagtaaatgcaggacttcaagtgtgccatgcaccactttgaagttagaatcgtctaacaaattatatagcaaactaatgaagccaacaagactagaatgaggagtagaactagggttaaattttcccagcacctgctttagttcttcgacggcctgggtccggttcttatagtcttcctgatccaataatcgtgaatgcagctcctgaggaataatcccaaatttaagattgctgttggaaagagtcactgcacagggaaggggatcttcaggaaatccagaggcttcaagttccaaataataaggaacctgacttccaaactgggactccaggcggcgattgtagtgtctcctcagggcagagggcagacgagaaatgtaagattgaaacctgtcttggccaagtcgctccccaatttgttgaagtgcggagaaagctgtctcagattcttcttctgtctcctgatcaccaagctttcgggctagggatattatcacctcggtgagatccagaccaagcaacaagtcctcagtagtaagcaagatgggaagcagtagtgctgtggaagctctaagtcgggcatcggtactttccagtccttgttgtataagcgttctcagcacctctccaggactacgtttcagacatatatgaaggatctgcagcgcatctttccgcagggctggattctcttcccgtaacgagacaactagttgaggcaaaagtgctaagctaaaggcctcttcaagctggcctgcctccccctgaccccggagaacgtccgagagaagttgcaagcagagccgcttctcatcactacctccttccacaagcactcggcccagtgcccgatacaaagcttccttgcgtcgggggaagccaagtcgaccgccccgccgcggcaaagcagcttgcaaagcctggaaggcctcagaaggatcccgggcagtgcggaggagttgaaggagccgagtgtcctcttcatctccccctgacaaaccgcctccagactcagaccagctgcttgagactgcctccgagggcatcaagagggccgaggccagaggcgaagttgtagtggggcaggaaccgtggtcccccgcagctccacggaagtagtagtttttctctcctctcataatgcccccaactcgactatcatcggtctctggggcggaaggacgactgcggctctggagccgataggtagagaggactggaaagggcggcagcagaagcagcgcggagggggcagccgccatgcagggttgtcaggtggtggtggttggaagaaaccattgccgtctccaaagggctcgatggagcccagacttccagatcctctccaagccccaagctgcagaagaggcaaaagaacagcttcagcctgccgccaggccgcccccaactccgggaggcagcctctggcaaaatggcccccgtctgagccctagaccccacagctgccaccgggcgtaaccaagggcaccacgtgaccaaaccgattgcttccatggtgatgtacccagcgcggacctcttgacccggaaatccacttgccgtgatgaatgctgggttatgtagtccacgtcaggtgttgagactaggccaaagtctcctggaagaggaagtcagaacgttgtaaacgcagctacagcggagaagggaggaggggtgaagccatttgacggatgtgacgctttccttgctctgggcggaagttgcccgccccacccgtaagagttagggtttgaccggagctagtgaggatccagcccaggctccagttgtccgcggttcctcctcctgtcgctgcccgtgtgattactgagactcaggtattttccttttgctgtcctccagcggtgcaggctttggcagtgttttgcccgaatgccactggtgctagagtaagaggcaaaggactgagcggagc

SEQ ID NO: 12261 - DNA, 2300 bp, Homo sapien
gaacctgtcctttgtgtttctgtgcaagcttacttatctttatgaaattgagatcatattgtacactcatctttgaatcctagatcactttgtgctataaaaatgttaccagtatgataactgtacataattattatatcagacaaggaatgcggttgctgtattactttggtttcagagtactatttccatagatgcctcctttttatcatttcagtttgcttcaagtcaggttaaaaaaaaagttttatattacatatataaatgcaaatacttaattatgatattttatggtcttagtctgtttttaaggtataagcatcaatcatgtaatgataatttgctcaataaaatagagttaatattactgtatattcatttttaacatatgtctttatgttaaacacatgtaaaactaacctataaagtaccaaagttggttgttaatgatttaaagtaatcaccccaacttctgcttgtgaaatctttccttttttttttttcccaactcatttgtattttactagtgctaggaagggaattcatttgaagggaagaaacatatagaaaagacattttcctacataacttataaatttcacctgatcctacataattttgctttgtttttataataacttaaatatagttctttttttagtgggtaattgaaaggtgagtttctgttatataattattagtaaatacaggaggataccattgcttttagatattcaacttttcacgcttttaatagagaagtggccctagtattaaatcaactagtagagttgttgaaaattacttatcctcccttatagttgctaatatgacacttcctatttattattttgaatgggtcactgtttatattctttggtgtgagttgacttttgacaaaagcataagttttcatgtgcttaatgtgcttaataatgtatcaaacactttcattttcattagttcatttaatctttacagtaactccctgagttaagaagcaagtcaacatctattatgttttttgtttgtgtgtgtgtttgtttttacagaagaggctcagtgatgttatgtgtcttgctcagggtcagaaagtatgtggtaggactaggattcaagcactgttcacctaactttatgttcattaagtttttcactgtactacactgccctaaatccattaaagggttttttgttgttgttgagtttgccttccaactatgaagacttaagaaatttatggatgtttgctttaactgaaaacagatactttcattaaatgattaatcttatgaatcaaatgtaaacaaaacagtttatgtatgtttctattttccttaatttgttcaaagttttgttgctagtcttaatatattttgccataacaatttgtattctggatttcctttttttttttttttttgaaacagagtctcgctgtgttgcctagactggagtgcaatggtgcaatctcggctcattgcaacctttgcctcccaggttcaagcgattcttgtgcctcagcctcacaaatagctaagactgcacgtgtccaccaccatgcccagctgcatttctaaaaatatttggcttcagaagttacgtacagtgatctgtaattttaatacttgcaagcttgatgtaaacatcaaatttttgaaaactgattttcatgaatcacctcccagagctagcttctaagccacattagcacaccaggtgtacctctgtgacatcaactctgatatctaccatctgattcaatgattcatttattaaataattgaattaatgccatatatttagtcattgtgcccagtgctgaagataccatgatgaacaatagctgagattcttcctctcaaggagctttcaacccagtaggttgtttataaatacccaagtgataaaaatctgtgtattgatactatatacatatatattagtattcatcttgttttagtacaggattgggaagtggttagctaggtatagctaatggagtttaaaatttaaggataacttttaccaatataaggaatttatgttataaagtttattgttttcattttttcttagatgcatagctctcttaggtcccttcgtaatagtgcagctaagaaaagagcaaaactgagtggcagtacttcagatcttgaaagccctgattctgcaatgaagctcgacttgacgatggactccccgtctctgtcttcctcaccaaacatcaattcttacagtgaaagtggagtttacagccaagaatcattgacttcttctctgtctacaactccccaggg

SEQ ID NO: 12262 - DNA, 2300 bp, Homo sapien
acctcatgatctccccgcctcgacctcccaaagtgcgctgggattacaggcatgagccaccacgccctgccggctaaatcagtttttaagataatgtatgtttctgccagcggggatcacattttaggcaaagagaagagcccacttaaaggtttccacgcataaaagggctgtgggaacagtaggttctgtggagttacggggaggcagaaacagtgagaaggctggcatgattatgaaaacaccgtattttccattctaaaagtttaggatttctttaaaaaaaaaaaaaaagtggaggaggaaaccagtggaggtttttaagcgggggagtgagagcaatagcaccggcttgaaaggtaaaatgtaaaaactagataaaggaaaacaacgaatccacagtgaatgaagttgaagatgcaagtagatttttataaaatggctatttgagtgaatgacatctcagagataatcttatttactgataaagaaattgaggccaccttagaaagaccaaagaaccagaaaaggagtgaaggtcatgccaaacagtccctgcgtaacagtgccagcagcaaactctggtctgtcttcccaacgcaccactcccttgactattcttcccacagtaaacatttaaaagctgctgtttaaacctgtgaaacaaacaaacaaaaaacatggccacactgtcagagaatccaaaaaagttagcttggaaagtagaagaggcaaatggaaagggaaagctactactaggtgcagtgtgatgcaagtaaaaggtaggaaaaaagactgaatttggtatttcgaacgaaaggtgctggtgagaggatttatgattaacctgcgttgtgacaagaaacgtcgtcttgtaaataagtatttccagaggagacagatttcagatgaggaacttggagcccagtagtaatactaatgcacctggaacaacagattacatggtaagtgacaggtgaatgcgggggcaccaatgtaacagaatcttaaagggagagaggccagatttgaaagaaaatttttttttattaaagtggagatggtggtacaactgaagaggactgctaagattgttaacgcacagtccccctcaatttgtccagaggataacatatcccttcagatacaaagatttttttttttgcttggccaactttagtcaggtttctgaatcttctgctaggctcttctgtacactttctttgtaaaatccagtttaagcaaagaactttgctaagtcagattagcaataaacccccatccttgatagctgatcatcctcaatatctgatcaggttcttcagtctccaccatcccccaggtgatgcctcattatcttggcctgtcttcagcaaaaatcctattaggtgggtttagccaaaatcccccttaccctgatgtttcctcttagtaattatacattcacttaccaccgctccttggctataaatctccacttgcccatgctgtatgaggagttgagcccaatatctctttccctactgcaagtctccattgcagtcagtggtccctatacctgttgcgatggtcctgaataaagccctctttttgtgctttaacaagtgtcactaaatacttttttctttaacaatagcccgttctccaaacccctaactccagaactgtttagttttcaggaaacctgagtgggcccagggtctataccatcgtgagatttgtgggtttaaggctgaatttctgcccgtttttaggtaaatgttttagtgtgaaagcttgaacaattgtagggaaaaccttagatttgcccccaaaaatgacattttgccgtttttggtggggaggggtcagggcgctgtgtttaagatcaggcgtgtgaaagcccctaaacgccctcctttcctttgggaagtccctatggagggaaaggcaggtaggcgcagcggtccccgccctcgctcgcggcggggcggggcggggctgcgggggcggggctggggccgcacgggcagcgaggatccctgggagggccaggcctgcgcgctgcgaacccacgtgactttttcgcctccagggacactgacgcatgcgcatcgtgccctggaccaggcggccgtggcgcgggtggcggctgctgtgctggctgtggggacggaggcggtgaagtgccatcttcggctaggtcgtcacaggctccggctcatggcatcaagtggcatccatcataaggtctgctggggcgggctccttgaaattagctggggcagagggtggtacttggtactgaaaggggcctgccg

SEQ ID NO: 12263 - DNA, 2300 bp, Homo sapien
cagctactggggaggctgaggcagaagaatgacttgaacccgggaggcggaggttgcggtgagccaatagcgccattgcactccagcctgggcaacgagagtgaaatgccatcttttgacctaatacctttttttttttttctgtatgcctcttattcctgtagaggtacttaaaaattataccattgactattctttttcataaacacagcaatatataaaaatctgaagtcatcactaaagactgaaaggagttttgggtagagcaaaacaagtagctttgcaataagcaaatctcatccacaaggcaatctggagatttgggatgtaagaagaaaagagactatcataaccactggttttggcagctgtttttaagggctaagtagtcacacgccgactttttaaagtctctacatattaaacactgtgttccagaaactagattttgtatatgtatttacataaacgtctacatcaatcttcggctttttggaaaacgtaccatttggctggaactacactaccttcttcctccttcggctatttttaattttttttgaagtcctatcttccatgtagatttgttaaaacataccacagaaaacagcacatacaatttttatcatttgacttttaaacatcttctttcttattcaattataagcaaggaaaaatattctgagactttacacaaatagtgtctcataccacctatgagccatctatgctcaacccctacttcaaagttcacaatctaagtactagtcctctttaacagaactcctttccatcactttatccctactagagagtgaacagtggaaagttccaacttttgcaactctagaatgaggttataaatctagagggaggaggaaaacctgacagtagacgcttgttcttttcactccattcaagctcccatacagcctaaaacacttaagtttcaacatgagcttcatacgtccctgtccaaaacttgctttctcaagcctcacgctttccagctgtagcaaagtttatttctgaacagattaaatcagttgctaaataatctgaagtcctcaaacagaaggccatatgagtatcaaacgaaaaaaacaacatttgaatcagcataaattcacatggtattatggcatcattactaatacactgagcagtattatttattaacttcaagtattaattaacttaaagatgtgattttggagaaaaacaccagtggtggtctctgattaccaaagttaaacattcttaagcacaatcccttaaaaaatcctgccaggatcaatgatgtgttttttctgttttaaagtatcctgccaaaagctgtgggtgctgtgacttagggtcgcaaaagtgttgcttatgtagtcagaagacagaacgtgccctacaaggcgctcacatgccttagtaatagaacgtatattatcttcccaatcctctggcggctgcaaatgtgctccttccacttccagccaccccagccgtgttccagctccgggagaagcaagggctttagaattacccccaaatatcttcctaaatccaggcgaaggaggcccacacttctccaccctacctaacgcacccctcaagtgaaacgtttggtctaagaaaaaaataccttgcaccgctccacccaacaggtgggaaggagaaaggaatggacagctgagcgctgaatccgagccaggcctcaaacagggcgggagagggaggccgcggccagagcgcggcctgaaacccggcaggcccctttcagtaccaagtaccaccctctgccccagctaatttcaaggagcccgccccagcagaccttatgatggatgccacttgatgccatgagccggagcctgtgacgacctagccgaagatggcacttcaccgcctccgtccccacagccagcacagcagccgccacccgcgccacggccgcctggtccagggcacgatgcgcatgcgtcagtgtccctggaggcgaaaaagtcacgtgggttcgcagcgcgcaggcctggccctcccagggatcctcgctgcccgtgcggccccagccccgcccccgcagccccgccccgccccgccgcgagcgagggcggggaccgctgcgcctacctgcctttccctccatagggacttcccaaaggaaaggagggcgtttaggggctttcacacgcctgatcttaaacacagcgccctgacccctccccaccaaaaacggcaaaatgtcatttttgggggcaaatctaaggttttccctacaattgttcaagctttcacactaaaacatt

SEQ ID NO: 12264 - DNA, 2300 bp, Homo sapien
aggataattttatttacttggggaatggacacctagcttctgaaatccccatagctgggcgggaaagttgaagatttctcacgattcattaagtataccttcttctaaacgttctgtcttcatttcattaccttcttgtcttcttccccttttctccatacttttttcagtgtctggttaattttctgaatcatttggggttctgtagggacagtaacatctattttattcttttgaaaaccttacaccaaatatgcacatgcatgcatgcacagacacacatgctcttcaatcttttatttctatattaaacatatttcctccaatgttggtatgtttttaactttgtttatggtgtcttttatcatatggagttttatttttccttaatgtgcttctgttttaattcttactggttcctgagttttgtgcctattttaccaaaaatatataaatcctgtattttgttctaacttttctatagttttttgcttattcatttatctgaatttaatttctatctgtcgtgagatagacattagccttttatatactcccactgttgaattaaagtatctcctatatcatacaccaaatactcacacacattgatctcttttttgttttcttggctctgtactgttcatccatttttctgttacctggccagtgccaaacgtgtaattactatagcttcctagtttcttatattatctttcaggaaaatgcctgctgcattatccttttacaaagtcattttgcatttttgtattctagatgaatagtagaatttgattttttcttgttccactaaacattttttagcgctttattgaaattgtgttaaaattgtggtttaacttaggggagtgtagttttatactttttaaaaatctctcttgattctaagatacttatcttgaaagtatgtatctaaaagctttatcccattggagtattaaatccagtgattaaaattgcttacagaaatctcttgacatgactaggtattttaaaatactttgtaacaaactttttttttttctttggagacagagtcttgctctgtcatccaggctggagtgcagtgttgagtggtgcaatttcagctcactgccactttcgcctcccaggttcaagtgattctcatgcctcagactcccgagtagctcggattacagatgtgcaccacaacgcctggctaatttttgtatttttagtagagatggggtttcgccgtgttggcaaggctggtctcaaactcctggcctcatgtgctggaattacaggtgtgagccatcgtgcccagcctgtgataaaactttaatgatagaattttagaattgagaggggcttttgagaggtttaaagtatatgtatactttttttttttttttgagacagagtcgcgctctgtcgcccagtctggagtgcagtggtgcaatcttggctcattgcaacctccgcctgccgggttcaagcaattctcctgcctcagcctcccaagtagctgggactacaggcatgtgccaccatgcctggctaattttttgtatttttgtagagatggggtttcaccatgttggccatgttgatcttgaactcctgacctaaggtgatcctcccgcctcagcctccctaagtgctgcgattacaggcatgagcctgtaatcacgcctgtaaccatttcaccatgcctcatgaaaatattcttaaattgagataaaatttgcctctctttaacttcctacttgttttaattttgtcttctgtcataaatcaatctatacaatagacatttcagatttaacaaatacttacatgtctactcttacctatttgcaatgtgtacattttgtatttaattttctatttgataaagttacataaaaagtacatttatctattctctttgttttctcactctttttaagcagctgttgtatgctttctgttattctgtctaccctttaatccctacttgcataggaagcagttgaatataatttttgaagttagcattatcttctaaatttagaaataatattttaaaagtgattttatcttggaaagataacttaagagtaatttaatttttcagaacttttgagcatgctgttctagctgcaggaacagatttccgttctgacagactgtgggaaatgtatataaactgggaaaatgagcagggaaacctgagagaagttacagctatatatgatcgtattcttggtattccaacacagctgtatagtcatcattttcagaggtaggtgggaaattctgatcattgaaacatc

SEQ ID NO: 12265 - DNA, 2300 bp, Homo sapien
ctaaagttcgtcagtggccaggtatggtggcttatgcctgtaatcgcagcactttgggaggccaaggtaggcgggtcacctgaggtccggagtttgagacccatgtaggcaacatggtgaaaccctgtctatactaaacatacaaaaattagccaggtgtggtggcacatgactgtagtcccatctacttgggaggctgaggtgggaagattgcttgaacctggaaggcggaggttgcagtgagctaagatggcaccactgcactccagcctgggccaaagagcaagactccatctcggggggaaaaaaaggtctttagtgcagaagaaactggacctgttatcccttgactccatgagtggcacagtgatcacttatataactggccatttacccagtgacttgtagcttgtttgaagttaatttctgattaaggcaagtggggattcagtagcttgtatgtatagatttaaggtagagaatctattttactacaagacaccccaaaaaaaacttagcttagaaggaatattttgcctaggttgtgtatctactagcccaatttaagaaaaaaagaaaaaatatgaaagtggttaattaggaagttgtgtgataagttttagtgttgttaattggattttgcacataattgccaacagttaaaaatctaccactattctaagactaaaatatctgtgaataatacttaaatataagcagtgatattgaaaattttcagtatacagtttgtgagatttatttttttccctttttcttcccaagctaattacagaaatagaaaacatgagacatagaatcattgagattcatcaagaaatgtttaattataatgagcatgaagttagtaaaaggtggacatttgaagaaggtgtaagtgtttttgttttgtaatagtctttaaaatacaaagtaggaataatttatttttctttcaattttgatagtactatctctgttgtaactttatttttgcatatttaagccataacttcagatgtttgtctcatttattgtaatcattatcagtttttccattttccctgatgagttttagaatgtttgaatccagatttacttgaattgcaagatatctgcttaatctgaacaattttattctaattgttcaatttttaaaagtcaacttcttggggttatactttacatacattacaattcacccattttagatatatagtaaaatgaggtaatttcccacagttttaattctttggttttttttgactgctttactgagatataattcacatgccatataattcacccatttaaagtatacagttcaatagttcttagtatattcacagatatgtacaaccatcaccacagtcaattttaaaacataatcaccacctcaaaaaataacaccttaacttttagttgtcactacccctacctcctcagctgcgaccctctacccccagtgctaagataccaccaactgctttttgtttctgtagatttccctataatggcctttcatatgaatggaatcttagaatatggaatcatttcacagatatatgtatatacattgtagtcatcacagcaatcaagatacagaactcttttagcactccaaaggtccccttggcccctttccagccagagttcccctctccactcctagcactaggcagccattgatctgctttctgtcactatggttgttcaattttaaaatattcaacaaagtataaaatgttctgtacattaaaaagcatgtaattggcaaaatggcagaatagagagaaaatgtattatttcatttgtttgtaaagcttaaggaatttaagggttaattttaaaagttttttaaattatgaaatatgattaaaaattttaatcatcaattatatttaaaattatttgtattaacactgtacatgtgcatattttggtgatattggtttactttcattggcatgttacaatttcatttcagattaaaagaccttactttcatgtgaaacctttggaaaaggcacaactaaaaaactggaaagaatacttagaatttgaaattgaaaatgggactcatgaacgagttgtggttctctttgaaagatgtgtcatatcatgtgccctctatgaggagttttggattaaggtaagaaaatcatgtgctcttaaacttgaatatattataaacattgatctagtgactaaccttttttgtacttctgttgaatgttgttcatataactatatctgttgcattaggagatggtctgcttgcaaccagatttgactgctgcata

SEQ ID NO: 12266 - DNA, 2300 bp, Homo sapien
aaatcaaaacttaaaccacaacctacggattttttaaaaatcacacgcattaatgttcagtatttagtaaactgttgagaaaagcaagttggatacaccgttcccacagaaatcttcacatcccttcccatttccctagtagccggcgccccgctcccaggagtctcatccacaccactattcctcggcctctccgccctagcccccaatatcctcgggttcctatttttctggcctccacccccactcaaggatcccaatgaggttctaactctacaattgcagcctgtgtgccccaagaaataaagctgctcccctgccccagtagagaacgcccgagaggcgggagcgaggcaccaaagcacaagctgggcctctccggccttccaggccaccggccgcgggaagacgagggcgggggcacagaggaatacggaatgtatgggcatctccaggggggtgaggcgtccctcagccgcaccagcccggccgcccctacgcctctggtaccgaatctgaaccgtgttcctgcagaaacttgataatgtccttcttgggcagctgctcactgcgcagctgctccacggtccacgcccgctgtggaacggccgccgccatcttcccccgctgcctccgctttactgagccagcccgccgcagttcggcatcgccccgccccctagggcggggcggggccactcacggaggtcgaggggcgggcctctgctctagcagtcgggattggggcctgtctttgagtgacgtcaaggctgtgctatgagggcttctttgttgagtccgggttgaaaaacctaccgcggtcgtctctgcagtcgactgagtagaagaccgctagagatcttcgattctgaattagacaccttgtgaagcgacctctgatggtagcgacatttatcaaccattacccacatttaaggcagctatgcctttaaagtccagtctataacctgttaaaagaaaacagcattcaggctccttatctcgttttatctagttctagcctaaaaagtcacacctgaagtgcttcagtccttgtcgatccgaaaacccatatcccaccatttcccttttaaagatcacacaaccgaaacttaaatacaaactgcccatccccttccccccatacaaatacgagaaagtttgtccaaaacgaagttcagaaactttaacaaataaaacaatttataaagaagccgcactcaggatgccacttgctgatgagaatgacattattaatgctcgtaactctgtgatgtatatttttttctcagtacacgaggaaacaaatttacagaggttactcaaagtcaggtttagagagaagtcaggaattatttgagacagaaatcttcgttagagtggaataattgcacaccgacgtttattataatgctcttacctataataaagatttaatagttgaacatcaggactccttacttaaaaaaatgtaggctgactctgggcatgttgcctatgagttagctctgctttgcaaggagcattaaaaaaaaaaattctgacgaatagctggaccagaccacgttcacttccctttaaacaatgaaaatattaaaataatgggttgccactcccagcgcggtgaaaaagagacttggcattttgttttctcagcccagatagagatataagacaaattattccatctacacatttttgcttttcactttatattctgatttaaaagtacaaggaatgaggcacgttagacgctcaataacattaagttcccaaactggtggctattccattgtccccgggtatgtaatattttacaataaatctctattataacattttaagtgatttatcacgttagcaatgacgcccagccatctaatcattggaaacggaacttaaatttagagtttgttaaaacaaaacaccggaaccgcaccggggaccatatttagagtaacgccttaataatgcgcatgagtctccggcagggctgtgaaggtttccgggaagccagccaatcattcccaacggaaactcagtagcggcattttcaactggataaactggccttagtcccgccttctcgttccagagttttgtgcgaaggaaaccgatggggatcggaaccgtagcggttgagctgctgctgctacggatatctgacagaagccttcggtggttgtcggcctaatgagcggacggcaaagaacgctttttcagacgtggggctcaagtatctcccgatcatctgggactccgggttgcagctccggaactgagcgacctcagagccctgg

SEQ ID NO: 12267 - DNA, 2300 bp, Homo sapien
tcccagctcttacttcaaaattagtccagtctaagatacctgtcatttcggccatgtgggattgcgggatacccatcacctggtagcaagcctcgatctgctgtgtcaccaagggtttcgttggggccatgaagaccacctttcctgaagggaaccagcggtagaaattgtacatgaccacggcggcaataaaggtctttcccagtccggtaggcagacacaccagcgtattgcaaaacagagcagcccgggaaatgtgcagctggtagtcccgcactgggcaattggtagggtaaatccacagggcgcccgcggaggtgcagaacccgccattctctagacacaactgccgctcagcctcgtacgccgcgacaagcaacacatcatcgtccgactccagctgagcctccgctgctgctggcaaaggcgccttggagctgccagggctctgaggtcgctcagttccggagctgcaacccggagtcccagatgatcgggagatacttgagccccacgtctgaaaaagcgttctttgccgtccgctcattaggccgacaaccaccgaaggcttctgtcagatatccgtagcagcagcagctcaaccgctacggttccgatccccatcggtttccttcgcacaaaactctggaacgagaaggcgggactaaggccagtttatccagttgaaaatgccgctactgagtttccgttgggaatgattggctggcttcccggaaaccttcacagccctgccggagactcatgcgcattattaaggcgttactctaaatatggtccccggtgcggttccggtgttttgttttaacaaactctaaatttaagttccgtttccaatgattagatggctgggcgtcattgctaacgtgataaatcacttaaaatgttataatagagatttattgtaaaatattacatacccggggacaatggaatagccaccagtttgggaacttaatgttattgagcgtctaacgtgcctcattccttgtacttttaaatcagaatataaagtgaaaagcaaaaatgtgtagatggaataatttgtcttatatctctatctgggctgagaaaacaaaatgccaagtctctttttcaccgcgctgggagtggcaacccattattttaatattttcattgtttaaagggaagtgaacgtggtctggtccagctattcgtcagaatttttttttttaatgctccttgcaaagcagagctaactcataggcaacatgcccagagtcagcctacatttttttaagtaaggagtcctgatgttcaactattaaatctttattataggtaagagcattataataaacgtcggtgtgcaattattccactctaacgaagatttctgtctcaaataattcctgacttctctctaaacctgactttgagtaacctctgtaaatttgtttcctcgtgtactgagaaaaaaatatacatcacagagttacgagcattaataatgtcattctcatcagcaagtggcatcctgagtgcggcttctttataaattgttttatttgttaaagtttctgaacttcgttttggacaaactttctcgtatttgtatggggggaaggggatgggcagtttgtatttaagtttcggttgtgtgatctttaaaagggaaatggtgggatatgggttttcggatcgacaaggactgaagcacttcaggtgtgactttttaggctagaactagataaaacgagataaggagcctgaatgctgttttcttttaacaggttatagactggactttaaaggcatagctgccttaaatgtgggtaatggttgataaatgtcgctaccatcagaggtcgcttcacaaggtgtctaattcagaatcgaagatctctagcggtcttctactcagtcgactgcagagacgaccgcggtaggtttttcaacccggactcaacaaagaagccctcatagcacagccttgacgtcactcaaagacaggccccaatcccgactgctagagcagaggcccgcccctcgacctccgtgagtggccccgccccgccctagggggcggggcgatgccgaactgcggcgggctggctcagtaaagcggaggcagcgggggaagatggcggcggccgttccacagcgggcgtggaccgtggagcagctgcgcagtgagcagctgcccaagaaggacattatcaagtttctgcaggaacacggttcagattcggtaccagaggcgtaggggcggccgggctggtgcggctgagggacgcctcacccccctggagatgcccata

SEQ ID NO: 12268 - DNA, 2300 bp, Homo sapien
tgatttgaatggatgacagaaagtacagatattctttatcaccatctgttctgagataatagacgtaaaggctttttataataatattgtcaataacttccatcactagtaactattcgccaaaattctctttaacagtacagttacaatacaaaataccgtttaacaaaattattacctggcaataagcatagtttccgagagctttatgagcttcatcaataactaaacactttatttcagcagcgggacaagctcctctagaaaggtcatttaccatgacctgaggtgtaagaaaaagcactctcttactgcaccatatttccttcctggtggaagcttgtgtagaccctgaaaataaaagtgacattctacattctaaacttcagactgttatctataaaatataaatagtctggctttttcagaatgcaaacatgctttggtaacattaagagaaaaacaatttgacaattcatcggaatgctacattttaaagttctggtgtggtccaaatatcaaagctggcacttatctaggactacaaccaaattgtctttagaaaattcctacaaaatggcatatttgaagagaggcaaattcttcaactgagaaatctttttcaggaagaatgccaggaaatatcatgttcagttacccatggggtatacgcacataatagcttcaaaatactatgacaagctgcagatattctctgaagattgaataaagcaaccctattcatcagttttgggcttgctgcaagtagagaatgttttaagagggagggcgtaagatgcacatgttgtagcttgggaactattccacatgggtcaggaattcccagctcttacttcaaaattagtccagtctaagatacctgtcatttcggccatgtgggattgcgggatacccatcacctggtagcaagcctcgatctgctgtgtcaccaagggtttcgttggggccatgaagaccacctttcctgaagggaaccagcggtagaaattgtacatgaccacggcggcaataaaggtctttcccagtccggtaggcagacacaccagcgtattgcaaaacagagcagcccgggaaatgtgcagctggtagtcccgcactgggcaattggtagggtaaatccacagggcgcccgcggaggtgcagaacccgccattctctagacacaactgccgctcagcctcgtacgccgcgacaagcaacacatcatcgtccgactccagctgagcctccgctgctgctggcaaaggcgccttggagctgccagggctctgaggtcgctcagttccggagctgcaacccggagtcccagatgatcgggagatacttgagccccacgtctgaaaaagcgttctttgccgtccgctcattaggccgacaaccaccgaaggcttctgtcagatatccgtagcagcagcagctcaaccgctacggttccgatccccatcggtttccttcgcacaaaactctggaacgagaaggcgggactaaggccagtttatccagttgaaaatgccgctactgagtttccgttgggaatgattggctggcttcccggaaaccttcacagccctgccggagactcatgcgcattattaaggcgttactctaaatatggtccccggtgcggttccggtgttttgttttaacaaactctaaatttaagttccgtttccaatgattagatggctgggcgtcattgctaacgtgataaatcacttaaaatgttataatagagatttattgtaaaatattacatacccggggacaatggaatagccaccagtttgggaacttaatgttattgagcgtctaacgtgcctcattccttgtacttttaaatcagaatataaagtgaaaagcaaaaatgtgtagatggaataatttgtcttatatctctatctgggctgagaaaacaaaatgccaagtctctttttcaccgcgctgggagtggcaacccattattttaatattttcattgtttaaagggaagtgaacgtggtctggtccagctattcgtcagaatttttttttttaatgctccttgcaaagcagagctaactcataggcaacatgcccagagtcagcctacatttttttaagtaaggagtcctgatgttcaactattaaatctttattataggtaagagcattataataaacgtcggtgtgcaattattccactctaacgaagatttctgtctcaaataattcctgacttctctctaaacctgactttgagtaacctctgtaaatttgtttcctcgtgtactgagaaaaaa

SEQ ID NO: 12269 - DNA, 2300 bp, Homo sapien
tattagcctttgatcatgcatacatgtaaataaagtagttagatgtggatcccagcaaaatgtgtgcaatcaaattaacatatatttattgagtgccttctgtgtgccacactctattccctgctttatggctataaccgttagcaaacagagaaaatattctgtttatgtggagtatatatactagcagggagacagacatttgctcacattaatgcttattatatttattattcaaaaaagcagagggccaggtgcggtggctcatgcctgtaatctcaggctttgggaggccgaagcaggcagatcacttgaggtcaggagttcgagaccagcctggccaatatgaggaaaccctgtctgtactaaaaatacaaaaattagctgggtgtggtggcacatgcctgtaatcccagctactcagaaggctgaggcaggagagtcacttgaacccgggaagcggaggttgcagtgagccaagatcaagtcaccgtactccagcctgggcgacagagcgagactttgtctaaaaaaaaaaaaaacaaaaaaaccagagaggtaactgcttaagtctataagtagtagaggaatcctgattaaagtagcattcttaggggaaaggagggatggtggagattgtaagttttagctaataacttagagataagtaagacttagaaattcactatacgaatccttgattaggaactttgttacaaatagaagtatattccaggatacaacctagcagacatacaggtactactatgttggacattccaaaagctattcttagtttactgtcattgaaagagtaaatttaacaaatgtatatggtttttattaatatatgtttttaaaatatctatttttaagaaattagaataattcagttaaatgttagaaatgtaaaactcactatattcttatgtattcattcaatttgttcttcctacaaatagttaccaagggtcttttgggtattaagtactggggatacaaaaaagttaactgattaatgataacttgatagtttcacagtagtgtactttataattttgatttatcggaataacttttaaggtataaaagaatatcactggaacaatgtaataatataaatattttaatatagagtgaaactcctctcttagatttggctttctgttttgttttgttttcctgtggctttttaaattttccttatttatagggagaatgcagctatgaattggaagttgaatcttatttacaaatggaagatgttacctcaacatttattgctcccaggaatgaatctaataatcttgccagtgacacctttatcactcacaagaaatcgtcatttataaagaacataaatcaaggcagttcatcctcagtgatagaatctgatgaagaatgtgctgaaattgttaaacaaactcatatcaaacctactaaaattgtttctttaaagaaaaaagtgtctaaagaaataaaaaaagatcagcttaaaaaagaaaataatcacggtattatagattctgtagataatgacagaaattccactgttgaaaatatttttcaagaagacctaccaaatgataaaaggacatcagatacagatgaaattgctgccacatgtactattaatgaaaatgttattaaagaaccgtgtgtgttattaacagagtgtcagtttacaaataaatccactagttcacttgctggaaatgttttagattctggttataacagtttcaatgatgaaaaatctgtttcatctaacttatttcttccattcgaagaagagctttatattgttagaacagatgaccaattttataattgtcactcattgacaaaagaggtactagctaatgtagagagatttttatcttattctcctccgcctctcagtggactctcagacttggaatatgaaattgctaagggtactgcacttgagaatttgcttttcttaccctgtgcagagcatttacgaagtgataaatgcacctgtttgctgtcacattcagctgtgaattctcaacagaatttagaattgaattcacttaaatgtataaattatccatctgaaaaaagttgcctttatgatatacctaatgataatatttctgatgagccaagtctctgtgactgtgatgtacataaacataatcaaaatgaaaatttagtacctaacaatcgtgttcaaatacacagaagccctgcacagaatttagttggagagaacaatcatgatgttgataacagtgacctcccagtattgtccactgatcaagatgaaagtttgc

SEQ ID NO: 12270 - DNA, 2300 bp, Homo sapien
cttaaactgctcccaagatcagtgcttatttttcagacccagcacttaggggatcagctggcaccacccagatcaataaactggctcatctgattttgtgactccccaaaccagaaacactcagcgcaagaagacagcttctactccctatgatttcatccctgaccaatcagcactctagttcactgggttccccgcaccaaattattctcaaaaactctgatccccaaaagctcagggaagactgatttgagttataataaaacactagtctcccgcacagccggctctgcgtcaattactctttctccattgcaatttacttgtattgatcaatcagctctgtctaggcagcacgcaaggtgaaccccttgggcggttacagcatgttgccatttaagggacagaggtactgtcccttggcctctaggctttctcatcacactttcttatccacaaactgtttaatccaattttgcttggaaaattactagtcatcttatgtaaattcctgtggccattcacattgggacatactacatactacttccttcttacatgagaagtggctaatttaaaaaaagtgtgcatttctgagtgcctgctgttaatacttcagggttcctattttgtctaaatgtgtgagccacggccatcttcatcaggcacagaaacgtcctatacctcaatttcaggtgctttaaaatctgaatgaccatcccttcaaacttcctctatcaaagtatatttcatacatgccatttaacctgttttaaggtgggtttttcccaaaaaagtagtgcaaatccatgtccaaccattttctcattatggtgtacaagaaagaaacttcattttatccaggtaagtttgcttcctttccccctacctccaactgtttttccttatttgcattcacgtggatgttttaaatttatattttggattttgattattcagtgtgtacaaaatttagtacatgcaggatttagaagggactgcaaaagtcactttaaaaaaaaattaccaccttttcagtaaagcctcttaatggggaaatgtggtatgtgactagaagttgactaattttcttagatggaagtataaaataaaaagaagctctgttgtcacaaatgcggatggggggaagaggacagacttcatgcaggactggagttggacagggttcagggctgagaacacaccttactaccctggcttccccttctctactttcaagactgaaccaatgtgccctatacaaggcgaagaatacacccggtcactccgcggtggttagagtggagattcactgggtgcagtctaaagcgggacgcagtctgggggccaccgtcacaagctgcttacagcaacctagagttgtcgagattaatgtttctggaatgtgaagtgacttaaaaaaaaattaatcacttcctggctcggtgcggttgcctgtaatcctggcactttgggaggccgagatggaggatcgcttgaacccaggagttccagactaggctgggcaacatggtgagacctcctctctacaaaataaaaataagccaagcatggtcgcgcgcgcctgtagttccagctactcggaggctgaggtgggaagatcccttggagttccagactgcagtgagccgttattgcgccactgcactcaggcctaggcgacagagcgaaaccctgtcccccacgcccaaaaaatcgtatttcctgagggaacagttccaactaaacatcccactttgtgcgtaactttacattcaatccatcatcacctcaagaacaaaatgttctttctccgcctcaaacatggaggacagaaaaacagaagttctctcaaacccaccaagcacgctgttttcctgagacggaaaagaaggataacagccgctacggcgcacagcctgtaggggaggacggcaaccaggaaaggccaaacttagccgcagtagtgccggggcgtgctcgcggcccacggcgtcccacgtcgtcccacgtcagccttgtcccggcagagcttcacgagaggaaaggcgggattcagggtgggcgcgtgccctacgaagacgaaacgaactttgaagacaactagaggagctcgccccctgcctgtgacagcttagggtcgcctactttttgtggacacactgccgtccacggagtgcagaggccgcctgcagttttcttgcgtccctgtgagacgcacggtggcgcaattcccgagcgtgccaatcccgggctggctggagggcgggctcttcaaatttgaattgcggaagtgtttt

SEQ ID NO: 12271 - DNA, 2300 bp, Homo sapien
cgtcttccttttgcctcacaaacacctctccctgaggcgcgatcatagattcagagcatgtagtagtataaaaaagatactaacttgtatataaagtcaaatattttaaagtatgttcaagttatagtgtgttttctgcagtattgcgaagtcttcctttctgatctccttgcataccttttttgggctggtttcagtctattcaccataccataaccagagtgatgaaacctaagtaaagctctttaatggcctcacattaaagatcaggatccctaacttggtaaaatgggccctgtatgaaagcatgaccccttctctctcacacatacacacactctgggctcatgttatgtgactcattttctcactcacagtcacattggcctgactttaagttccttaaaatgttccatatttctgcctgcttcaggccttttatacatcagaccccatgtgccatggtcactacatgaaatttcttttctgataaagattttcctgtctattcctcagtctggatcaaggtctcatccccagcctcatcccacagtctcagggcttactttgcttttcctttttggcacattttacacttggtaatatgatgatatatgagaagtatctatatcctctcctaggcttgtaagcttggtgagagcaacatggtattagctactttatctcaatatgttaaacaggaactagttgagaaaaaggggaaagaagaaatgaaggaagaaaagggaagtgagaaagctttcttaaaggtcagaaagttttctacattgggagatttaattgttttatctttagtattttgtaaaaatccactcactttaagggcaggagttatttttctcccttaaaacaaagagtattgacagaatatattcacattggggggattttgttccatgatgtaatggatttgtgaaacaacattaaaacaaaaaagaaaactagaaaaatgcaagtagggtttgtaaactattaatttcttttcctctctcttcttcctcctttcctacactctgatccctgtcataatatttttacaaactctgagaagaaaaaaagtttaaatttattctcaggggcaaaagattactaaaacacaaactgttactcttttatatagtttcagcagctttaacatttgaaaatgcaaatagccttaagttaaaaaaaatctagttggtgtttcaattttgtatatatcattttgataataaaatcatttctttaggccaaataaagaaaaaacaaagtttcatgtttataaaacaattgccaagctacagatacaacagatatcttctctttatccctctctcttctcttcctctcatctcttcctgagtctcatcaaagcactcatgccaagaaaccactttatccagggaaggtggccacataacccaagaaacagcaattgatctacaaatgctgacagtgagatacaagctctggaaaatgaactgaccaaactggaaacagcatgttgaataactggaaggatttttcctctcaaattctaggatttctttttttctttttctttagacagggtctccctctgtcactcaagctggagtgcagtggtgctatctcagctcactgcagtttctgcctgcagggcccaggcgatcctcccacctcagcctcctgagtagctgggactacaagcatgtgccaccatgcccagctatttgatatatatatatttttttttttgtagagacagcatttcactatattgcccaggctggcctcgaactcctgagctcaagagattctcctgcctggaaataacctcttttatacttaaagcaaagctgaaagcaagagttcctagcccaagatggctagcagaaaggaagcagcagctgtgcagttggggcggggcccaattccttccctggccgccagggggagtctacccacagctgactctgctcaccttaagcgcgccacttggcgcaggcgctgaggcgccagacgtccctgcgtctctggttgggacgtcctgaaagagagtcgtcacatcctcctcaggactctatggttccggcctcaggactctatggttcccgcgagggacgaggggcaacgtatataaatgcgcgcaggcgtagttaagagagcgcattttgacttcgaggcaccgccgacgttactgtgtcgccatggggcgccgtccagctcgctgttaccggtattgtaagaacaagccgtacccaaaatctcgtttctgccgaggggttcctgatgccaagatccgcatctttgacctgggt

SEQ ID NO: 12272 - DNA, 2300 bp, Homo sapien
gccaacccagacaaacttgaactttgattcttaatagtttggcaccattgaggcagacagcaatgaaaactcaaggccttctcaaagcaagggatcttctccactctaatttgtgacaccaaagagtttcacaatcaaagtaaaagtaggccatgttgttgatgaccttaggagcatgtcagaaacaatggtacatctatacagaatatgtctttgtcataggccacagataacccccaataatagaattttaagccatattatcagcaccagtgaaaaataaccaagcaaataaaaggagaaaagccccatgaaaaaggataccatagatttcagctaagaaaaatatcagacacatattacaaggcaatgatgcatactatatgtttagatacatatagaaagaggactgtatttgtcatatatatatatctgaattaaggagaataaaaaaatctgtcacaattgtataagccagcaaaatattaatagcttaaaagttacaatttacaatagcaaacaaagctgtggattacctgttatctcatctaataaattatatgcatacatttaataaagaaagcttcaaagtgcttgtaaaagacattcaagtgtatatgcatatggaaggatagagtgagagaaaaggaaagagagagattcctacgtagacaactctatagatctattttggttttgtttttccaattattatacactttattgttactaaagtacaattttaaataatgttgagcattctcacttgtaattctaaaaaaatttctaatatataagcattaaaaataaagcatcctctacctttttgttggatcttctttatcagattaatcaagttccctttcattcctagcatgttcatagttttattataaataggagttgatgtttcccaaatttttctccatctagtagaaatatgttttttcttcttttgccagttaactatgttaacacattttctaatgttaagcaattcttgcatccttgcaagagaaacaatactggatgtaaaacttgatgaatttgataacagtactgtatgatgaatttggaaacaatattgtatgttaaaactttatgaattcggtttgtatacataagtttttctttcttgtaccatcctttttggtttaaattaaataacatagctggagagttattgtttttctttttaaaaatatctgcaagattttgtaaaagattagaattctttcctgaacattttgataactgtgctgtgaaattatctgagcattgtgattttttagtgagggaagcattgtgaaactcattcttcttttaacatattacaatcacactttcatcttcattactctgacaccatttatttcaaggagaccatcgcttccatcttgccaaatcccatggtaaattcctacccttcatcttaacttcctaacattcttcttatggagatgtcctctgatttaactaaagagtgcccctttccagccttcccactatgactttcaatctccttgtgattttttatttttctctattgtacatatgactaactgaaattttatattatacatttgtttattgtgcctctctttttaataaacttgaaaagttaaggatttgtctttgttttatacttttaatgcccataatatatgggaacagttatatatgcaatgcatatgtttgctaatgtgatagagttgtaagtattcaagaatctcgtatgccattaatatgttaagcaagaagtagctaaactttgatctctcccgacttcaagatcagagacactttggaattttctgactcttactaaacattagatgatatattaaatctattaaatacctctgatcatttggcaattacctgcaaacatatgcatgcaaacatctcaaaatttgtttatcattatagaaacttgaactttaataatacgtattcattaatatacgtactttttgatttaataaaatttcaaaatttgttttcaattttcttagtacctctgaagaacatactgggaacattattctattattgttttgatttcaggctggacagcagcgctggtgggagcaggagattaaaataaatgggaatattcaaaagggagaattaattacatataacttgacagagctaattaaaccagaagcttatgaagtccgactgactcctctcaccaaatttggtgaaggagattcaacaattcgtgtgatcaaatatagtggtaagtagcctttcatttaaaattatttatttatatatttaactatatggaaaat

SEQ ID NO: 12273 - DNA, 2300 bp, Homo sapien
gctgaagaccatctttgtttccggttggggcatttccagattggataaaatcgaaggagagccatctgttgaacatttagtattcagaactgtagaactactcctggcatctgagtttgccaagtcctagctaaaaatatatattaaatggggtttgcttcctttttttattggttttgaactcttctggcagaggttgtatattccctaaggagagaaatgtgagaaaaaaaatgtagacatttatttttcattttcattcacaaaacatttggttgaaatattaacatcaaatatgcccagacatttctactttcatttctatgtctctcctgtaagtttttttagaagttgttattaaataatgattaccaattcattgattttgtgtatgtcataaacacacacacacacactctcatacacacacagagacacccctgtctgtagtcacatattaagttgcaattttatgataatgtaataaaattgttaaattatactatttcgccagctcttgggaaagtatttttttttgcatgtaactcatcatcatttacatgcgaaaaaagaaacaaacaaaatatttttatataggttaataaatattaatattctatccacagatattaattaatgaatgtcttctctcatggagccaagggaccagtataccaaaatcaaaacaaacaaacaaacaaaaacaaagaaaataacaacagagatttgttatatttctgtttatttagaacctacccaaataccaaactctatttacagcttattgttattagccatcatacatcttgtaaaaaatttgagaagctcacattctttaataataatcattctgggacagcaaactagtgtttaagggaagaatcaactattttaataattggctctggtttgcctggcaaaatattacatcaaaactgtttgtttgtgaattatggaagggaggttttaatacaaaggaatgtcagtaggccccaccctggccagtctttaacaacaggatgagaggcaaaacatttgtcctgacaatacagcattgtgaaaaatatttgacttatgcacatgccaaaactaaagattctttcctctttaggaaataaataaataaatctcttcaccctcaaaagaaatgtttttgataaatgccaagaataaagaaggcagaaggaaattgtaaagaaaatgagggaaacaactgagtagttgagagtgattgtgtggtaaacagtgatcagctgtttgcactcagaggggcaagaatgacagttcagttatttctagatgcgcggaggtatacactcttttccaagagtcaggataaatcagtgagccttaaagtagtagattccgttgttgaattgaatagtgaatagctttgttggttttcagggacatatggctattttattctgaattaatgcatattaccttaactgttttctttttttaatgcattttaaaatgatagagctcatataattgtgaatgtttgaatacagaagaaaaaaaaggcctagagcactagggaaagctttaagaaatcaattaacagagcaatatgaaattataattaactaaatgaaaactttttaaggagataaataactttcctttgtatctttatgtcattttatttagataattaatgaaaatggcatctttgttcctttgggtcttcctttttgttagagaaaatatttttactctgtggcagttaattatgctatatcaactgaagataaagctaaaaagaagccatcgtgaaaaccattaagggaaaaatgacaaaatgaatggaaaaatggaatggctgcctatacatgagactgataagtgaaatgtagtgacatgatacaaagaacacaaacatatatttatgtttggttcaaagttaggcttttcacaccactttctgtcctcctttgagctgtgggagtattcagttcataatagactcacagcgtctcattactacttagaacttagttaacattgccttcctgatgtaatacaatgcccggaattcgataatcgttcctgaaaaaaacaaacaaacaaaaaaaatcaccattccttttaatagcttgagcctgtaccagaatgataagtggaaattagtcctcaaagtaacctcagctgtttcattattgtgtgcctcgagcatctggttattcaaggtgaggcttccatgttcaagtatgaatcccttgggatctgccgcaggactcacggtagtgctgcctgcttctcccactctgtggctgactcccctgaggtagcat

SEQ ID NO: 12274 - DNA, 2300 bp, Homo sapien
aaaacactactatattcccagatgttccctattaatttttagcgaagtatttccacacttgttgcaatgtaaattaaagatgctttagattttctaatccttttgtacctataagtttttaaagcccctgaaacattagagctacctctgccccaacaaaagagcctgtctttcacacaaggaaaagattttccaagcagttaactttagtaggagacattgcatataaaataaactaatctctgaactcctagtgtttcttcccccagtgccttcatctactgtgatgaccatatttcctttaaagaagacagaaatagagaagaaacgttgccacttccaaatgctgtggcctgttctgccctctagccaagcataacggatcctggaagaccttgggcggcggagaggagatagcgtgtcatgtaattaccctgggtctaaggtggtagctggcccttcagcgtgcaaacgcagacggcggcatcagaaatacataacgggcattcgccaccgcggagctccccgagaggcgagggagcgctttggcgggggaggttggaggccagatgccgccggcctcgcggagcctttcggcgttgtccatactgatgagctcggctgacacaggaaggcagagcaaaggaggggcagaggaggcgcggaggcaggcggcagagccgcgcacccggctttgacgtcgcccggctgcggctagcagctcgcgctctcagcacgtagcgcacaacgtgaccacacacagccttcctccccggcagcccagcagcccagcagcccggccgccggtccgcctgcgccccgcgcttgccgcttcgccctcctcctcctcctcctccttctcctctttctcctctttctccttctcctcctccctccattcgcctccgcggcgcgcatctccgcgcacacccagggatcccggccggcgtcgaaccccaggcgcccagccgcccaaccagggcacctctgccgcagcagcggcccgagcggacgccacgcagccgggtgccctccgcaggcggccgctcccgcgttcacctctggatgccaccactacgttagctcaagcggggaaccccttctgcggctccctcctctaaactcccgcctgtcccgaccgtccccaccccctccacctggcgggggcggcgcggaagcgaagaggacgcgcgcagtgccggtgggcacgcgtagacgtgtgtgcggatcgggtatttgcctggcattctccctctcttgcaagtggcggtgcctggactctgctttcggctccgggaattggtgcggccggccagagcacctctacgctggccgggcgctaaaggctattttggagagcggtggcggtggcggctgggctggtgtgcccaagcgagctccagacgcacactccgctccctgttggaccctttcctcctccttcttccccctcctcccttccctcttccccacccccgttcccctagccccactcctcctcttcctcctcctcctcttcctcctcctcctcttcctcctctccccgttcggcgatgcgagtctgtatcgtgtaacaggattggcgttgcaatggcaactgatggaatgggggaaggcaagacagcagggctgggggcttcggactgcgggcgggcgggccgctgtcgccgcttgacgcccctccggggaccttcgcgagttactttgtaaaggcgaatccaggcaagagagccctgctcggtgtcctgggtcagaggccacttcctgctcctcggctgtccaagccaggctcctaccgcgcggcacccccggccccctgcccgcgcccgccgccggcccagcgcgccgccgccgccgccgcagctgcggagactcgagcccgcttccctgaagaacacttcgcctcgcagctccccttcccatcaccgccccctgctcctccccggcgtctgcgattttcccaggcacccggtgtgagtgcggcgtgcgtgtgagtgtgtgtcagggtattgtgttgtgggagagtgtgtgagtgtgtgtgagtgtgtgtgtgcatgagtgtgtggagtgcggggctcctgcgctccgctcgccgccgccgccggggaaggacagacggacggcgcttcctccttcggcgagcggttcccgggcacctcggcttggcccgggcgcgagtggagcgcgcctggctggccgccggcctcctgaaggtcccgttgcgtaccccctgggctggatatgttcatgttcacgtgaagatggatttactgtacggtctcgtgtggctgctgacagtc

SEQ ID NO: 12275 - DNA, 2300 bp, Homo sapien
aattcctgggtatccttgttgactttctgtctcgttgatctgtctaatgttgacagtggggtgttaaagtctcccattattaatgtgtgggagtctaagtctctttgtaggtcactcaggacttgctttatgaatctgggtgctcctgtattgggtgcatatatatttaggatagttagctcttcttgttgaattgatccctttaccattatgtaatggccttctttgtctctttgatctttgttggtttaaaggctgttttatcagagactaggattgcaacccctgcctttttttgttttccatttgcttggtagatcttcctccatccttttattttgagcctatgtgtgtctctgcacgtgagatgggtttcctgaatacagcacactgatgggtcttgactctttatccagtttgccagtctgtgtcttttaattggagcatttaatccatttacatttaaagttaatattgttatgtgtgaatatgatcctgtcattatgatgttagctggttattttgctcgttagttgatgcagtttcttcctgttcttgatggtctttacattttggcatgattttgcagcggctggtaccgtttgttcctttccatgcttagcgtttccttcaggagctcttttagggcaggcctggtggtgacaaaatctctcagcatttgcttgtctgtaaagtattttatttctccttcacttatgaagcttaatttggctggatatgaaattctgggttgaaaattcttttctttaagaatgttgaatattggcccccactctcttctggcttgtagggtttctgccgagagatccgctgttagtctgatgggcttccctttgagggtaacccgacctttctctctggctgcccttaacatttttccttcatttcaactttggtgaatctgacaattatgtgtcttggagttgctcttctcgaggagtatctttgtggcgttctctgtatttcctaaatctgaacgttggcctgccttgctagattggggaagttctcctggataatatcctgcagagtgttttccaacttggttccattctccccatcactttcaggtacaccaatcagacgtagatttggtcttttcacatagtcccatatttcttggaggctttgctcatttctttttatactttttttctctaagcttcccttctcgcttcatttcattcatttcatcttccattgctgataccctttcttccagttgatcacatcggctcctcaggcttctgcattcttcacgtagttctcgagccttggttttcagctccatcagctcctttaagcacttctctgtattggttattctagttatacattcttctaaatttttttcaaagttttcaacttctttgcctttggtttgaatgtcctcccgtagctcagagtaatttgatcgtctgaagccttcttctctcagctcgtcaaagtcattctccatccagctttgttccgttgctggtgaggaactgcgttcctttggaggaggagaggcactctgcgttttagagtttccagtttttctgttctgttttttccccatctttgtggttttatctacttttggtctttgatgatggtgatgtacagataggtttttggtgtggatgtcctttctgtttgttagttttccttctaacagacaggaccctcagctgcaggtctgttggaataccctgccgtgtgaggtgtcagtgtgcccctgctggggggtgcctcccagttaggctgctcgggggtcaggtgtcagggaaccacttgaggaggcagtctgcccgttctcagatctccagctgcgtgctgggagaaccactgctcccttcaaagctgtcagacagggacatttaagtctgcagaggttactgctgtctttttgtttgtctgtgccctgcccccagaggtggagcctacagaggcaggcaggcctccttgagctgtggtgggctccacccagttcgagcttcccagctgctttgtttacctaatcaagcctgggcaatggcgggcgcccctcccccagcctggctgccgccttgcagtttgatctcagactgctgtgctagcaatcagggagactccgtgggcgtaggaccctccgagccaggtgcggtaaaccatattttcttgtaatatgttttatatgtagcattcaatttgctgatatttttaaaagaaatatttgcctcttattcatgagaggtatttgtctgcaatacttctctgtttgagtatccttgtctggttttggaatcaaagacata

SEQ ID NO: 12276 - DNA, 2300 bp, Homo sapien
aacagacagggcgccgtggatcacgcctgtaatcccagcactctgaggggtcaaggcaggcccatctcctgaggtcaggacctcaagaccagcttggccaacatggtgaaatcccatctccacaaaataataaaaataggccgggcgtggtggcagacgcctgtaatcccaggtactagggaggctgagacaggagaatcgcttgaatccgggagggggaggctagtgagctgagatcacgccactgcactccagcctgggaaacagagggagacccaatttcaaaacaaaaaaaaaaatttacatcattatagaacagtactatccaatacaaaataattgatcagaaagctggtgatttttatctcaaagagccaataataaattcgttttcaccttaaaaaaaaaaacccaaactactatttaaaagattttcagaagccaaaagtttcacagtcaaaagtttcatataaacactagcttgactaagatgatcaagagatagaagcactaaatggcagaccattgtttgctgaatcttaacaatgtctttccggccccaaactttaagttcattccagtgtatgacgctttcaaacattttgggttggccgggcgcggtggctcacgcctgtaatctcagcactttgggaggccgaagcaggcggatcacgaggtcagcagttcgagaccagcctgaccaacatggtaaaaccccgtctctactaaaaataaaaaaattagccggacatggtggcaggcgcctgtaatcccagctattcaggaggctgaggcaggagaatcgcttgaaccggggaggcggaggttgcactgagcggagatcacgccatcgcactccaggttgggtgagtgcgactccgactcaaaaaaaaaaaaaaaaaaacttggggtcagcggttaatacatatatttggttagaaaatatctaggtacagccgcgcgtggtggcaagagcctttagtcccagctactcgggacgccaaggcaagaggatcgcctgagaccaggaggagttcgaggctgcagtgagccgtaacaacgccactgcacttcaacctgggcgacagagggagaccctatctctaaaaaaaaaaaaaagagaataggtacttacaagattgataaatgaaacaaatgtaaaacaattttagtggcttctctaaagtgaatttcaccaaacacaatacacggcacctaaaactggctaagctatctaggtaaaaaagggagtaggaaagactaagtccttcaccttctccattctattaatttgattgcccaaaccatcaacactgtcaccagctaccaactaaaaaaagaggaaaagctcttggtcgaatgctcagaattaccactccagggaagatctgtccgtttgtctttcgcggaaaaaataacccccacaaccttctctgcccaaacaacatggagtacgcctgcagacgcctaccttaatgaaaccgatatccttcgcgtactgacggaaacactggcggcacatattgaggccatatttccggatcagaccgtgccggtttgaacagacacgactgtaagaaaagagacagcggttttgcaggtcatagaaattacaagactccgcactcagacggctactacccgcatcccgggactcccaagccacagtacaggcctgtaatggcggcaccagcgactcccagtcggcgtgctccctcgtgccgcccgtggcctcctctacttgagattttaagcagcctagcgctccacggcaacgcttccccaaaatcacaaactatttctcaccaagagcgagaaccctggccgaattttcgcgggtggctccagtacagctgctggtgacccatcttgctctcagcagtgcaacgaggtaaaaggaagaagctggcccacgcatgcgctcttcaaatttttgagacagtttacccagaatgcagtgctcaaaggaaacgcgtgcgcagtgtggtcaggttgtttcgctgggtgagtaaaatgaaatcttagaggcgttgtgggctggcccagttgatgacgtcaccataccacagcttctagtgctattctgcgccggtatccgaccgccgggcgcggtggcgcgtgcctgtagtcccagctactcgggaggctgaggctggaggatcgcttgagtccaggagttctgggctgtagtgcgctatgccgatcgggtgtccgcactaagttcggcatcaatatggtgacctcccgggagcgggggaccaccaggttgcctaaggaggggtgaaccggcccaggtcgga

SEQ ID NO: 12277 - DNA, 2300 bp, Homo sapien
ttaaagctgtgttctcagtttgttgaaaaagaaatggataatttcatggtttgggatagatggtgtcacattatcttaaaactgaaaggaagtacgacgtcttagctgcacttttgcaatatctctatcaaagagaataatgtatagactagaataagtattaagaattacttaagtattcagattaagattgttgaagtgcaactaattgcttctcatttgtctttttttctctcctaaatgaattcacttctttaggcccaaaggcttatatatcagagtactaaaaatattaatggaattgatctcagaaccactgtaatgttttaaatattgtggagaccaactagaagaggcctaagaaagtgtggacaaatgttagattagcttttgagaggcaaatggcttttggaaaccacacattagtgactgatataaattataggaaagttgtaaaagcttgacattggatcttgcccaatgaggctttaaaataaaataccttttcattcctatcactaggccttttgtccatcttctattctagttacacaaagttgttcaccttaccttggctcaagcgcttcctttcaccaggcattcccttctgtcaagtgctgcctgtagaaatcccattcttcaaggtctacctcaaaggtctctcaaatgtacctcgaactggaattaatttctcttcttggctcctttcgtacttcatgagcacacccatgatttaatacagaatattttccttagctgtacatatgttgttggtgcacaaacgttgtatgttgaagtcttggagataatcctgtttcccacagattagaaaattttgagggcaaggagcaagttatatctagtttacaaatctctgactcccctccttccttaatcatataatacaatgcctaacttaatgattgggtagggggaccccactagaaccctgacataacataccttaaagaagtgttgtatttcaatttataaaagtttatatgtaaaagtttctggaattgttgcaccctgtgctacattttataaatctagttaaagctttgatttcagagcagttttatctggaggcattataaatgaccatatggaatgtaggtatctttcagcagaaattcgtttattgacattggttttttgcatttttgcatttgcttttcattacttgttttgtcaccaaattatctggtcaaagcaacatacactgcacattacttgtttattactttacattcagccaattacatttaagaatcaaatacactaaatgccaaagaatctcatttttttttggaatggtgtaggtgtatttcttggaggagtgtgtcaaaaaaataaatttgaaaacgtactctctttaacaaaataaaagcaaaccctaccgttgactcgtgatcattacagctgattttaagttgttttgtaaatttattccagtaggtgtcactggtgagtcgaggaaaaactcctttcccaagtgtaacgttttaattaaaagaaagtaaaaggtttaatcaataaaaaagactatgagaatattcatctcttgagagtccaaaattaacgtatttattgttcaaaagagacggggtctcgctatgttgcccaggctggagtgcagtggctattcacaggcgcgatcccactactgatcagcacgggagttttgacctgctccgtttccgacctgggccggttcacccctccttaggcaacctggtggtcccccgctcccgggaggtcaccatattgatgccgaacttagtgcggacacccgatcggcatagcgcactacagcccagaactcctggactcaagcgatcctccagcctcagcctcccgagtagctgggactacaggcacgcgccaccgcgcccggcggtcggataccggcgcagaatagcactagaagctgtggtatggtgacgtcatcaactgggccagcccacaacgcctctaagatttcattttactcacccagcgaaacaacctgaccacactgcgcacgcgtttcctttgagcactgcattctgggtaaactgtctcaaaaatttgaagagcgcatgcgtgggccagcttcttccttttacctcgttgcactgctgagagcaagatgggtcaccagcagctgtactggagccacccgcgaaaattcggccagggttctcgctcttggtgagaaatagtttgtgattttggggaagcgttgccgtggagcgctaggctgcttaaaatctcaagtagaggaggccacgggcggcacgagggagcacgccgactgg

SEQ ID NO: 12278 - DNA, 2300 bp, Homo sapien
tggaaactaccttttttaagactgacaattaggaagatacatttttggcagtatataccactgtttcactctaaaatcaccgttgaactgttatgtaactttcatctatttatttaattactgaatccatgcttcaacaacccaagcctaagtaacaccaaataaaggactgagattgaggctttttttttttttttttgagacaaggtctcgctctgtcgcccaggctggagggcagttcttcgctcactacctctgcctcctaggctcaagctgggactacagacgcgcgccgccccgcccaactaattttttcttcttcttttttttttttttttttgagagtctcgctctgtcgcccaggctggagtgcagtggcactatctcggctcactgcaacctccgtctcccaggttcaagcgattctcctgcctcagcttcccgggtagctgggactacaggtgcgcgccaacactctgtctaatttttgtatttttagtagagacggggtttcaccatgctggccaggctggtctccaactcccgacctcaggcgattctcccgcctcggcctcccaaagtgctgggattacagtcgtgagccaccgcgcccggcctagttaattttttaatttaatttttttgtggagacgaggtctcactattgcccaggctaatctcgaacttctgggctaagcgatcctcctgcctcgagcctcccaaattgttgggcttacaggcgtgagccaccgcacctggcggaacatttctactctaatgaaaattataacagtttttacagttttcctagctcccaactgtacctataagttcagagtccatttaatgtacttgtaataattcaggctggtgttttattatcttttctacattattaccctctcaaagaacaaaagcaggtaactcctataaagtctaatagtctgaaaattgtagtgtccgttttctctttagccataaagttttgcttaaatgctgagtcgcgttttaatgctctactagatgtacatataagaatactaaatggagggaaagtaatttcttttttttttttgagacggggtcactcaggctggagtgccagtgcgcgattacagctcaccggagcctctcgacctccccaggctcaagtgatcctgccacctcagcctccccaatagctgggactacagacacgcgccaccacgcccggctaatttttttgtatttttcttagagactgggttttgccatgttgcccaaactggtcttgaactcctgggctcaagcgacctgcctgcctcagccccgcaaagtgctgggattacaggcgtgagccaccgcgcccggccataattttatcttaatcacttttttccaggaactattacgtttcaaagaatgaggaattaactgacaacacttcaggttcaacatgtaaatagggacgctcatttgagaataaatcacattttgtcacagttgtattgaaaaatcggtatttctgaacgtcattttaccattacggaagtataactcagacacaataaaatgtttaatatacggctaggattaggttaaggtgagagaggcgcctagagcacaaattttaaggaggcaagaccacgaccccgaccgtgagcgcctgcttaacatttgctccccaggcgcttcccactccccagccgggccccgtcctagttcaatcaatcaagaaaatcaagagtacgaaggccttgtgcggtctggacggtctttccacgtctcaggtgcagttaagccagtcacactccatccacctacccgccatgaaaaattatttgttcagcaggaattgccaagtcaaatacagccatataaagccccccttcgacgtgccaggtgtgcctccggagagcagccaccaaaaccaccagcagcccgtccgcgccgggaaatgcgccctcgctggcttacggggccactcagacagttctaagtgcctttccctgtaacgcagaggcacacctgccttccctcgggaaacagcggcccgacgtgcgcccgcaacgcgtaaagcgtcaacagctgaaaccctcggaatcctccccgaacagaaacaaccaccgctgccagctgcgcgctcgggggaaaagacgttgcgcccccgccgactgccggtttcccgggcgcgagcccggatccaggtggtcagtcccggtacgcaaccacggcgagaacccggccctgctaagggagaagggaagccgtttcccgcgggcttcatacagacacggtgctaagacagcccgagtcgcgga

SEQ ID NO: 12279 - DNA, 2300 bp, Homo sapien
gtaaaaaccacaaaaagtttgcgtaagaatatcactgtatttattttccctcgggtaacttttctatggcttcaccattttctcttcaaaattgaagaaaaatatcccaaagtttagaactggatcacttggccctttctcttcttatctcctcccagttcaaaatgcttgcatctcttaatggccagcatcctcttggatctgcagttaggctcaacacattccagccttagcacaatcttctttgtggtcttagccttcttccggaaaattggctttgtctgcccaccatagccactctgcttccgatcatagcgcctccttccctgggcatacaaagaatccttgcccttcttatactgtgtcactttgtgaggctgatgcttgccacacttcttacagaaggttcttcgggttttaggtacgttgaccatctttgcagcagggctgttttgtctatatgatgaaaactgtagtaaaatatttaaaataagatagcagacgttaaacattccgaaaagtgaaagtgctatacaagtatatacaggaaaaccgtacacataaatgagtaatatataaatccaccacgtactctttttccatatgaataaacgcacatacaagtacatacctttttgaaacacttcgtttaaattactggaggactaatttgtcgacctaaagaactgaggcaaggccgagcacggtggctcatgcttgtaatcccagcactttgggaggccgagaagggcggatcacctgaggtccggagttcgagaccagcctgaccaacatggagaaaccccgtctctactaaaaatacaaaattagcctggcgtggtggtggtgcatacctgtaaggagaatcgcttgggcggggtggggaggggcggaggttgccgtgagccgagatcgcaccattgcactccagcctgggcaacaacagcggaattacgtctcaaaaaaaaaaaagaactgaggcacaattcatataagtagaatgtttatttggggcaagtttgaggattgcaacccagagcacagattcaaaatgccctgagtagcagcagttgcaagtgggtttttagaggaaaaaatggcagttcctaaattgtctaccaagaatttacattaaaataacacaagcgattgattggctatacatcattcttttcatgacaaattccaggaacgcggacataatgggtgaagcagctagtcaggaataaaatgccaggcattaagtggggaggtgtctgaagtcccatactgctgtctctctgggcccggcaaattttgcacatctcaaataattaacaatgctccgagccattcttcttttctcatatagaacaagactcacgaaaaccgacagcagcagctttaggaggcccaatacagtccgttttccgtacgaaatgagtttaatttattgtgactgctccaaaagaaaagtgcggttcatctaattttcttccgaaaaggaagttaaggaccagagtttctttgacccccttccccccacccacctcctccattttccagctctagagaatggctggggcagcgcgcgacgttgtagctacggttacgacccgccccgttccttctacgagaaccacatcagcgtagtatcacttttcccctccgaagcacagtcacccgtcagcagcctcgagggctgacgtgtccttatcaagccggcgcgccccgcgattctatagccgccatgcctgagacctttttcctgaagggagaagcctgctctcgaactaaggccggcgagggccataggtctcgccttccctttcctaagaaggcctagtcctacccaggattctgagcaagggaggctcctattggagccgctacagcctcgttcttagcttaccgagaaacagcgcccgacacctggcccttcgcagctctcgcctttcgcagctctcgcctaacaggaaagggaagaaacaggcggaagtgggaactgcacctgagcgacagtactgcaaaccaataggcagccggccacggcggtcaggcgccttcggtcgcgtctggaaagcaccaaccaacggtctaaggggcgggccggaggggtgtgggccggagggccgcggtgtgccgcggggcagttgcgggttgtcataacggtccccgccggagtgaggcgaggccgcgtcgctcagttctggccgtctagggcccctgtaaggatgagagcgcagaggacgcagggccgctggaggcgcaggtaacgaagctagggtgcggttgggaccgcggctgagctttttccggga

SEQ ID NO: 12280 - DNA, 2300 bp, Homo sapien
tacaagattttgtttttgtattaaagcagaaaccagttcctaaactcttttattcaattgtatgtcctgtttggacaaatatcaaaaatagaagactgtcgcttttgtaactgtgattttcactgcagtcttctataacttttacagagttcatggtccctaatatctccccaccctccattttttctaggtggggaaatggctaccacagtaaacttttcactgatagttagagtttctggaaacatgtattgtttgttattatttaagagtgactcaatttgggcactctgagtggatggtctacaggttttcttgtgatgcataccacagtctccagcatgaaagatcctaggaatttgaggaaccagcactttccagaattttggaagacaagatacagtcaagtattgaagagtccagtcccagttataatcatcataagtacagaaagtgtctgtgcactcgatcagcttctgataggcattccgggtcaaggctagacccatattgtgctctgtggatttccaagttttcacatctaccttgtcagccatgccatagaaactgcgactggcactataggtccccagggagagaacatcacattcagggcactcttgctgcttcagtttccacatctttttgaagacatggtaaaagtctggggctaagtagtgatcctcttctaggaaaagtataaggccagcataatctcgaagaattttcactctttcccacacaaaatgcagcttccaccaccagtgatgtttggtctgggagaatttggcctctctataatggccgaaggagtcgggatactcagcattgatgcaccccaatttcaaagcggcattcttcggcaggtctctgggacaatctctagggtcactacctggaaactcgttagggtacaactgaatgctgaaaggaaagaacacctgcagaaccggacagaaattcaccccggcgatcagctgattgatctcggtcgaccagaagtcatggctaaagatgacgaggacgttgtcaattccctgggcttttcgaagtgagtccagcagcagtctgaggtattcgggccggttatgcacctggaccaccagcaccagctcccggggggcccaggtgccagccttatctacattcctcagggtctgatcaaagttcagctggtacaccagggaccggtaccgcagcgtcaggttgtccgcctcgggctgggggaccgccgggaccagggaagccgccgacacgttggagaccctgcggatgcccacagccacagaggggtggtccccaccgcggccgccggcaccccgcgcgggttcggcgtccagcaacggtggggcgagggcctcgttcttcctttgtcgcccattgctgctccagaggacgaagccgcaggcggccaccacgagcgtcaggattagcaccttccgtttgtagatgcggaacctcatggtctccagggccgggagcgcaggcgggcgggcgcggaaaggagcagctgcttctgcacggaaggggcgggcgggcggcggccgtcgccttggcctgtcacggtcggaactggcccccgcggctgccctcgctaactcatcccgggccccgggggtcctggggcccgagacctctcatttaccccgcgccgcctgcgctccacacatcctcgcctggcagctacagctcgagcatcggcgccgccgctaggagccgcggctcggcttcgtctccgtcctctccattcagcaccacgggtcccggaaaaagctcagccgcggtcccaaccgcaccctagcttcgttacctgcgcctccagcggccctgcgtcctctgcgctctcatccttacaggggccctagacggccagaactgagcgacgcggcctcgcctcactccggcggggaccgttatgacaacccgcaactgccccgcggcacaccgcggccctccggcccacacccctccggcccgccccttagaccgttggttggtgctttccagacgcgaccgaaggcgcctgaccgccgtggccggctgcctattggtttgcagtactgtcgctcaggtgcagttcccacttccgcctgtttcttccctttcctgttaggcgagagctgcgaaaggcgagagctgcgaagggccaggtgtcgggcgctgtttctcggtaagctaagaacgaggctgtagcggctccaataggagcctcccttgctcagaatcctgggtaggactaggccttcttaggaaagggaaggcgagacctatggccctcgccggccttagttcgagagcag

SEQ ID NO: 12281 - DNA, 2300 bp, Homo sapien
cagtgagccaagactgcaccactgcactccagcctgggtgacagagtgagacagcctcaaaaaaaaaaaaaaaaaaaaaaaggttttggacctggtgtggtggctcatgcctgtaatcctataatcccagcactctgggaggccgaggcgggcggatcacgaagtcaggagatcgagaccatcctggctaacacggtgaaaccctgtctctagtaaaaatacaaaacattagctgggcgtagtggcaggcgcctgtagtcccagctgctcgggaggctgaggcaggagagtggcgtgaacctgggaggtggagcttgcagtgagccgaaactgcgccactgcactccagcctgggtgacagagcgagactctgtctcaaaaaaagaaaaacaaaacaaaacaaaacaaagtacggtggtgggttggtttgaagaatctaagagggctatttctggcatttccactattccaccatgatttccttgagagacttgctctgtcgcccaggccggagtgcagtggcgcgatcttggctcaccgcaagagctctgcctcctgggtttcaccccattctactgcctcagccttccgagtagctgggactacaggcacccgccaccatgcccggctaattttttgtatttttagtagagacggggtttcaccgtgttagccaggatggtctcgatctcctgacctcgtgatccgcccgcctaggcttcccaaagtgctgggattacaggcctgagccaccgcgcccggcctattccaccatgatctctacccctcctcccgaatgttagtggtgtaactatgacaacaagcacgcgctgctcaaggctcaattttccagccgttaccgacctccaccgcgtcactgtacgctgcccagaaactctgaggcggatcccccaacccagtgtcagactgatcgcctttggcccgagggcgaggagccacaggacagtatggccaaagcggcggcctcctcgtcgctggaggacttggacctgagcggagaggaggtccagcggctcacctccgccttccaggacccggagttccggcgaatgttctcccagtacgccgaggagctcaccgacccggagaaccggcggcgctacgaggcggagatcaccgcgctagagcgtgagcgcggggtggaagtgcggttcgtgcacccggagcccggccatgtgctgcgcaccagcctggacggggcgcggcgctgctttgtgaatgtctgcagcaacgcgttggtgggcgcgcccagcagccggcccggctccggtggcgaccggggcgcagctcctggcagccactggtccctgccctacagcctggcgcccggccgcgagtacgcggggcgcagcagcagccgctacatggtctacgacgtggtcttccatccagacgcgcttgcgctggcccggcggcacgagggcttccgccagatgctggacgccacggccctggaggccgtcgagaagcagttcggcgtgaagctggaccgcaggaatgccaagaccctgaaggccaagtataaggggaccccagaggctgcggtgctgcgcacgcccctgcccggggtcatccccgcaaggcctgacggggagccgaagggtcctctcccggacttcccctacccttaccagtacccggcagcccccgggccccgggcgccctcccctccggaagcggccttgcagcccgcccccaccgagcctcgctacagcgtggtgcagcgccaccacgtggacctccaggattaccgctgctccagggactcagccccgagccccgtgccccatgagctggtgatcaccatcgaactgccgctgttgcgctcggccgagcaggcggcgctggaggtaacgagaaagctgctgtgcctcgactcgaggaaacctgactaccggctgcggctctcgctcccgtacccagtggacgatggccgcggcaaggcacaattcaacaaggcccggcggcagctggtggttacgctgccagtggtgctgccggccgcgcgccgggagcccgctgtcgccgtcgccgccgccgcgccggaagagtccgcggaccggtccggaactgacggccaggcctgcgcttccgctcgcgagggggaggcgggacccgcgaggagtcgcgcggaggacggaggccacgatacctgcgtggctggggctgcgggctccggggtcaccaccctgggcgacccggaggtggcgcctccgccggccgcagctggagaggagcgtgtccccaagccgggggagcaggacttgagcaggcacgcg

SEQ ID NO: 12282 - DNA, 2300 bp, Homo sapien
gccaaagcaccccagtctaggcgacagagcaagactctgtctcaaaaaaaaaagcaatgcaactgcttcacatctttgttaattacctatataataagtgcaataagcacacaataaatatctgttgaaaggactaatttgaacacagatggcatttaaaactatgggcttggataagacatcttggaagaaatgtgattaggtaagagggctgatgaacaaagccttgggcaactcccacatttgcagaactggcaggagcataaaggaggaaaatgggagagcttggagttctgcaaaacatgagaaaaatgtgtttcgaaggggcagtcaactgctttgaatgcttccaagagaccataagataaggcagtggtttgggaaaagaggattcaggagttctgatcttggtcatttcaagcctgagtagcttatgcattaatcactcaaatggacacctcaaacgtgcagctggatataggagtgtaaaatctgagtctaagacaagtatttgtgagtgtaaatatatttctgaaggagagtatagatgggtaagagattgggtcccagttttggggcatttccatgtagaagttgaaaagaagtagatacctacagagcaaaactatgagagtgatgagacagaagagaaatctggaaagtgtcttgtcactgaggtaatgccaacatcaactgtgttaaatgttgctgagaatagaaaaatgatcactgaattgaccaattaccaatgaataaataattactccagtaaataaatatacttccatatgatcattttgaatggttgcacaaaactctgttgcgtggctctaccaaaacctgctcaatcagttccattgttgaatttgtagattcttctcaaacctttagaatcataaatgatgtcaccttgagaatgttctaagagtattgtgtcaaatactctaagggcatttgggtcaaaaaaatatgcacattagaaaggttttaggccgggcgcggtggctcatgcctgtaatcccagcactttgggaggctgaggtgggcagatcacatgaggtcaagagtgggagaccagcctggccaacatggtgaaatcccatccctactaaaaatacaaaacttagccggacgtggtggtgagtcactgtaatcccagctacctgggaggctgaggcagggagaattgcctgaacccgggaggcggaggttgcagtgagccaagactgcaccactgcactccagcctgggtgacagagtgagacagcctcaaaaaaaaaaaaaaaaaaaaaaaggttttggacctggtgtggtggctcatgcctgtaatcctataatcccagcactctgggaggccgaggcgggcggatcacgaagtcaggagatcgagaccatcctggctaacacggtgaaaccctgtctctagtaaaaatacaaaacattagctgggcgtagtggcaggcgcctgtagtcccagctgctcgggaggctgaggcaggagagtggcgtgaacctgggaggtggagcttgcagtgagccgaaactgcgccactgcactccagcctgggtgacagagcgagactctgtctcaaaaaaagaaaaacaaaacaaaacaaaacaaagtacggtggtgggttggtttgaagaatctaagagggctatttctggcatttccactattccaccatgatttccttgagagacttgctctgtcgcccaggccggagtgcagtggcgcgatcttggctcaccgcaagagctctgcctcctgggtttcaccccattctactgcctcagccttccgagtagctgggactacaggcacccgccaccatgcccggctaattttttgtatttttagtagagacggggtttcaccgtgttagccaggatggtctcgatctcctgacctcgtgatccgcccgcctaggcttcccaaagtgctgggattacaggcctgagccaccgcgcccggcctattccaccatgatctctacccctcctcccgaatgttagtggtgtaactatgacaacaagcacgcgctgctcaaggctcaattttccagccgttaccgacctccaccgcgtcactgtacgctgcccagaaactctgaggcggatcccccaacccagtgtcagactgatcgcctttggcccgagggcgaggagccacaggacagtatggccaaagcggcggcctcctcgtcgctggaggacttggacctgagcggagaggaggtccagcggctcacctccgccttccaggacccggagttccggcgaatgttctcccagtacgc

SEQ ID NO: 12283 - DNA, 2300 bp, Homo sapien
cagtgagtcgagatcgcgccactgcactccagcctgggcgacagagcgaaactccgtctcaaaaaaaaaaaaaaaaaaaaaacaaaacaaggttatatgttgatcagttgatgaaaacattgtcaccagaggctcacaggaacctaattctgtacttcccctagtaggaatggtttagtattcaataattatttgttggtggctacttataaaatctaactatcacaggtacagtaatgagaattaactatatgtctttctattcgtatttcctatcctttcttacataaaaattaaaaatttctttgtactttttgtctttgaaaaatatttcactaaataaagagaactgtgttcaaaaatcacttgtgatgttatgttaccaatttaatatacaattaggtgtattagttttagtatgcattcaattttaagctcacctttttattttctattttttgaatatgtaaaacatgcacatggattaaaagtctcactgtaaagaaagttttcactttcatccctatcccctcacccctttgtagttaaccatttttgtggtctctgatttaaccttccagagttgttttgttgttgttgttgctgttgttttgagacagagtctcactcttgttgcctaggctggagtgtaatggccccatctcggctcaccgcaacctctgtctcccgggttcagacaattctcctgcctcagcctcccgagtagctgggattacaggcatgcgccaccatgcctggctaatttttttgtatttttgtagagacggggtttctccatgttggtcaggctggtctcgaactcctgacctcagatgatccgcccacctcggcctcccaaagtgctgggattacaggcgtgaaccactgcgcccggctttttttgtttttgagacagagccttgctttgttgcccaggctggagtggtggcacgatctcggctcactgcaccctccgcctccgaggctcaagagattctcctgcctcaacctccccaggagctgggattacaggcgcgcgccaccacgcctggctaattttttttttttttttttttttttggtagagacggggtttcaccatgttggcccggctgttctcgaactcttggcctcaagtgatctgccagcatcggcctcccaaagttctgggattacagatgtgagccaccgcgcccgggcccagaggtttttaaaatgcaaaaacaaatacatatacttttgtttcccttccttcattaaacttcgcttttttttaaaaaagaaaaaaacccgtatacgttggaggtcactttatattggtactgtgaaatcatcctcctgttttataagccgcgtgtttacttataagcactccacgggttagtcaactcattggagcaagcgttttgaagtgtggcagattgacagtccacctgaaatcagaataactgagttcaaatcctgactacaccatttaactcgtcgtttcatcttgagcaagtcctttaccatttttgtgtctcagttttctcatctgtaaaatgaggctgttgtggaaaagacagtagacagctcactgggctgtcatgagcaacacatgaattcacacatttaaagtgcttatgacagtgcatggcgcatacgaagccctcaagttaaataaaaatcggggtaggtgggagcgatggagatttataacagcttccggtaaatgtcgaggcacagtatttccagagcttgtgcgaagtagggaacccaacagctctcatggcctcgaaagaagggggatcctgtgtccgggaagctcggccgcagtcctgcaatgtctagggcagcggtgagagcgctgtggctggctcaacgcagcccgacaccagggaagacgctctggccctcagtttcccggcagcaaaggagcgcgaggtggtctccactttcagcctactcggtccggggttgcgaactgtaaggtctgagttgctgcggcgcaggcagcggagaccaagcagggatcttaacagggtttagcgccacgcgggccagggccgaggccggagctgggaggggcgcgcccgggaaggggcggagctgcggcggtggcgccaaatcgcaaatatggcgccggagcggctgcggagccgggcgctctccgccttcaagttgcggggcttgctgctccgtgggtgagtgggctcgggcagcttgaagggcgagagggaagagctggggcccgtctgcctggtgcggcagcgggacgcaccgcggcggctccccgcgcgccgagagggggcttgacctta

SEQ ID NO: 12284 - DNA, 2300 bp, Homo sapien
aacaattatatgctgatgactccaaaatccctatctctagcccttagctctcttagacttcaaatccaactcaatatgcctccaaatgaactcaccattagccctgccctcccccaaacctgttcctcctcccatgttcaataacctagcgaagggctccacccacctcccacccagtgaccaagctggtaaactaggcatatccttgactcttccctctcacgaatgaaagttccttgaacaacttccgttcatcattcagttcttaacttagactttactttctctcaggaaccttccctgtcttccctcaatctgagttaaagggcctctgtacacccaaggtgccctggacttttgctattttcacacttactgcacggtatggtaattgtctgtttgctggtctatagactccaccagactctacagtccaggaggacaaatgctccatttcaaaaatacaataccaatattactagtaacaataaagtgatggagtgagaattatgattgacatatagtttacactaagtaaaatgcacatatctgtatgcagttcaatgcattttgataaatgtatacacccatgtaaccaccacctcaatcaagatacagaacattttaatcactccagaacacttcctgtactcctttccatcagtcccctccccctccctactcccaaatgaccacttttctgctttctattatcatagatcacttttgtctatcttgaatttcttccttccttcctcccttcctccctccctcccttcttccttccctcccttcctcctttttctttctttctctctccctttccctctctctctctttctctctttctttctaaggaaccttgctctgtcgcccagaccggagtgcagtggcgcgatctcggttcactgcaacctccacctcccgggttaaagcgattctcttgcctttgtagctgggattacaggcatgcgccaccacgcccggctaatttttgtatttttagtagagacgggattgcccaggttggccaggctggtctcaaactcctgagctcaagtgatccgcctacctcatcctcccaaagtgcttagatgagaggcgtgagccactgcaatccagttacatttgtaaagttaaatatgcatttatcctctgacccagcaattccacatctagaactctactccaaagataggcttgtacaaatacaaaataacatatgcataacgtttcatcgcagcattatttatgatagccaaaaaaacctggaaataaccgatatgtccatcaataagaatctgtttgaataagctatgacacatccaatcggtggagtgctatgaagctatgaaaaggactgaggagactgcttgctgtatcctgatatggatcgtcaagtgaaaagagaaagttaaggaacactgtatatacttccttttgtgtaagaaaaggagcagatactctgtttatttgtatagtcaaaaataaacaatagaaagtatcattaaagtgcaccagacttaagtgccttctaatgtgatgcaatatgaagtattttccaaaaaaaaatctgaactagaatctaataaagcttttagatacagcttccagcctaaaagaagtatggggaaaggatgcacaagttaatgagaaaagacactgaggaaccaaacccagaaggtggtacggctgtaggaaaataagaaaactaatccatataacaaacaaatggcacaagagagaagggagagaagctattctagagtaaaacagacgtaaagtcttaagaggcgttaacaacgaattacggtgctgaacaaaccaactatagaaaagacattttgagataatcaaggaatctgactacagactgactactaaatgaggctgtactgccaaaacacaattccaagagagaaggaatctgcgcgtggaaagcccaggccccttgcccactgcgaggagccagaacgtccctccacagccgcgccgcccctggctcgacttcccgagcgagagccgcgggacgttgcagacgcactggctccgccttcccaccaatctcgaccctcgccgcgttccgttcgtgcgtggagcagtcggggctggaggcgaggccgccgggcgggcaggggttgtggcgcggcaagcggcgggccagcgacggcgcgaatggcggactctcagctgttctgtgtggcggaggaacgcagcggccactgcgccgtggtggacggaaacttcctctacgtgtgggggggctacgtggtaaggggaagaggcgggacggggtagac

SEQ ID NO: 12285 - DNA, 2300 bp, Homo sapien
taaatgaaaaataactttattttcctaatcaaaagaatttcaaaaagaatgatattgttttgcatttttatttttatttttgagacagagtcttgctttctcacccaggctggagtgcagtggcatgatctcggctcactgcatcttccacctcccagattcaagcaattcttctgcttccacctcccaagtagctggaattacaggcgcccaccaccatgcctggctaatttttctatttttttagtagagacggggtttcaccatgtcgatcaggctggtctcgaactcctgacctcaagtgatccgcccacctcagcctcccaaaatactgggattataggcatgagacactgcgccaggccgacttaagtgaagaaaatctggcctcacacagatacatagttagaaaagagagttccttaaggagcccctgaaaaggtctccaggtacccacggggcttggaactatactttgatacactgagaaactctgcttatagtacaactaattaatgtgtttcagagactctttttgttgttactgctctaagtaggataaaagtatggtttgaaacataaataagtaaatcaaagtggatattatagtattttattaaatggcatatatatacgaaatataggctgggtgggtgcggtgcctcacgcctgtgatcccagcactttgagaggccgaggcgggtggatcacctgaggtcaggagttcgagaccagcctggccaacatggtgaaatcccatctctactaaaaaatacaaaaatcagccgggcgtggtggcaggtgccttagtcccagctacttgggaggcagaggcaggagaatcgtttggactcgggaggcggaggttgcagtgagccgagatcgagccagtgcactcaagcctgggggacaagagcgagacttctctcgaacaaacaaaaaacaaaaacgatgatagaagggtaatgtagctggaaggaggacacagccaggaattgaagctggaaaggcaagctgggtctggaccatgctgggtcttcttgcacagcactgtgatatgaatttttttttttttttttttttttttttgagacggagtttcgttcttgttgcccaggctggagtgcaatggtgcccttttggctcactgtaacctccgcctcccggcttcaagagtttctcctgcctgagcctcccaagtagctgggattacaggcgccggccaccaagcctgtgtaatttttttgtattttcagtagagacagagtttcgccattttggccaggctggtctcgaactcctggcctcaggtgatccgcctgcctcggccttccaaagtgttgggattacaggcgtgagccaccgcgcccagccgagatattaattttggattctactaaggacgacgggagccagctcaaggtttttaagtgactcgatcagattcacgaggttggttcacaaggaacttcgataaccccaaagtctagtgagcataattcgactgggagaagacactgctgcaaggaattctgtgaaccagacagatttgagggcaccaaccagggtggatggcagataaggtcttaacagcctcaaggtgatttgcttccttgttgaaggctttaattaatcctcttaagtaactttcaagttcttgagttcaagtaaacacactggcacactaggggaggagtggcaggctataagcattttaataattaaaaaaaaaaagccttttattgttcaaagtgttccttttctatggagtgctcccaaccagaagatgagggaaatggagataatgaagcacgtccctcctaccaaacacgataaattctacaggcactgtaagatcaagaatttaagattatttttgtcccaccctattttacaggtgaggtatcaagcacagtaactcgtaattttcttttggcccaattgaaaggtatcatataagagaaagctgtgtgtgcgtgaaaaggatccgcctttctttctgaagaaaagggtggttacggcttcggaaacgcttttcaagccaactctgcagcccggctggcggcggcagcggcggcggcggcaacgtcagattcccgcagaggcggcgcccggcaggggcggcaggagctcaggagaggcccccggggatcgggctgggccccacgtgagagctaagcgactgccctcgcgcccgcagaacagcagggcctgcatcgactctaaggcgagaccagaaacttgctagtggagcaattctggtgcccctgcccgggctgtgaaccctctgagatcatccc

SEQ ID NO: 12286 - DNA, 2300 bp, Homo sapien
tttgttgttactgctctaagtaggataaaagtatggtttgaaacataaataagtaaatcaaagtggatattatagtattttattaaatggcatatatatacgaaatataggctgggtgggtgcggtgcctcacgcctgtgatcccagcactttgagaggccgaggcgggtggatcacctgaggtcaggagttcgagaccagcctggccaacatggtgaaatcccatctctactaaaaaatacaaaaatcagccgggcgtggtggcaggtgccttagtcccagctacttgggaggcagaggcaggagaatcgtttggactcgggaggcggaggttgcagtgagccgagatcgagccagtgcactcaagcctgggggacaagagcgagacttctctcgaacaaacaaaaaacaaaaacgatgatagaagggtaatgtagctggaaggaggacacagccaggaattgaagctggaaaggcaagctgggtctggaccatgctgggtcttcttgcacagcactgtgatatgaatttttttttttttttttttttttttttgagacggagtttcgttcttgttgcccaggctggagtgcaatggtgcccttttggctcactgtaacctccgcctcccggcttcaagagtttctcctgcctgagcctcccaagtagctgggattacaggcgccggccaccaagcctgtgtaatttttttgtattttcagtagagacagagtttcgccattttggccaggctggtctcgaactcctggcctcaggtgatccgcctgcctcggccttccaaagtgttgggattacaggcgtgagccaccgcgcccagccgagatattaattttggattctactaaggacgacgggagccagctcaaggtttttaagtgactcgatcagattcacgaggttggttcacaaggaacttcgataaccccaaagtctagtgagcataattcgactgggagaagacactgctgcaaggaattctgtgaaccagacagatttgagggcaccaaccagggtggatggcagataaggtcttaacagcctcaaggtgatttgcttccttgttgaaggctttaattaatcctcttaagtaactttcaagttcttgagttcaagtaaacacactggcacactaggggaggagtggcaggctataagcattttaataattaaaaaaaaaaagccttttattgttcaaagtgttccttttctatggagtgctcccaaccagaagatgagggaaatggagataatgaagcacgtccctcctaccaaacacgataaattctacaggcactgtaagatcaagaatttaagattatttttgtcccaccctattttacaggtgaggtatcaagcacagtaactcgtaattttcttttggcccaattgaaaggtatcatataagagaaagctgtgtgtgcgtgaaaaggatccgcctttctttctgaagaaaagggtggttacggcttcggaaacgcttttcaagccaactctgcagcccggctggcggcggcagcggcggcggcggcaacgtcagattcccgcagaggcggcgcccggcaggggcggcaggagctcaggagaggcccccggggatcgggctgggccccacgtgagagctaagcgactgccctcgcgcccgcagaacagcagggcctgcatcgactctaaggcgagaccagaaacttgctagtggagcaattctggtgcccctgcccgggctgtgaaccctctgagatcatccctcaatcaaacgaatagaaatcctcgggaagaaaaaaaaaattgcggcaatccggctaaaattcagcagctttcagggaccgattcaggacattatccctgtggttccctcagtgaaaggagactcgaagcgcgactagaagtcgccgggccccatagatctgcggtgcccaggccgtaggcggaggcgcgggcagaggcggcggcggcggcggcggcggctggaggacccggcgctgggggcgctgagcggcagcctcgcttccggagctcggcgggcggcgtcagcggaacgggcggcttccggccgcggcgtaaacaaggccgtggactgcaggaggcggggcagacgggctgcaatagggagccggcccgacgcggaccgcttccctgcagtgccccgagtcccgggcccgcgccgccgccgcccggctccgctcgcggcccctctgtctgcaggcgtgccccggcggcggcggagagccgtcctcggccgaggaggctgggaaacgcgagcgcaggcggcagagaggcct

SEQ ID NO: 12287 - DNA, 2300 bp, Homo sapien
aagggaaaaggtatttaaatttgtttttttgaattatgattttaaacagttcagtgacttaacagtagattattcttactcttttttgtatttacagctgcaaaaacagccttgaatagtttcatgcattccaaagaagcaacagcaagagaaaaagacttattccgcagcgtaaaggtaaagttctccttcagaaaaggaatgtggagactgacagtacaatttaaaatgttagcagttttttgttattttagtagaaaatgctgtcttattagaagcagtaaaaccatctcagctaaaagtttggaaatgtttttcgtttttgtcataaaagaaacatgattgaccatacaggatgtgaagatattcagcaattttctttttttaggacacagatttatcaagaaacattcctggcaaagtgaaagtgtctgcacccaatcttctgaatgtaaaaaggaaatagctgaaatgaaattctaaaatatttgagaagagccaattttatagccttttggaagttcaaagatgaaagcaccatgtatcaggatttccgcattataaaaatgaactaaacattgccttgctatattcaccaaaaggacttacttcttgttttttcccagttttatatagaggaaacactgtctatgataggatttccaaaagtatttgtggacagttaaatgctaattaatatacatctgtagttattctacattttcttgaaatttgggaggttaataccaagtattcatttcatgatgtaaagaaactgaacagtgaagtggcttgattgcttaaactattgacttggtaagtctactgtatataacatctaatatatatattacaggccaaatgaactaaacattgccttgctatattcaccaaaaggacttaattcttgtttttttcccagttttatatagaggaaacactatgataggatttcctaaagtatttgtggacagttaaatgctaattatatacatctgtagttattctacattttcttgaaatttgggaggttaataccaagtattcatttcatgatgtaaagaaactgaacagtgaagtggcttgattgcttaaactattgacttggtaagtctactgtatataacatctaatatatatatattataggccagctacaaggggtttaaatatttaggattgtgtcttgaaaactaagtattggagtggattttcttctgctttcattgatacttgtcagaaaaaaatattagaccaaaatgtaaaatataagtaataattctcatgactcagcttaatcatttctattcatttgtagaccttcaggtttgatcttaattttttccttgtaatctgattcagttctgtaccattttaatttccacctttagtaattaattaccaatatagcacgttagagtatcttaacctataataccagaagcgcattttaggcttaccactaaagactctaacccacttttcctctgtctcttaacagaatggaaaatgatgtcatcattatttccattccttcatgagctataaaacctattaattaaaaaaaaactttttaattgactggacagcacctgcctgtattcagcatgaccacttgctccagcccctacactgaagcattaaggtcaaagtactgaacagttgttggtccctccacactttgtttttccagcttcgtcataatgtgaatattaatgtttaaaaaaaaaaacctttattatattgtatttacaacactaggttacataactatagactactcttgccattaaaaaaaaaaaaatctataatgttttcaaaaaatgacttcagcattttgatgatggtaagactataatgtttctacagatacatatcctgaagttactgaaaagaaaatgtagcaaccattcttcagggtaaaaagcccaaccattactttactttaatagaggacagctactggtgttaaatacatttattgtaaactttagacacaaaaataggttctctaggccattcacatgcacattaaaaccaacaggtgcaaactacaacaatgcatataattatacaaatgatgccactctgtgatgtttacaggattgctgtccatgcaaggtgatcataggcattatttatgaagccttaagatccagaagtgttgttactaccaaacctctgattaacactgtgaagtaagtgttttggaaggcagttccatgagttggctaacatttctttaaagcaaatgactgcttctaagcttagcctgaaagtggacaaggaaagagaaaagt

SEQ ID NO: 12288 - DNA, 2300 bp, Homo sapien
ttacagggattctgtattactattttcttttttttcctgctgaacagttgttgtttagtaatactaaaactcgttttggcttttaaaatttgtacaatatccttatgttctgtaaatcctagactcacaaatactcactagaggtgttaattattaatgttctttcatgagtaggtgctatggtctaaatgttaatatccccccacaattcatatatgggaacctaaatacccagtgtgatggtattaagaggttgggcctttaggaagtgaagtcacgagggctcttctgtcatgaatgagatgagtgcccttttgccacgtgaggacactgcaataaggtgccatctttttttaagatgaggtctccctgtgttgcccaggctggtgtcgaactcctgggctcaagggatcccccgaccttggcctcccaaagtgctgggattacaggtatgagccaccacacccagcctaaggtaccatctttgaggcaagcccttatcagacattgaatctgctggtgccttgatgctggacttcccagccttcagaactgtaagaagtaaaatttctgttgtttctaaattatacaggctaaggtattttgttacagcagcctgaacagactgagacagtcagttatctccagatagatttttcttaagcaaacaaaattaagcatattttatgggatatgggaaaaatttatccaaaactgttgaacagatatttaaaaataaaagttctgttgaccaaaattctccatttgcttttctcctggcaaacttatcaaccttagttgtcattttaaattgtacttgtaacttttgctgctttaacatatactttatatgaaagtttcagttcccacctcctctacttcagagaactacccttcttctcttgaatgacattactttcttaagtaataaaacagacacacacaaacacatatacgaatccacttcagagtcttaggaagaatataaccttgaggccccctatcctgtgggtcagaaatgacagtctggttgtatcactgtttctttctccttatggtttaatgatgtggaattttcattttacattatagctgacatttttatttttatatgttcggaacaggaagagcaagatctggatcaacagggaaatgaggtatgattttatgttggggttcctactacaacactgtgattacaattcagttcccagaatgtttgaaacacaacttattaaaacttagaaacctaagacaagactgcaggctacgaagtcaaactttcggggtcttaatcccaactctgctatatgtaactgtacaaacttggaaacattctttgtgcctcagtttcctcatctgaagaatggggataatgtccctacccaggagagggttgttttgataactaatgtatgtaaagggcatttagaaaagtttatggcacatagcaaacactcaaatattaattatacttcagcaccaagcattctgtcctaaatctaagtttattcatattgtaaaataaatgggggcaatctcacaggcagcacagcaaataagaactctgggatttctccttaataatgggtaagagagaaggctgttctagcccagggtttctcaactttggcactattaacattaggggttggttaattctttgttgtggggtctgtcccattcattataaaatgtttagcgacatcctcggcctttacccactagatcccagtagcagcccctacctattccttctcacccctcatcgtgtcaacgaaaactatctctagacattgcccattgtcttctgagggcagaatctccccaggacgagaaatagtggtatagccaaggtattagtcccatttccatgtgataggacttaaatctatttgtggttattattgcatcattttaatccacagcaggtttctgcaactcaggtaatatccaatagtttttttccttttttttttttttttgagacagggtctctgtcacccaggctggtgtcacccagtgcagtgacaggatcatggctctccacaacgtctacctcctgggctcaggtgatcctccccccctcagtcttccgagtagctgggactacaggcacccactatacccagctaacttttatattttttgtagagatggtgtttctccatgttgcttaggctggtcttgaactcctgggctcaagcgatccacccgcctcagcctgagccttccagagtcctaggattataggcgtgaaccactgctcctgggccttctttctcttaaatgtaactgta

SEQ ID NO: 12289 - DNA, 2300 bp, Homo sapien
ccagctactcaggaggctgaggcaggagaatcacttcaaccaaggaggtggaggttacagtgagccgagattgtgccactgcacttcagcttgggcaacagagtgagacttcatctcaaaaaaaaaaaaaaagaaagaaaattattgatgtagtggattctttgtttttttctttgttacttccaaaggcttatctgtcattaaaggggtatctttccctttagtattgagaatttgtacgaaattataaacttttcagaagacagtgtggcttacttgactctgactttactttctcctcaagtggaaaaagaaaactagagtatttttttaaataagaatataatgtattattgtgttcttcaggtatctaaaacagcaccaactggagaatatttgacaacaggaagcttcatgataagaggtaatgtcttgacaggaaaaatatcactagacttgtcaatggattatggagacaggtttgagacagtttacaaatactcttagaacaaaaacaaattactcggatttcctatgtgaagtctgctatgaagtaaagaaatttttgccttggtgtgacaagtttagtgtttgtcatatcttcttcatgtatatttttattgagggcagtgcactttcacatagtttagttataagggtaagaaaggatagcctgaacttatttctgaaaatagaatattcagggtctgactgacccagaatatcagagcaagtgtgtatattttttacttcttaataactgttcctatacatactgcccagttctataaatgggaaatgttattcttgacatagtaaaagacaaaatggatatgaccattagtgtcatctgacactaatttttttttgttttacaagcaaaaaatggagaagactgattttcaaagcattaatgtacgttatcttttgtaggaaaaaagaattttcttcctccctcatatctaatgatggggtttagcttcctttttaaggtactcttcaacttcttggttatttatttgtttttttcctgattttcattagtcttgtctgaagctccgtcactgaaaaataactgtttctttaggtagatgagtcttgtgtttggagacatcagggtgaacgaaaagtcagagtacaggatgaagacatggagacactggcaagttgtacaagtgaactcatatcagaagaaatggaacaattaggtagtttatagattttaagaaattagcttgtgatgttttttgttacctagttttgcttctaaatccttagaagatcatgtctctttgggataatctaaatttcaaaaaaaccccgaaaacccaaagtacgtgctgttttactgaatttttttttttttggaaatgctaaatatacttattctagtgaatttaaaagtatttatcagtccgggcattgtggctcatgtctgtaatcccagcacttttgggagtccgaggcaggtggattgctagagctcaggagtttgagaccagcctgggcaacatggcaaaaccatctctaccaaaaaaatcacccaggcgttgtgagcgcctatagtcccagctactgaagaggctgaggtaggaggattgcttgaacctgggaggcagaggttacagtgagcctagatcacgccactgccactgcactccagcctgggccacagaatgagaccctgtctcaaaaaaaaaaaaaaagtatttaattggatccatactaacatactttaatgtatgtttatatagtgagacttcagtatttaatgggtaatgcataaatgtgtttaacaaaggtagactcgggtaaatgtgcattagcatttagttttgggtttaggaattacaagtgatagatgaatttataaagtgcagtttctcatatgaaaatttggcttgatttaataaaatatttgtttcaagtagagagcaattatagttgctggaataaattcatctgcctacctgaggaaactagggaaaatattcccactaaactacttttgtagttattctctctgctaaggtcattcctctttacaggtaatattgcattgtttcatttactattactgttgtgctgcaagattttgttgattgaggctcaccatttccctgggactgtataaagtgccttatttacattcttttctttttttttttccccccgagagggagtctcagtctgtcgccaggctggagtgcagtggcacaatctcggctcactgcaacctctgccgcccaggttctagcaattcttctgcctcagcctcccgagtagctaggattacaggc

SEQ ID NO: 12290 - DNA, 2300 bp, Homo sapien
aaactcctggcctcaagtgatcctcctgcttccgcctcccaaaatgctgggattacaggcatgagctagcacacttggccccttgctattttaataactatgactaataaagatactctcaagatttgggggtttcacagatgtataaattttttttttttatgagatggaatgttgctctgtcacccaggctagaatgcaatggcgtgatctcggctcactgcaacctctgcctcctgggttcaagcaattctctgcttcaacctcccgagtagctgggattataggcacccaccaccacgcctggctaattttagtagagacagggtttcaccatcttagccaggctggtcttgaactcctgacctcacaatccacctgccttggcctcccagagtgctgggattacaggtgtgagccactgtacctggccccaaaatttttttaaattatgggataagtttactcactttctgttttgccaaaataggatatatttttaaaaatctgctatttcatatagacaaaggttacttttgcctcatgcctgtaatcccagcactttggaaggccaaggtgggcagatcatgaagtcaggagttcaaggccagcctggccaatatggtgaaaccccgtctctactaaaaaatacaaaaattagccgggcgtggtggtgcgcacctgtaatcccaggtacctgggaggctgaggcaggagaatctctggaacctgggaggtggagattgcagtgagccaagatcaagccactgcactccagcctgggtgacagtgtgagactctgtctcaaaaaaaaaaaaaaggcaaaactttattatcaaaaacagtatcttagacaaggattttatttaataaatagagctttattttagtaaacatagctttatgataagctcattaacctatccttagttttctcattacatctcatgctggaagagatgagtggaccagttctggctgtcgtccatggcatttgaaaattattgccgggcatagtggctcacgcctgtaatcccagcactttgggaggccgaggcaggcggatcatgaggttaggagttcaagaccagcctggccaacatagtgaaaccccgtctctactaaaaatacaaaaatcagctgggcatggtggtgcgtgcctgtagtcccagctactcaggaggctgaggcaggagaatcacttcaaccaaggaggtggaggttacagtgagccgagattgtgccactgcacttcagcttgggcaacagagtgagacttcatctcaaaaaaaaaaaaaaagaaagaaaattattgatgtagtggattctttgtttttttctttgttacttccaaaggcttatctgtcattaaaggggtatctttccctttagtattgagaatttgtacgaaattataaacttttcagaagacagtgtggcttacttgactctgactttactttctcctcaagtggaaaaagaaaactagagtatttttttaaataagaatataatgtattattgtgttcttcaggtatctaaaacagcaccaactggagaatatttgacaacaggaagcttcatgataagaggtaatgtcttgacaggaaaaatatcactagacttgtcaatggattatggagacaggtttgagacagtttacaaatactcttagaacaaaaacaaattactcggatttcctatgtgaagtctgctatgaagtaaagaaatttttgccttggtgtgacaagtttagtgtttgtcatatcttcttcatgtatatttttattgagggcagtgcactttcacatagtttagttataagggtaagaaaggatagcctgaacttatttctgaaaatagaatattcagggtctgactgacccagaatatcagagcaagtgtgtatattttttacttcttaataactgttcctatacatactgcccagttctataaatgggaaatgttattcttgacatagtaaaagacaaaatggatatgaccattagtgtcatctgacactaatttttttttgttttacaagcaaaaaatggagaagactgattttcaaagcattaatgtacgttatcttttgtaggaaaaaagaattttcttcctccctcatatctaatgatggggtttagcttcctttttaaggtactcttcaacttcttggttatttatttgtttttttcctgattttcattagtcttgtctgaagctccgtcactgaaaaataactgtttctttaggtagatgagtcttgtgtttggagacatcagggtgaacgaaaagtc

SEQ ID NO: 12291 - DNA, 2300 bp, Homo sapien
cttttcccataaatcatgcaatccatcagtaaatcctttggttctttctttaaagtacagccagaatctggctactactcattatttccactgatcagtcccctatcacctctgtgttcacatggactatgacaagtagcctcttattggatctctctcctcctcctcttttcccactacagtctgttctccacatagcagccattgtgacccttttttttttttgcgatggagtttcactcttattgctcaggctggagtgcaatggcttgatctcagctcactgcaacttctgcctcccaggttcaagcgattctcccacctcagcctcctaagtagctgggattacaggcgcccgccaccacacccagctaatttttgtagttttagtagagacagggtttcaccatgttggtcagcttggtctcaaactgctgacctcaggtgatccgcccgcttcaggccttgaccttcggcctcccaaagtgctgggattacaggtgtgagccaccatgcctagccccgttgtgatccttttgaatcaaaagtgaagactgggtgtggtggttgacgcctgtaattccagcactttggaaggccgaggccggtggatcgcttgaagccaggagtttgagaccagcctggccaacatggtgaaaccccatatctactgaaaatacaaaaattagcctgaggtgatggcgggtacctgtaatcccagctacttgggcggctgaggtgggagaatctaatgaacccgggaggtggaggttgcagtgagctgagatcatgccattgcactctagcctgggagacagagcgagactccgtctcaaaaaatatattaaaataaataaatcaaaagtgaagtcctttttctcttccagttgcttcccatcttaatacaattcagagcccttctcctatcctgcaagaaggacgggagatctcctcccctctgacctcaacacctgcattcctcctctcatacactctttctggctacactgggatcttagctgttcataaaataatgacacgtgctcccctctcagggtctttgcccttgctgttctctctacctggaattttcagtttgacccctctcttcatttacatatccacttaaatgagatttaatcagagaatccttccttgaccgctcattactaacgatagtaccaccctgaatctctctttattttgccttattttcttcttgaaaaacactccccccagcccaacatatgtttatttgaatattttttctggattccctctagaatatagattgcatgaaagtagaatctttgtgttgttcattgctgcatcccaatccctggaatattgcctggcacagagtaggcactttaatagctgttaaatgagtggccttcatgacttggccctctgtctattgcttcaacctcatttcttgacattatgcccttgattactacttgctgtacttgctggtcttttttttttttttttttttgcttgtaatgccctttttcctattctttgcctgataaccccgttagtcgttgaggattcagcttaaatgtcatttcctcagagataccttctttgaccataacccagtgtaaatcgggtttccttgttatattcctgtagcatctttagaagcactcaccattatatatttatttaaaggattatatgattaatagttgtctcttctagacctagtggggtgggagtgggggctttgtccatcttgttcactcttatatctctaatggcatctagcctagaaccaagcatatgataggtactcagtatctagaaaatgacaaggtatttattactttgtaggtcttgggcaaatattttcatgtagtaattctttagtttagattattttaatacttcaggcaaaaatattttcatttcttcattactttcaagtatgcgtatttgtgtgtgtgtgtgtttgtgtgtgtgtgtgtagattgtgccattttgtgacatttaaaaaaattcttgccccattatttactttggtgttatttaaatacattcttaacaaattgtttttaaaactcttttctataaataggcattcaagtcagcagaaaagaaaacaaagcaaacattaaaagaagttcagactgttacctctattcaaaaagcaagaaaagtatattggtaagtgttctgtctctttcaaatacagtttttgtttttattaaaattatccatgcacattgtttagaaaagtcaaacagttctacaaagcttgttacaaaaccagtagctctgcaattttttgttgg

SEQ ID NO: 12292 - DNA, 2300 bp, Homo sapien
cctagtacccattagttatttttgctgaccctctccctcctcccattctccaccctctgataagcgccagtgtgtgctgttcccctccatgggtccatgtgttctcatcattcagctcccatttataagtgagaacatacggtatttggttttctgttcccatgcaaatttcaagcatacaatacattactatgaactataatcagcatgttgtacattaagtctccataacttactctacttacaaccgaaagtttgtgcattttgaccagtatcttcccatttcccctacatcccaagtcctggaaaccacatttctgctgtctgtttctatgagaaacttctagattccacgtataagtgagatcatgcagtatttgtctttttatgtctggcttatttcacttagcataatgtcctccaggttcatccatgttgttaaatccatgccagttgcaaacagcaagatttatttcttttttgaaagctgaataatattccactgtatgtatgtatgtgtgtgtgtgtgtgtgtgtacatatatatttgcactcattatccgttcatccattgatgaaaagtagattatccctatatcttggctattgtgaataatgctgcaatgaacatgaacatatatcttcaggatagtgatgttgttgctagatcacatggtaattctattcttaattttgtgaggagcctttatactgttttgcacaatggctctactaatttacattcccatcaacagcatacaaaagttccctgttctccaccttctccccaatgctttcatattttgggccattctgtatggtttactgtaccgtatgacagtaatgctgtgcagtatgtgctatagccatttttgcatctactggtaccagttctgaaatagcagcggcgccctttctgtttagagtcgccttctggtggtaggaattctggttgctaccatgtgtagcctgcaagcctctagcagctcttttgcagcgacgccgagcgccgggcgcggtggcgcgtgcctgtagtcccagctactcgggaggctgaggctggaggatcccttgagttcaggagttctgggctgtagtgcgctatgccgatcgggtgtccgcactgagttcggcatcaatatggtgacctcccgggagcgggggaccaccaggttgcctaaggaggggtgaaccggcccaggtcggaaacggagcaggtcaaaactcccgtgctgatcagtagtgggattgcgcctgtgaatagccactgcactccagcctgggcaacatagtgagaccctgcctcttttgagttctcaccttataaagtagcctttcttcccatgcatctatcctaagacaaaagaaatgcagaatttacattcttacaggactattttcctcactacactgtgaatcccccctcccaccccacccccattgggaatcttcttgtttttatttttatcttatttcaccattatctagctaaacacttgcacattcatgctgccaagtgtttatggagcaccgattgtacaccaggtactgcggtgagtctcaggggtaccaagaccgaggttcgatgagaatcctgtaatcaattgcagaatgctccttccgagagcaggacccatcaaaataggaactccgttttgagagttcgcctcgatcgttgaggataatcttagaaggaccgaagcagttccgtttcgttacatttcaaaatcttatgtcaaagtaagcgcgcagaaaggggtccttgctcttctacactgagccctacggcccccctgtggggaaatactcctgataatcatctcgaaaattgtttcgaccagcaggggtcactatgaaggctgacttgagcccaagacacaatggggcacggtaaccagactggtccgtaagggttccaggaaggaatgcagtttcaagagaacagtttgaatctttattcgaatttgaattttggtacaatgaagagagtcagctgcaacttgacaatcgaaatcttcagaaaagcgacacaaatacgttcgcctcgaggaatattgggtcttctgcgcggccgtagagctccgccaagtgcgcctgcgcggaggagaagtggcgtcgagtccggccgggcagtagaggaacttgcggtagtgaccctcgggcctcgccatgaagagccgctttagcaccattgacctccgcgccgtactcgcggagctgaatgctaggtacagtaccctaagtgacgaggctcgtgtggggagtgcaggaggcagaggccggagtcccatggcgcaaaca

SEQ ID NO: 12293 - DNA, 2300 bp, Homo sapien
gtctcttccactctgtctcttttcttcaccaccacatctctaccacctagtacagtgcctgtcactggataagtaaaaagtaagtatttggtattgaatggatgaaatagtagtcaaggatgactctgagagttctgaagtgagcaactaaacatactgatgagccaggcacagtggctcacgcctgtaatcccagcactttgggaggccgaggcaggtggatcatgaggtcaggagttcaagaccagcctggccaacattgtgaaaccccatctttactgaaaatacaaaaattagctgggtgcggtggtgggcacctgtaatcccagctactgaggaggctgaggcaggagaatcacttgaacccaggaagcggaggttgcagtgagccgagatcgtgccactgcactccagcctgggcaacggagcaagactctgtctcaaaaaataaataaataaacatattgataaaaagaaaaaatgggtaagcttggaggaagaagagaagatgatcagttttgtttgcaaatactgaatttgaagttttgaatgatttcaaggtgacatccagaaggcaactaaaaatgtgaatctgaagctctggaaacagcatcagattggaactacagatttgagagccttgagaatttattacatcactcatgaagaacacggtgagagaacagagaacatttaggagggaactgtaaggaacaaaaacatttgctgggtgggcagaagagagagcctgggaggaaatatcaggggctgtgaacaagaaccagggagaagaaacgttcagggaggaaacagcagtcacaagtgacagagattggtggtaaattacatcacctatgtcagaaagggtcccttagacctgccaattaggaggcttgggtatcgtagccttagctagaatagtttcagtggattggtgggctatggactgaagacagaaggttaagaagcaaatgtagcaattgtagaacatggtttcaagaagtgcagccatgaaaacaacagacagatttcatttagaaaggcaaggtcaaaggagtttttttactttttttttttttttttttttagaagaaaggcagcttggaatctgtataaatgaaagagagagatagaatgggtaaaaatgattgatggaagaattttgacctactgggtttgaggtaggaggggaaaacagaagggtgctcttctctgaaggtgtaaagataaatttagagcggacagagcagcaaagagttgaaaagtttttgtctgttggccttcaatttatccatgaaggaaggagcaacgttatctgctacaaggacggaggtggcggggaaagtctggactggtttttaggagacaaggggtggggggtgagggaaagactatagataagaggacaaacagaaggtctgctttcgcagatctactatggtcgaaaattattttttctttcctcccctctatcccttcctaacctaagcttgtcgcaaaaaaggcttcaagctgccaaatccaaatttttccaccaatataccccgatactagttttttctccaaaaacaacgggcaactaacacgcagggcagagaaaacaaacagttgccccaggcttccttcgttcgaatagtgaagactgagctggcctcggcactgtgcagactcccaacctgtgctactgtgggttattctccttatagtgcagtcacctcctaaatgcttgctgaaaataatggaagacttcgagccagatgtttgcctcttaagtaacgtcccccaaaagatgcagcacatatttaaggcctgctgaagcaagcaacgctgacggaccaggttattgcgtttttctctcgctgcgtgtccggacgccacactatgagcattaagcgcatactgaccaatttctgttaagcaggaacgtggtgttctgatcaaaacacagggagccgcggccgcaaccgcgccgataagcttccggggtcccaaccctgtaaggcagaacggctgcccagctcggatgacgccacactaacgtagcctccagaccgcccagtgtgggtgtgtccaagctcacgtcgcccggcgtggcccccccgctccccaatgacgtaactgccctgcagcttctagtagcttttcgcagcgtctccgaccgccgggcgcggtggcgcgtgcctgtagtcccagctactcgggaggctgaggtgggaggatcgcttgagcccaggagttctgggctgtagtgcgctatgccgatcgggtgtccgcactaagttcggcatcaatatggtgac

SEQ ID NO: 12294 - DNA, 2300 bp, Homo sapien
cagaggttgcagtgagtcgagaccgagaccgagccactgcacttcaacctgggcaacacagcaaggctctgtctcaaaaacaaaaaacaaaaacacaaaacacaaaaacataacccaggtgtctagataaaaattaaaaaagggctaggcgcggtggctcttgcctgtaatgccagcactttgggaggccgaggcgggcagatcacttggggccaggagttccagaccagtctggccaacatggcaaaacctgtctctacaaaaaatagagaaattagtcaggcgtggtggcgcacgcctttagtcccagatactggtgaggctgaggtgggaggatctcttgagcctaggaggctgaagctgcagtgagctgacatcgcaccactgcactgcagccttggtgacagagcgagaccttgtcccaaaaatagagaggtggggttggggatgacacttgaaccccaatcttcagactcctaagcttttcagttttatgacagtgcttcatcttaaggtaaatggaaagtaaatgaaataattgttagaatattaatgtttaataagtttatttccgactgaaatgacgtttataaggttatcatataacctatctaccattatctaatattttaaatttgtttaataaaaacagtatgttaccatatgctgtttatagcatcttgctttttaaacaaagatacccatttcctgtttttctccccttgatatttgaaggtttcacgttattttaagtctaattttatcattaaccatttgatacaaaaatgtgtccttggcagggcgcagtggctcacgcctgtaatcccagcattttggggggccgaggcgggtggatcacctgaggtcaggacttcgagaccagcctggccaacatggtgaaaccccgtctctactaaaaatacaaaaattagccgggcgtggtggtgggcgacctaattccagctgctccggaggctaaggcagaactgcttgaacccaggatgaggaggctgcagtgagccgagattgtgcaactggactccagcctgggcgacagagtgagaccccgtctcaagaaacaaacaaaaaccaaaaaaccaaaaatgtgccctgaagtcttccacattgtattatttaagcctcacgtgagttagcaaggtcagtttacacgagataaacttagtaaggttaagtgcccagatccaggccatacaagcggtcgttctatattctaaattctatgcttcttaaagttaagaatgggtagtagttaagaagctactactaacagtatgagataaaatgatattttaaagatgaacagatgtcgcattctaaaaaggtgaaaacgcggcaaggcacaggaactcttcataatactgcagtttttaagaaacatgggctggtcttgacgagacctataggcagacagggctcaaacattcaaaagagctgcagagtaaactcaactccgggaaagcgctgcactgactggcagattccacacgagacactggcctcccacgtgtctttcaggaaacatacaaaattcaagggataaaggaagccaagaaggggttgcgaaaaagggaaaaaaaaaaaaaacaaaagcgaacagagcttccctgggacgttcagggagcgcggagggtgcgggaaggctggggcgggcggagggaattcgcagagcatctggcgggcaccgaggtctgggaacaggcctggaggcagctcggttcgtggagagagcgggctgcccgtgggccccaccctgtagggccccccagtagatctgctcccttggttcgggtgggcaggggagggcagagcgcaaaagagaaaagcagggaaggagacgctagaagagccacgggtaggcgcgagtcagagtccgaggttcgagggctctgggccggccgcatctgcgagccctccgaggcgccgtagccccgcccctccggcgcgtggcgcccatgacgctaggcgcgcgggccgctctccttacagaggtcgctcttgtccgaacggtcggcctctgctgcgcctgcgtggtcgggaggggaagtgaggcggtttcctcggcgccttttccggcagcggcggcggcagaactgggaggaggagttggaggccggagggagcccgcgctcggggcggcggctggaggtaaccccttgggccgagctggaaaggcgggccacctcggtcttcgctcctttgtggagctctggcagtaactcccctccctctctgtttctctgcaggcagcgcaccgagttcccgcgaggatccatgacctg

SEQ ID NO: 12295 - DNA, 2300 bp, Homo sapien
ctccagaagtgcctgcaggaaggaatgaaaggacacaggggcgagcgagtctctgagtatgagaagatcgttgacagccctggagcagcaagggtgctctggtgtgcggcttccacccttcccctgatcgcagctgcctctgttgggctagctcctccaaccatagtgcttggtctgtaaccaccagagttctgggcaagtccttagtctgaaaaaggatgaagagaggaggtgttgtgtgcaaaatgtgattcacaagagtggccaggagtcaaaggcctctgtccctctttttttttttttttttttttttttttgagatggagtctcgctctgtcgccaggctggagtgcagtggcgcaatctcagctcactgcaacctctgcctcccaggttcaagtgattcttctgcctcagcctcccaagtagctgggactacaggcgcccaccaccacacccagctaattcttgtctttttcgtagagacggggtttcaccatattggccaggatggtatcagtcgatctcttgacctcatgatctgcctgcctcggcctcccaactttttttttaaattaaggaaatatctctgagtcataaaagacccctccttgagctttcataggccaagcagaccctgctgcagcaggaaaaaggaggtttcttgacacaaattgattaattcaaagttattctaaaacattttcttggcctattcatacacaaaggcacaaagatcttggacaatggaaaagcatcacaaaacttatatttagagaaactactttccacagtttcctttgccctttaaactcagtctctagctgggcatggtggctcatccctgtaatcccaacactttgggagaccaaggcagaaggattcctcgaagccaggagtttgaaagcagcctgagcaacacagcaagaccccatttctattaaaaaaaaaaaattaaaaataactaaataaataaactcatcctctcttctccctacccccagtcttcctcaggcaccagtctacgtttctagtaaaaacttgcttggccacttgtgtagaaagaggaattaatttaatatttgaatactcagctgactggttctccatgggagcaagtagccaagtaaatatccaagagagaacgagggaagggacaaaatggcaccaagcctgaattgtgaagtcctctatcatcctgcaacaccctggatatgcaaaccgaatatcctctctcttggtgagtcacggcctcccacgcccagcagggtgtagaaacatttgactgaaacctgtataaaatagtaagaacaagtcaagcaggtaaaacatttcctggctgtcagtttaataaaaggttcaaccctgctttaagatggaaggaagacgggaggcggggtttcagaaatacaggttttacataatcccacagaaaccagggatctgcaataaggcttgaagatttttagtctcacaggtatttccgtctgtaaacacaaatgcacatggaagctctgaacacatagtttgtgtttgttttatattaagaggatgggcatttctttagagctccaggcgttgagtagatgaccatttggaggagatgatgagtttcctcttcaaaatgcaagatgtcgatcaacattcatgctgttcctatttctatttttttcctcccttctaccccttactcctgaaatggataagaagaggcaataatagcatcccagcaaatcagaactggctcagatgccaaaggcctaaaagagacgatcgcattagcaagaaggcctgtgactaaaaatccaaaacctaaaactactatacgtaaacctagggctcaaatagcctacactactgtgacatcagaagcattatttctcaagattgagaagggctagtgaaaacgcttctgggcctgcaaagctgtgaactgatgtgcaaggctgcagtagcccaagctgatcctgatgaacactggagctgtctctgcctctttatgtaaatagaaaatgttcctaataaacgtgtactaggtcgttgtcggtaaacacatgttaggcacccgcttggcctgcaccgatctgaccagatctatttccatttccccgaaccatcgcttggatgatgaagcacatcgcagagtactgcttcatcaccattcaggaattgtacccttttaaatttctatatgggtatgcgctgcttttgacacagcttttgttgtaagcaggcactaaaatagaagcttataattagctatctggggaggcaagtgtgtggtagaacagagctcagca

SEQ ID NO: 12296 - DNA, 2300 bp, Homo sapien
atctgctcttggactcagggcaggtgcagctggtgttctagaccacagcacaatggcaagaaggcccctctggagcaagtcagggtccaggcgctactggccccaggtgagcccaagatgcaggcttcaatgccaaattaaccaagaaacagacaggacccagggcccgagcacacagacagcctggtacatgcggaatcacacactgatttgctcatgggagctgactgtgagggctgacatcgcctttggactgaattgtgtggaatgtgctgaaagaggctttggagtcagaaaatgttagagcctagcaagacactctagaaagcatctgctcccagggtccccaacagtgactgctcttgataatcatgtaaacatttccaaagtacagattccagccaggcgtggtggctcacacctgtaatcccagctacttgggacgctgaggtgggagaatcaattgaacctaggaggcggaggttgcagtgagtcaagattgtgccactgcactccagcctgggtgacagagtgagactctgtctcaaaaaacaaacaaaaaacaacatacagattcctaggctccagctacccctgccccagcacacacacacgcacacatgcacatatgcacacacatagattctcatgagcagccaggtttgggaaccattggtgtagcccaaacccttccattcagtttctcaagtacagtactatgttcagtgacatttccaaggccacatcgctggtttcgcaggactgggattacaggacaagtttcttgactacaacccagggctttttccacaacacactatctatctcctggatgtaccataaaggaggctgccgatgtaccccagagatttttggatgtggagagagggtaagaagcatagcctttgtgcttgtaaagtaaaccaaggtaattttccccaatattggcctcagtctcaagtctctctgggcaagagattctgcctctagctctacaattagtacagtttcccttgttttttgagaggggatgaaaagtactgtacatgtgtgtggagacttctctgtgcctcagtttacctctatttatttatttatttattttgagacggagtctcgctctgtcacccaggctggagtgcagtggcgcgatctcggctcactgcaagctccgcctcccgggttcacaccattctcctgcctcagcctcctgagtagctgggactacaggcacccaccagtacgcccacctaatttttttgtatttttagtagagacggggtttcaccgtattagccaggatggtctcgatctcctgacctcatgatccgcccatcttggcctcccaaagtactgggattacaggcgtgagccaccacgcccagccagtttacctctacttaaaatggagagagtgcccagcacccttctaccttctcccttggggctctgcagattgaccgcacaaagattgaccacacagattgattgacctgtgaaaccccaaggcagaaaaagaagctttctgtgcccacacagaggtgttcttaaagtcagggttgctcttggcacacatattaataatcctgatgtctaggtaccattgcagatcctttggttcccctctacccgttccaggaaagactgcctgtcttctccgagtttcttgagggctgatgaaatatttcctgaatgtgatctcagaaggaatcccagttttgagggaccaaacaagattttttaaaaattaaatactactactaaatagctggtattgagttaatcctaagtgccaggcattatgcaaaacactttacatgcattatggcatttaatcctcactacaaccctagtgaaataaatatcaatataattaaaagtataaatataaatgaagtgttataatagtctcattttacagatgtggaaaatgaggctcagaaaagttcacgtgcccaagatcacacagctgctaaatgacagagccacgattcaattcacatagtcatctctagaggcaaagctctggtaaagggcttgatgactggtcactgtcgtcacgaacttgacctttcctgcagcactgcctggtactttcccagtacagtgttctgccctgacacagccaaggccaagggcagtgcaggcacagccaccgtgactctctgctgggaggttaacagctccatcagttcagggactgcctgacccagcctgaccaaattagagcaagtaatgggtgtgacataatttgacatgtacattgttaattgaacccaatgggagatgattttaaatag

SEQ ID NO: 12297 - DNA, 2300 bp, Homo sapien
tttattttttaaaatcgataatgggactcttgctatgttgctcacactagtcttgaactcctggcctcaagcaatccttccatcttggcctccaaagtactagggttacaggcatgagccggggctcctggcctaactaatttcagagttaagaacgtttggactctattttatagtaaaaaataagtcaaagctaccttcccctagatagccaaatgactctcagatgggctcgttagacagtgctttaatttaatattgaaagaactttttgcttcccctcctccaagttttaataattcttaacagagggaaacagcaacaaaatttttgctgtagtgggtattaaagaagggaaaacaatcatgaatgccggagtcaaaatgcccaaggagcggaggcaccagcgttctccacctggtttggcggcgcaccagcagtgtgacctggaatctgatctctctggagctcagtgtcctcacctataatatggggtattgaactacacacttggcaggactttgccctaaagctaattttcaaaataaaaaaaaaaaagccacttcccttttcccacattaaccctgagagagaaagaggaagcgggaagcccgcacatggaagcaatttattgcagacgttcctgggctgggagaggagccttctgactgctgcagagaccatcacccggtcctgcacctttaccggaggtgcggagaactgctcggcccgcaccgggctcgggggtgttcacgggctgcgctgcctcccctgcgcgcaggacaggagtcgccagaggccggtggtggatttcctccccgcatctcagctctccgtccaaagtcaaattgctcttttctccgcccacgcgggcgtggcagctgatatccggccgctgggcgtccccgcgcccccgggggccccgccctgcagctatctccgcggcccacccggcggcgcctccctgcagggctgctccccagcccaaaccgccgcggcgcgacgtggagccagccccgcaaagctgcatccaccccccgaggaccagcccctcgaaggcaaggccaggacctccccgggcggctgcagccgtgagccacccctgttttgtgaaacacacactctgccatttcaggccgcacttgcccgttgccatgggcgttttctatgttgacacaagcagggacacggaatcccttgactttgagttgcagatcgtgggtgttggcgtctccgctgctttaccaggaaggatggaaggggcttcagcctccattctcactttccttctcaaggagttggctaagcatcaggagttttctcttaggcttctctcaggtcccctttccctgagaggtgaaaagtttttcagaaaggtgagcagctttctctttattcccagggaccacttcacacacccctttttcgcctccagagtagatggaaccgtggaacgagggaatcctgccctctggttgtgtctgtcatctcctactgggaccagagccacaaaagccacaaaagacccaactctctccagcgtgcaggcatcccaactagaggaagcaaggaggcagagaccaagaggacatcaagaggcgtttgaacccgcagagagggcctgggagcacaatgctgagcgtaggtccaaccactgcttctcaatggggtgggagagcggcgtggggagagttgtgggcatttagggcaggacagtgccccccaccccacttgggacggggccgcattgcatcatcactgtaacagcactagctgcccctgcccccacaacccctatgtatgaaatgcaagtagcacctccccatctttgtgacaacccaaaatgccacctcctgtgcccaagcactctctagtgaggtgtttccttaggttaaaaaccactgttagatcatttcctaaaatatatctcaaaagacctcaattagttccttcatatataagtaggtgttatatgaaaagagtagcatgctgatatcagtatcatgctgggtttgggagatggtgggttaaaaagtggaacaggatttacttacaggacttctcagaacctttaatatatataaatatatgttttgaatcaccaagagagagatggactatgcagatccccaaatttaattggccctggaattctttctttgtgggacccttttgggtggaacccaccttagatacctctgaactacattttgtcgtccagggcactctctggggacttctgtgtccttcccagtgtgaagtgcaggagtgagcagtcaaaaggcccttatgtttttact

SEQ ID NO: 12298 - DNA, 2300 bp, Homo sapien
tttttttttttttttttagagatggcgttttgccatggtgcccaggctggtctcaaactcccaggctcaagtgacccacccaccttggcctccctaagtgctgggattacaggcataatcatggcacccaactgagcgctgcaagggtcttttccaagctgagtgctgtaagggtctgggttaggcaaggaagacactaagggtgtggccacttgctgtacagtggagcaggggccttagaactacatagaagaatgcaagcaagctccccctttctctggagaaacagcatctctattttccaagcatacatgctataccagcatccttggaaagatgatcaaataaaagacagacagtgtgtctgcttgcaagatatacagaaatgtggccaggcacggtggctcatgcctgtaatcccagcactttgggaggctgaggcgggcagatcacgaggtcaagagattaagaccatcctggccaacatggtgaaaccccatctctactaaaaattaaaatattagctgggcgtggtggcatgcacctgtagtcccagctactcgggaggctgaggcaggagaatcgcttgaacccatgaggcggaggttgcagtgagccgatcatgccactgcactccagcctggtgacagagcgaaactccatctcaaaaaaaaaaaaaaaggaaatatatagaagaatgccttctgaataatcatttcttttttgaaattgtggcaaaatctccctggactcaagggatgggtgtaaaaagcagttaggcagaggatgagggcctgtgcctgaggcgtccaagggcagccccagctccctgcagatccagtgcagcgggatgtgcaggtagatctccctccccagggcacaaagctgggtggggaacagctgtcagaaccagccacaccccaccccaccctgcccaggcatcagaaacctcagggaaatgcctagatactccacctcaaggaaaacattgaggccctgtagccaggagtgccctgtttgtgtctaaaagttgccccagcccaaatttacagctgggaggatcagaagggcaatctctgtcttctcccaaaaggaaatcatacccatagttaccactgggagcagggtgggccgtttacactcctcatcctacctcgccatcaccttaggaagcagccattctccttgtctttactgtagaggaggaagcctggacagcctgcagttgaggggacctgcacaagctcacaggactcttcatcaccatgacaccacgctcaccgcaaaataaaaatgatcaaacctgtcatgatgtcagcagcaccggtgttggtctttgtgggaaagaaaaacacaggccagggctgcagcacgattgtgtctgcccagctcttgcagcctggagaacaccgttggattccctcccacacatgctcccaggctgcctgcctgcctcacttacctgctcagggtggggcttgagggtggcccctgggaagagtaagaactggccaagactgagatgtccttccctcatttaaggtaccgccttttcccttttcccgccatcctgggtgcatggatacttgggattagaaactggactggaaatgtaatctttcttcggtttggggctgagaactggggattagtaggattttgagtttatggcacagccttttcttacaccatttcctaaaaagcagttaagattacaccaggcacagtggcttacgcctataatctcagcactttgggaggctgaggcaggtggatcaagaccagcttaaccaacatggtgaaaccccatctctactaaaaatacaaaaattagctgggcgtggtggcacgcatttgtagtcccggctacttgggaggctgaggcaggagaattccttgaacccgggaggcggaggttgcggtgagctgagattgcaccattgcactccagcagcctgggcaacagcaacgaaactccgtctcaaaaaaaaaaaaaaattacagtcatctcccagaaaaatcaagaaggaagaaccttggaggttcaacctatagaagatatgttctcatggaataaaccaaaaataatttttattttctaaaaaatcaagaacagaagtctctcaacatttaagttttacaaacaaatagaatctgagccactgggttaaacatgacaaacgacacacagtaacaaatattgaagacatcataatgccaaagcaacagaagcagcaccagaaatgttgctgaggccaccatttaattaacgcaagttgaacatatggctttggttacat

SEQ ID NO: 12299 - DNA, 2300 bp, Homo sapien
tcaaactcctggcctcaagtgatcctccctcctcagcctctcaaagtgctgggattacaggctggagccactgtgctggtcacacattgcttttgattgctagaaaccagtttatacttcagacttgagccagctggtgatcagttctctttaaattgcaaatgatataaactccaattcaaatggacttcagcaaaaaagataattcatcagcacatataactggaagttcaggggcttcacatactgctgaattcgggtgcttcgaccggtcatcaggactcagctctcagagttgccttgtctctgtggctcttcctctcccgagagtggcaagatggctaccggcatccttagggtcacactggaacaggttagaagttcctgtggaaagctagacactttcccaatagttacaaatattacatacatatatatacaaagcgtcctgggactgactcatttaactgacacgtaccagtccctgaaggccttgttgattggccaggcctgggtcagtcctgaatctgggtggggtcagcctcaccagaacagcacagtgagtttgggggtagggggacggaatatgcaaagaaaagccaggacaacactaagcagacaaaataaaggtttttttttccccctattacaaccaaggccacctggatttcataattcctgcccaggaggcaaacctggctcactaatttcagtgttctttattaaagacacacacagcagagacagaggaagagaaaccagaagagggaggtgaggatggagcctctaagggcaagaatgcattcttttttttttttttgaaattttgttttcgtttgagacagggtctcactctgtcacccaagatagagtgcagtggcacaatcacagcccactgcagcctcaacctccctgggttcaggcaatcctcccactgcagcaacctccccagtagctgggactacaggtgcatcctcatgcctggctaatttttgtggttttttttttttttttttttagagatggcgttttgccatggtgcccaggctggtctcaaactcccaggctcaagtgacccacccaccttggcctccctaagtgctgggattacaggcataatcatggcacccaactgagcgctgcaagggtcttttccaagctgagtgctgtaagggtctgggttaggcaaggaagacactaagggtgtggccacttgctgtacagtggagcaggggccttagaactacatagaagaatgcaagcaagctccccctttctctggagaaacagcatctctattttccaagcatacatgctataccagcatccttggaaagatgatcaaataaaagacagacagtgtgtctgcttgcaagatatacagaaatgtggccaggcacggtggctcatgcctgtaatcccagcactttgggaggctgaggcgggcagatcacgaggtcaagagattaagaccatcctggccaacatggtgaaaccccatctctactaaaaattaaaatattagctgggcgtggtggcatgcacctgtagtcccagctactcgggaggctgaggcaggagaatcgcttgaacccatgaggcggaggttgcagtgagccgatcatgccactgcactccagcctggtgacagagcgaaactccatctcaaaaaaaaaaaaaaaggaaatatatagaagaatgccttctgaataatcatttcttttttgaaattgtggcaaaatctccctggactcaagggatgggtgtaaaaagcagttaggcagaggatgagggcctgtgcctgaggcgtccaagggcagccccagctccctgcagatccagtgcagcgggatgtgcaggtagatctccctccccagggcacaaagctgggtggggaacagctgtcagaaccagccacaccccaccccaccctgcccaggcatcagaaacctcagggaaatgcctagatactccacctcaaggaaaacattgaggccctgtagccaggagtgccctgtttgtgtctaaaagttgccccagcccaaatttacagctgggaggatcagaagggcaatctctgtcttctcccaaaaggaaatcatacccatagttaccactgggagcagggtgggccgtttacactcctcatcctacctcgccatcaccttaggaagcagccattctccttgtctttactgtagaggaggaagcctggacagcctgcagttgaggggacctgcacaagctcacaggactcttcatcaccatgacaccacgctcaccgcaaaataaaaatgatc

SEQ ID NO: 12300 - DNA, 2300 bp, Homo sapien
tcactgttttttggtatatttccaaactttcttctttgcatgcatatacatatataaatagttatgggctcacaccgtccatgttgctttgttactctatttcatgtaatactaaatcatgaaaatttttcatgtcaataaatacatttaaacgatattaagtgcctaaatattcctttgtagagttgtattattatttatttaatgagttgcctattattggagattaatgttgtttataattttttaaaaaaattttattagagatggagtcttgctatgttgaccaggctggtctcaaactcctggcctcaagcaatcctctcatctctgcctcccaaagtgctgggattacaggtgtgagccaccacgcccagtctgtttataatttttggtgattattctttttttttttttgagacggagtctcgctctgtcacccaggctggagtgcagtggcccgatctcggctcacttcaagctccgcctcccaggttcacaccattctcctgcctcagcctcctgagtagctgggactacaggcgcctgccaccacacccggctacttttttgtatttttagtagagacggggtttcaccgtgttagccaggatggtctcgatctcctgacctcgtgatctgcctgcctcggcctcccaaagtgctgggattacaggcatgagccaccgagcctagcctaggtgattttcttaattatttccttaggatatgttccaaagaatttaattgctaggtcaaagcttatgaccttttaaaggattgtgatagtgtgtcagtcaggataggctaaatattgtaacagacatagccaacatctcagtggcttaacacaataaagatgtatttctcttttatgtcacagttcaacacaagtcattggttgggagtagagggcactctgcatggtcgtctggaaccagggtttgcctacatgatgggtctccatttgccaccggccttggacgtctccactggatgctctgatttcacctgataagtaaagggagagagacagagcatggagaattacacaggtagttttagggtcaggcctggcagtgactcacatcgcttcctctgcccaccttccaattgtccagaactcagtcacatgactgctcctaactgcaagggaggctggaaagtgtagtcttcctgagtgtccaggaggaaaacaagagtgtaatggacccagaataagcatagtctctgcctcaaacattaccaagtggccaatcagcaatgtttttccagttatttatttattttatttattttgagacagagtctaattctgttgcccaggctggagtgcagtggtgtgacctcagttcactgcaacctctgcctcccaggttcaagcgattctctagcctaagcctcccgagtagctgggattgcaggtgcactccaccacacccagctaatttttgtatttttagtagagatggggtttcgccacgttaggcaagctggtcttgaactcctggcctcaactgattccccacctcagtttttccagtttatattctcaacagcagggtatgcggattcctattttcctattccctcaataattaaggggatgatgctctttctgttgttttttatagatctgcatggaacaatgctgcttctctgcatgactagagtttgttttctctttgaagataatctcactaggatcaagaccatacctgctggagagtcaggactctggatttctgattgttttcaggacagctaccctcatcctaggctgatctgagtttctgggtctttctctgcctgttctttcctctccccttcccttccctgctgcagaaagtgttttatgtgggtgtcagcaacatcaggacctttcaagccccttgccccagtatcatccctgaatgcaaaactcactcagaggcctggggaagagattcgaactctgcttttcctctgccacctcaggtgtgttccagcttacaagacactttcacagaaaaaaagttcagggaatggaattggaaggcaaaaatagctgctcgatgctgacttggcacatttgactttgaccaaatcatccagcgcctcgtccttagtactctggtttccacagaataatcctcatgcagtgagtagtggaagtcaggaggaataaactgcctagatgtcatgaagggaaaacaatgcacaatagacttgtgcagaatctattcctgtccgtttccctgtgaatccagattgctgaacactggccgatgtctgagctgtggtttccccctggatttgaa

SEQ ID NO: 12301 - DNA, 2300 bp, Homo sapien
taactcacgcttgttgtaatcccagtactttgggaggccgaggcaggaggatcatttgagaccagcctggataatgtagtgggaccttgtctttactaaaaataaatttcaaaaaattaacctggcgtggtggcacatacctgaagttccagctactggacaggctgaggtgggggcagtgcttgagcccaggagatgagccagcagtcagctatgatcgtgccactgtgctccaacctgggcgacagagcacgaacttagcttaaaaaaaatagttttaaaactgaaggtgttttcttgttgcttttctcttggattatggggaaagtcactttcagagtggagtttcaatttttttccttttctgttgtatttcccttcagttacccagccttcaggaaaatctgacacttgggtactgcctatgtgtggtggcagaaagtgaagacagaggccagtataggacacatacctgccccacatctactgttcccacggtagagtcctaggttgatcttaaaggcagctttgatgattgacagatgattggctgcagttgtagcagaattaaccagcttaccaggttaaatgttggggttgcgtgtgggtgggcttcagactcaaaaattgatggaagtgccggctgggcgtggtgctcacgcatgtaatcccagcattttgaaaggccgaggcaggtggatcgcttgaggtcaagagttccagaccagactggccaacatggtgaaaccctgtctgtactaaaaacacaaaaattagccaggcatggtggcgtgcgcctgtaatcccagctactcgggaggttaaagcaggagaattgcttgaacccaggaggcagagtttgcagtgagacgagatcttgctgctgcacaccagcctgggcaacagagtgacattccatctcaagaaaaaaaaaaaaagaaaaagaaaaaaaattctgacagaagttctgcctcattgatctgcttaatgtgatcagggataacataggatccaagctaatcctgccacttagcaattcagagctatgcatttagatgacgatctctgtccagccctgtgaaatatgagcagaggagcagaggtaggtgtgtgtgtgtgagacagagagagagagagagggaaagagagacagaaagggtgaaagctgttagtaggtttgtaattcttggtaaaaggctggaggggaatctattactttatttttttactagtgtctccagaggacagatgtaactttccagatagccttgaaaaatgtgactgttattctgcaacaaaaaacaaaaacaaaaacaaaagccatcatttttcatactcccctgaggttcctggcaagaagcgtgagattctataaagagagagcccagggttttgcctgttcagctgcccctggtcaggagcttgtgtgtgaatctccccagaaacacttcccaaccataggacatttcccttgactctgattcatccatgagtccccagagtattttgctaccatctttccaaacaatccatgccaatcattgattatgattaggagcgtggccatgcagaccccctcaggtcaccctgtccctctcctggttgaagatttatctcagcatcacttggtggggattttctggactaacagaagccagagggagaaggctgcactcctgcctctgctgctgactggctgtgagttctgaggcaggtccctcagtctgagtttgttttttcacctgtgagacagggatgatgatagtggtggtgactttttttttttttttgagacagagtttcccctctgtcgcccaggctggtgtgcagtggtgtgatctcggctcactgccacctctgcctcctggattcaagcgattcttgtgcctcagcctcccgagtagctgggattacaggtgtgcggcaccacacctgactgatttttgtatttttagtacagtcagggttttgccatgttggccaggctagtctagaacccctgaccttaagtgatccacctgcctcagcctcctaaagtgctgggattacatgcatgagccaccatgcccaggctggtggtgacatttgttatgttcagccatggaggtcttagggttctcgaatagtaagatggatgtcagagccaaacgtcaacttgaaatctggatggaaatgtgagttcctgtgggtatttctcacggtttacaaatggcttgattattccttctttccccttctcagctgcgtaccacatttgaaaagaacaaatggggcacctggacttccagctacctttgctc

SEQ ID NO: 12302 - DNA, 2300 bp, Homo sapien
cggcctccagaacactttataaactgtccatttaatcttcagccacctccactggggcatcttcacagagattcagactggctcagagacattagtacgtgtccaaattcgccaagcactcctcctagcacaccctctccaagggtaccgcgtcgatgctatgtgctcagttctagtcagaataatcttgctcatcctccagctccccctgttccaccaaggcagaattcaagccctcatctgccaaaactgccaccaaagacttacaaacgggagctttcgcaccccccattgtacagactgcctttgctagaaaatgcagaaactccccaatgaccttagccatatgtagtcattgacactggaatggtatttgtaaagttttttttttaatttattcaaaaaaagacatagtattttagtactttttacaaataatgctcttacaaaaatgctactgatcaaataagcttttaagaattggaaaaataaaaatacaaaagtccttcaccattatcctcaggtgatcagtagcattgccttgtcttggatcctcagtgctgccaaaaggccagtataaagaatttatatttgcactgtaaactctgcaaaaatatggtttaaagtgacatgattgcactgaaaagggatagtgcttttgtgaaatttttcaaatttgagtaatagatgcctttttaaggcagtgaatttacacaaatatgggaggggtatatggtgttactgatttttaaacctctttgaccatcttctagtttttacttctagtttttacatctaggagaattgtgaataacaccaactgttcttaaactctttaatgccatgtcttaaatgccggtatttgctgctgaagacaaaaatgaaaagtaggatgaaaataatagaatggcactgtaagtgtttattattttgtcaaaatgtaaacaaagactacataacccaatgatggagggaaaaagggcatgtatctcattcagatgtgccttttgtttttgcagactatgacgtctttagctaatgaattgcctattgttatggaaaacagttaatatgccatgtatgtacagttttgtttatattgtatatttaaagatactgctaataacctatataaatttaagtgacttgaggcctataatacaatctgctactttactaattcataaattcaaaaaaaattctatggcataggaaccaactgccttgccttcaagacctagtaactttctctataaatctcgtgttaactgaaattttttttaaatatattttttagattggtaatatttaaaccagcaaatacttaaagctttattaaacattttaatcagataagtgagtaaagcttttatttgccatttggatgccttcgttcaaagtgatagagtgttttgctgatagtgctgtagcagcagttgtaaagtagccaaaagccacgttgtttatttactggtttgtggccttttactgtgctttgtatcagagttcttaacaagattaataaatcaccccagtcttaatttttaaaagacttttaaaatatgtgttttcattataaggaacaaagggggagattgttgagtcctatagacacacacacacacacacacaattttttcttcactgttaaatgtgagctgcaggcttctagcaaccacttttatgaattcatacaaaaaactaggagcatactaggaacttgaaaaggaagattgtaagattatagccatctttggtaggatcttggaagctgattgcatttaagccttgtaactactatgtaaatcaagtgtccaacttggtaaactctgaggttggctttgttttttaaagagcagattataatagttttgtctgggaaagtgatttaaacggcctcttcgttaagccaaacgtgtgatttagggtagagggaggctgccaagcgcgtcgggtaagcaggggccccacgctcggccccgcccaggtaacgctgccttccgggctttgttaactcgcgcgcgctgcgtcgccaactcagcggcgggcagggggcggagccgcagggcggggcggtgcgcgttgatgtgacgtccctgcgcgcgccgctttctgttgccgggcgcaatggcggatacgctggagtcctcgctggaggacccactgcggagctttgtgcgagttttggagaagcgggatggtacagtgctacgactacagcagtatagctccggtggcgtgggttgcgttgtgtgggacgctgccattgtcctttctaaatacctggaaacgcccgagtt

SEQ ID NO: 12303 - DNA, 2300 bp, Homo sapien
gaaagcatgtagtgaagaacaagaagacagagaatgtttgaaccaagctattactgctctcatgaatctccaaggtagcatggaccgaatttacaagcagtattcacctagacgtcgacctgggtaattccaaagtgttgaaaacgtgaatgcctctgcttacttcgctgtctctgatgcctggttttcaaagaagtgtgatttattgtgatagttacattattgaaagttgtgcttgtcatacttttatatacttttatgttggtcttttactctcttttttccttttcctttcctttttttttttttgagaaggagtctctcttgcccaggctggagtgcagtggtgtaatctcagctcactgcaacctgcagccttagcctcctgcgttccaatgattctcctgccttcgcctcccaagtaactggaactacaggagcccaccaccatgcccagctaatttttgtatttttagtagagacggggttttaccgcgtcggccagactggtctcaaactcctgacctcagcctcccaaagtgctcggattacaggtgtgagccgctgcgcccagcctttttttcttttttttaagagacagggtctcactctgttgcccaggctggagtgcagtgatgtgatctcagctcacagcagcctcaacctcctgggctcaagcagtcctcctgcctcaaccctctggagtagctgggactcgagtagctgggtggcacatgccaacacacctgcctaatttttgtattttttgttgaaatagggttttgctatgttgcccaggctggtcttgaactcctgggctcaggtgatctgcctgctttggcctcccagagtgttgagattgcaggtctgagccactgcacctggccaacccagcctagtcttaagattagcattgttggctgggcacggtggctcacgcctataatcccagcacttcgggagtccaaggtgggcagatcgcctgaggtcaggagtttgagaccagcctggccaacatggtgaaaccccatctctactaaaaatacaaaaattagccaggcgtggtggcaggcacctgtaatcccagctactcgggaggctgaggcaggagaatcacttaaacctgggagggggaggttgcagtgagccaagatcgtgccattgcattccagcctgggggacaagagctccaaaaaaaaaaaaaaaaaaaaaaaaaaaaaaaaaagattagcattgttatattattaggatagacttaataaatgtttaaaaatataatctatgaaagaaatttaggattttttgtaattttagttcttatagagccagtagtacttctctttcataataatgaaattgagggctgtattatttagtggcaaagttagaactaaatgctgtgcgtaaaagctactgtttggttatttaatattttactcacttgatttgagatggtttatgcttgaaaccatttgggttgctagctgttgaataagctatattgtttgttttttctagagatcctgtttgccctttttatagtcaccaattaagaagcaaacacctggctatcaaaaaaatgaatgaaattcagaaaaatatcgatggatgggaaggcaaagatattggacagtgttgtaatgaattcattatggagggaccattgacaagaatcggtgccaaacatgaacggcatatttttctgtttgatggcttaatgatcagttgtaaacctaatcatggccagactcggcttccaggttacagtagtgcagaatacaggttaaaagaaaaatttgtcatgaggaaaatacaaatttgtgataaagaagatacttgtgagcacaagcatgcatttgaattagtatccaaagatgagaacagcataatatttgctgctaagtctgctgaagaaaaaaacaactggatggcagcccttatttctcttcattatcgtagtactctagatcgaatgttagattcagtattattgaaagaagaaaatgagcaaccactgagattaccaagtcctgaagtatatcgttttgtagtaaaagactctgaggaaaacattgtttttgaagacaacttgcaaagtagaagtggcatccccattattaaaggaggaactgtagtgaaattaattgaaaggttaacatatcatatgtatgcaggtatgtgaaactcattacaactgctgacctagggcctgggacccaaaagctttttaaggatgctcaaaaatatttgaggcttggggaaaaaatggattgcctccaaaatataaaaatactgcaaaa

SEQ ID NO: 12304 - DNA, 2300 bp, Homo sapien
ccaactggaaatggatggcatatttttataaagagggcagccactacccggtgcctgctgattactctcttgcacgaatgcagtaggtcccagtgttgccagatctttgtcaagagaagctgaaaatatacatttttatatgaagcctcttgattttaaaatgttaacaattaaatttaaatacagccttagctaaacaaaatatgtcttcaggcctgacttggcccagaaaagccttctgatattcctagccaagaatgagatttctaacaagtttactctcctatgagtaaagagaacatacatggtctagtagtttgacatcacagtagtttatagctggagtctgggaacaggagagaaaagtaaggaccctctatataagccaaagtcttcgctctcacagactgaaacattaatgggagaaatacaagcattttaccatcccaccttttatcccaagtacatgtgaatggatatggccatttattagaggatgttcttgatttagtggatactttagtggattagaaaaataatcttattttccaactctgccattctgattttgcccaaatgaaaaagtggtgcatgttttggggagaataattgctcagctactgatgccggaactgaattgtagtactgacttattttttgtaccctgttcgtcttttccctttctcactgctggtggctagggacagggagtaaaatatcttctttacaacctgttaaaagtaatgtgctcagcctctttagtgggatgaaatttgtggtaatgagttaccagagcctatgcctctttggattgaaaagcttgtcaggatcttttctgggttgctaatgagtgtttcctagacgccgatccaggttttgtaggacctgaagcctacacaatttggatgacacgattaagaaaacaattcgaaaatatcttgaaagttttgtaaaaacgatatgattttgtgaacgcacaggggcccgtgcaagtgaaggacctttcaattcaagcttgatcaacgtcactgtcatctgccccttctgaccctaccaccaggctaagggctttccacgcctcatctctcggtccccacaccatcaccctaagaaatagttactgtatctcctaacgatatattatatatagtacctactttgtgtaaacatacggtactcatgaaaacaagccacgtagagcacaaatacgttaaatatcctgtccagcccgaatgcccctttctctccacgtccctatgcagcctcccacgacggtagtcctggggctccagcgctacaagagtggcaccgagtccggattgtcttaagcaggtcgagaggagggagcatatgggtaaaaagcagtcaaactgaagagtctggagcggcccccagcacagtctcgggaaaagcggactcccccggggccccaggccccgcacccccgcgccgggctggcgcctgtgcctgctccgcggcgcgcatgctccgtgttaggcctcttgggctattcgggataatgagcgccgggccgagggggcgggccgagcctcggctgctgggactcagggctcagcggcgaccccaaggcactctgcgctgctgctaaaggggcagcaacggcggccagcgctgtgcgcgccatagcgaggctcgctcgcccgacgcgcactccgggtcggtccccagagctctgtggaggtgactcgagtgggcagggccgggcggcgctgtcggctgggagggcggggaggaggcgatgaggagacgagcagccgccgccgccgccgccgctgctcaccgcccgccgcggccgtagcgggagtcggggcggggctgggccagctgtacccctgacgggccgcgaacccagacaaaggaggaggagccgccccagaagcgggccagcgccgccgggaaaggaggtcgccgcccggggtcgcccgggcttgcgggtcgccgcgcttcctctgcgggcgctgcgggaggcgagggccgcctcggcggaggaagccgaccccggggtctccgccagcccgccggcgccgcctccgagccgcctcggccgtagcctcggcccgggcgggaggcggcggccgccggcgaggcgaggcggcccgcgccctgcctgtcaggccaccggcccggcccgcgggctgcccccgatgcggaggcgctgtcgccggggccatgcagcaggcgccgcagccttacgagttcttcagcgaggagaacagtccgaaatggcggggactgttggtctcggccctgcggaaggtcagtgctaggggcggggcggc

SEQ ID NO: 12305 - DNA, 2300 bp, Homo sapien
tatttatttttattttttattttgtagagaagggatcttatattttgcccaggctggtctcaaacttctgggctcaagtgatcctcctgcctcagcctcccaaagcactgggattacaggcctgagtcaccacgcttggcctgtactatttttgcaatttccaatggatctataattacttcaaaataaaagtataggccaggcacggtggctcacacctgtaatctcagcactttgggtggctgaagagggaggttcacttgaggccaggggttcgagaccaccctgggcaacgtctctacaaaaaaataggaaaataattagctgcctgtggtcccagctcctggaggacaggaagcattggggaggggggctgaggagggaggatcgcttgagcccaggagggtggaggctgcagtgagctatgattgtgccactgcactccagccttggcaacacagtgagaccctgactccaaaaattttttaaaaaaacattttaagtataaacaaaactttcactagccctacttttctttccttaagaaaagcttcccaaaagaactgtccacatgccccataacaaatcacaatcgctattactggtatcccactctactccccctatccaccaacacgcagcagccagagtcaacttttagaacatcaacatttaattattagcctcttctttttttcttttcttttctttttttttttttttttttttttgcgagacagagtcttgctctgtcgcccaggctggagtgcaatggtgcgatctcagcttactgcaatctccgcctcccaggttcaagcgattctcctaaggctccggagtagttgggattacaggcgcccaccaccacgccaggctaatttttttgtatttttagtagagacggggtttcaccatgttggttaggctggtctccaacttctgacctcaggcgatccgcccgcctcggcctcctaaagcgtagcctcttcttaaaacccttttaaatagcttcccgtggctcttagaataaaagtcaacgtgtggttaaaataaactaaaaaccttgctgtgatgtagtccttctgggtcattccacaccatatgtcttccactaaacttcagtcacactcatatggcccaccttctagtcgtcaaaatagccaaaacctctccaagccttacagccttcacacaaactgtttcttctacagaggacagagaaagacaatggtttcgaatgtgacgtccaaactataaatcacaggacactgaattctgcgggctttcattagcataagagctgcctccgacgggggcaacactatgcggggtgtgccaggaactgatttaagactgtattcagatcttccaagcaacgccaaagactccagcttataaagagcatatttgattgcttatactgtgtgctaggtccttttatccttcaaatgaccacctacaggagagactaaggtccaattcacaactgagcctttaaggaggttaagtaactagcccagagttcaacagaaagtggacgggttgttcaaagccagagctactcccgacctctactctatacactgcctttcctccggcccgtaaatacaacgaatgaacctgcaggttggtagctcctgggatccgaggttggagtgccacaggaccccaacctgctctcaccccgggacagggaaatacgaacaggggcacaggtccaccaccaggtgcctccgcgaggggcagcagcgcaggcggcggggaggaccagcggccactcacctggtgctggcgctgcggctacctccacacagcggtcttggcctcccagacgcgaacccgcacgccccaggggagccaccggcgaaaagcccgcgggcccgtccgcaggcaccaaccaaataacgcagcgctggcaccatcccctacgcacgctcccctccctcagcgctcagaagaagccacttgaccctccacggccgaggacccgcgctctttagccccgcccctcacgcgggggccaatgaagtggcgcgccttcgccccatgtgggagaggctgcggtggccaataggcgcgcgcgtcggagggcgaagggccggccagggtgccgcagacgcggggacgctggctcgctccctccctccctccctccgacgctgtgagtagagaagctaggccccgagccgggcgggactagggtggtggttgtgttctgccctcgcccgtcgccaacgctgggctgactgaaaacctggccctttgggtcgcgcgtcttcgaccttcaccgccatgcggac

SEQ ID NO: 12306 - DNA, 2300 bp, Homo sapien
tcttacatggatggcagcatgcaaagaaagaacttgtgcagggaaacctcccgtttttaaaaccatcacatcttgtgaggctcattcactatctggagaacagcacaggaaggacctgcctccataattcaatcacctcccacctggttcctcccacaacacatgggaatggtgagttacaattcaagatgagatttgggtggggacacagccaaaccatatcaatactgtagtacatctacattatggaataccactcagtaataaaaaggaaggaactactgatacatgtaacagtttggatatatctcaagggattatgctgaatgaaaaagagtcaataaaagttacatactgtataattacaataattacatttatgtaacattcttgatataacaaaattttagaaacagagaatagattgggtggggctgcaaaggtaagttgtggttataaaagggcaactggagggacccttgtggtgatggacctgggctgtaccttgactgtggtggtggatacaagaatctacacacctgataaccatatagaactaaatatacacagagaacactaatacaaaatgaggaatctgaatgagatcaatggattgtgtgaatgtcaattacctggttgtgatatggtactagttttgcaagatgctaccactgggaagactgggtaaagggtacacagaatctctattcttacaattgcatggaaatccacaattacctcacaaagttgaataaccatctctttttttcatctgtgatggaacaagcaggcaatattctacattgttttaacaaataaagcaaactatgtaccactgttctggtggtaaaaccctttaaccataataaatgtcatcacgtagcaaatgcttcactgtgctaaacacctgctgaccttatctcgtgtaatccgctcaacggccctaagactagggagacactgctatcattcctagttcactgaggagggtctgaggcaaagaggtgaagtgatttcctggagctacctgaccaaagactggaaccaagattcttagaggcacacgaagtccttctggtaataaatctgtataattctatttgttatgttcagctgtcctaaccctaaaaattaaaaactgccatcaagcatacagaatgagtgttagcaacaccggcacagtgacaattttaaagagttagaaggtcctttagagattacacagcccatcgccctcatttttacataaagggaatcaggtgaagtgacctgcacaggtgagtcgctgctcagagaccgcacagcacatttaaaactgtatctcggttcagtactcaagaaaaggacacagacttataaatggtggcaaaaaccgagctgtctggttcttccggtacccagtgccgggtcgagtacagagcaggcgctccatatttacaagacgaatcaatgactgaatgaatagcaccgccaggagccccataaaagaagtccagaagactgcgggctgtcagtcttcgctgtgacaaagagcctccgtgaggagcgaggattagggccggacagggagcgcccttctagtggacgctcgactgggctggggccgggatggagacggtgggtgcccaggccctccgtctaccgcgggccgcgtgcggggccgagcgaggacccggctggagctggagcgggggcggggcgggggcggggccgagggcgagccggaagaaagaagccgcagggcccgcccaaacaagaattttcaccgtaatcccgcccagagtttctcccacggccccatgtccgcatggcggtgaaggtcgaagacgcgcgacccaaagggccaggttttcagtcagcccagcgttggcgacgggcgagggcagaacacaaccaccaccctagtcccgcccggctcggggcctagcttctctactcacagcgtcggagggagggagggagggagcgagccagcgtccccgcgtctgcggcaccctggccggcccttcgccctccgacgcgcgcgcctattggccaccgcagcctctcccacatggggcgaaggcgcgccacttcattggcccccgcgtgaggggcggggctaaagagcgcgggtcctcggccgtggagggtcaagtggcttcttctgagcgctgagggaggggagcgtgcgtaggggatggtgccagcgctgcgttatttggttggtgcctgcggacgggcccgcgggcttttcgccggtggctcccctggggcgtgcgggttcgcgtctgggaggccaagaccgctgtgtggaggta

SEQ ID NO: 12307 - DNA, 2300 bp, Homo sapien
agaggtcattcacctccttggttaggcatattcctaagttttttttgtgtgtgtggctattataaaaggggttgagttcttggtttgattctcagcttggtcactgttggtgtatactaaaggtactaattatgtcattaattttgtattctgaaactttgctgaattcatttattggttctaggagctttttggaggagtctttagggttttctaggcatacaatcatatcattagcaaatagcaagtttgacttcctctttaccgatttggatgccttttatttctttctcttgtctgattgctctagctagaacttccagtactatgttgaatagaagtgatgagagtggggctgggtgccgtggcttatgcctgtaatcccagcactttgggaggccaaggcgggtggatcacctgaggtcaggagttcaagaccagcctggccaacatggtgaaaccccatctctactaaaaatacaaaaaattagccggacgtggtggtgggcgcctgtaatcccagctacttggaaggctgaggcaggacaatcgcttgaacccaggaggcagaggttgcagtgagctgaggtcatgccattgcactccagtctgggcaacaagagtgaaacactatctccaaaaaaaaaaaaggggggtggtggtggtgagagtcggcatccttatcttgttccaattcttggagggaatgctttaaactttccccgttcatattatgttggctgtgggtttgtcatagatggcatttattactttgaggtatgtcccttgtatgccaattttgcggaggattttaatcacaaagggatgctggattttgtcaaatgctttttctgcatctattgagatgatcatgtgatttttgtttttaattgtgtttatgtggcatataacatttattgacttgtgtatgttaagccatttgtgcatccctgtatgaaactcaatcatggtggattatctatggcagcagtaatttagtagtggttattttctaatttgcgtttaactgggttcttttaatttattagagctagattcactaacttcccactagaggtctcctctttccctatagaaagcgttcccaaaggcaactgtttggactcaagtaggaataatttgcaaaatcattagcaaagttgcagttgaaatgtaaaaacctaccaatttttgttacctctattgccaaatataaatttaatttttatgtttaaaacattttaaatctaatatcttgtgtttttagagattacagcctaagtaaatttggcctttcgtttaagctaaattataagatgggccaaaatgaatcaagcaaaaatattcagttttcaaagaccactctaattcacctgcttaataacagtttaactggttttacctttctccatggaaacatgtcaaccgttgaagactattaataaacaaatatttattaaacttttgcattatgctgagaaaaatggaaatgaataagatgccatccttgttcttttactttgcatactcttttttcgttctaactggaattttttttttcatattctgcttctgcttctagactaactgaaaactcttaatcattaagacccatttcaaaagacacctctagtgtgaaggccttcttctcactcccttctctagattctcatggtatttgttcacacctctattatccaaccacgttgggtgttatttatctctttatatgttatctctctttattaaattatatgttctatgaggtcaggaaccttgtctttctgtgtgtctctttctcctttgttcttgtttttgtttgttttgtcttaccattgttgcctttgcactaagtatagcagacattcaataaacattttttgagcgaatgaatgaatggacatggcatttgagtaaggtcttgaggttgggtgggatttccacagattgatggtgatgggggagggaggctaagagaaaacagcctgagtagaagctgggaaagcccatatttgtaaataagattgacaactaatagagttattcaaggtgggcacaggcagagagcgctttaacaaaaagttggaaagggttgagaacatgataagaggtagtggagcagaggcttgcagtaatgaagacggctgtagtgaaaaagggatgaaagggtagttggttctgtcttcagttcacatctctcactgttccacggcctcagcatcctcaatcacttcctcagctttaaggtgtttccctctcaggcatctttctagtcctcttctttctcttgaattccagaa

SEQ ID NO: 12308 - DNA, 2300 bp, Homo sapien
ctgtctcttaaaaaaaagggctggcctgtaatcccagcacttttgaaggccaaggcaggcagatcatttgagcccaggagttcaggacgagcctgggcaacatggcaaaaccctgtctctaccaaaaaattaaaaaataaaaaatagctgggtgtagtggcacatgcctgtagtcccaactactcaggagtctgaggtaggaggatcagttgagcccgggaagtcgaggctgcagtgagccatgttggcaccactgcactccagcctgggcaacagattaagaccctgtctcaaaaaaaaaaaaaaaagtgaaaaatagataaaacaggtcttcattgttacctgtgagaaatggccctgattctattactcttatatgccagtttgtttatagatttctgtgtgtttgatttgaacttttttttttttttttttttttttgagacagactctcactctgttgcccaggttggagtgcagtggtgtgatctcagttcactgcaacctctgcctcccgggttcaagcagttctctgtcgcagcgtcccaggtagctgggattacaggcgcccaccaccacgcccagctaatttttgtacttttagtagagacagggtttcaccatcttggccagactggtcttgaactcctaacctcaggatccacccgcctcggcctcccaaagtgctgggagccaccgcgcccagcctggtttgaacattattaagctgttgaatataaacttgaaaataattttctatgatacagctttcaggtagaaaaatgaattttcgttgtgtttaacaatgttgtgtttaacagcttatacaaataacacagtataaatggtaattgccactgtcattttaaaaatcagaaaatagtaaataaaaggatgtggaagagtctcatgtgatacagtggagatttcataccgaataaaagcattataaatatggttaaattgaacataagcataaatttaacggaactcattagaaaaaaataagccttttttctcaggtttgtttcattactgtatggtgagacaactgattcaccacgatttagtctagagctacttttctattctgaatagtttttggtaaaactattggctgaattattaggctgttatagtaatctgcctccgtcaagtgtattttcttgggttaaggaaaaaaaaatttttttttaactattcacggaagctggatgttcttccttgtcatttgaatcaaggccgtctaacaggaattgaataattcagggactagcatttaacccatatcaggtctaggcaagaaaagacatacattaggaagccttaggatatcattaaactgcctagggtagtcaaaattattgagtagacaccagacctcagtggattacttaagtaaatggggtcagatgtcatcatgaagaaaattaacaggaagaaaatgagagtacagaagaaatgttttgaaaatagagtgaaatacaactttgaagaccatggctgagaagtgctaggaatagtggcagcacatcaaccagaaatggtgttgagctgtaagaaacagacgtcaggcttcatattgcccttgtgtccaggggacaaggatgaaaaagctttttgattaagagcagtagaccaaatcaaagctaattatgtcattttggccaggcgcagtggctcatgcctgtaatgccagcactttggaaggccaaggcgctcagatcacgtgagcccaggagttcaagaccagcctggggaacatggcaaaaccctgcctctaccaaaaaatacaaaaaaattagccagtatagtggcacatgcctgcagtcccagctacttgggaggctgaggtggcaggttttatatatatatataaaaaacacatatatatatatgtgtgtgtgtgtcatcattttaagtctcactgtgcaaagctatgagtcctcaatactttggactacttagtgtaatatattagttgttagaatagcatatatatatatatatatatatatatacatacacatacatacacatacaaacatagtgcaaaaagatgtttcagggaaaacatcagtttacaacataatgtctttcatgactcaagtaaaagctcacaagtaatttcttctgaaacccagatcactgaattacaggtttgcctatagatgtaccaggtcaaaggctgtgccagagagaatgaaatactaattattttcaggctgataggttcagttcctgcaaagcctgtaggtcttgctctaccctttgactgccttaatcagctgccgagcttc

SEQ ID NO: 12309 - DNA, 2300 bp, Homo sapien
tgtcatctggggctacaatctcatctgaaagctcactggagttggggtggtgggggagatcctctatcctcaaaaggctacatacggtctgattccattttcatgacattctggaaaaggcaaaactatagagacagaaaacagatcaatggttgccatttgcaaacaatttctgttcacagaccacctctaggccatccttgtactgggtttccagggcagccaccagccctctctcctcagctccaggctcctttctgaacccttcctgggtttacatttagtagcatgctgcttgacacgggattggcccctgtttcatagacactgtgttaattttctctcctcgggtactgcttccaggacaagtacccgcattgatgctggcactgggaacgggacggatgataaagtgtgaggcactctgcccagtggcaactgacatgatttcataatttccccaggtccatccgcttcccgccagtgtgctcagatttgagcagtaggagtccgttgggagaaagatgggggaaaggaaccaaaaacaattaaggcagactctgtaagcttccacctcccacaccagaaaagtcccacagcagaagactgccgtggaaccttccctactgtagaggaaagtgctgactttaagcaatttctgcagtcacgccttcctcttctttcctttctccctctcattcattcactgacgccgcagcactgatcagcacagacacagaagatgcctccaagggaccaaagggaataaccgcggttctgaggtgtggggactgctgttgcagggaaatgtggaccgctcaggaggggctcctagcgcaggcgtcttgctccgcagacgcggttacagctgcgctttgcacggcctgcggaagtttgcaaatctagcaggtctgctctcccggcagcaggactcggcccgcggtcaggacagctcccatggacggagggcggccctccgaggcctttccctgcagccgggagggcggccgggctgggccgggccgggggtgggaagctggggcgcggcggccccgcccaggcagacccggggcgggagccggttcccatagggatcgcgggccgagccacgccgagccgagctgggcggaagaaggcgaggcgggagccaggcccgtccctgaccgccgcggcgccgtgagtcccgggcgggcaaggaggcgcgggccgtccctggccaacacgtggcaccgctccatgctgcgcggcgcggctgaggtgcacgtccgggcgcgggagggttttcccagtcccgggggcgtggggcgcggggcgcgggttggtctcctgcggccaagcctcgccgccgcctccgcggggagccgggaggtgtcttcttgccgcagggaaatgagacccgaaattagaaccggggaagcccttagccctccccgtactccagccagctcaggtgtcttagatcggatgaacgataacgttaaaaagatagcttatcttacagctcggctcgttttaggatggcaagttacattttaacttacagggtatttaacgggcgattaaaatcgggttactggaggcagctaactctaggctgttactcctgatcgcgttgccattgccgacacgggtacactcttcattccttaacatgtgctgttctgttctaggaccgtgacaaacactcatcgttgggtggggctctagtgcagtccgttggtgccaatattttataagcgacgttttcaaactatgtgaagatcctttcttttcttttctttctttcttttttttttttttttttttttttttttgagacggaatctcgctctgtcgcccgggctggagtgcagtggcgcgatctcggctcactgcaacctgcgcctcccaggttcacgcgattctcctgcctcagtctcctgagttgctgggactacgggcgcccatcaccacacccggctaattttttgtatctttagtagagacggagtttcagtatgttggccagactggtctcgaactcctgacctcaggtgatctgcccgcctcagcctcccaaagtgctgggattacaggcgtgagccaccattctcggctgaagatccattttaagaagatttattcctctatgatggagaagtatgaaaaaattgggaaaattggagaaggatcctatggagttgttttcaaatgtagaaacagggacacgggtcagattgtggccatcaagaagtttctggaatcagaagatgaccctgtcataaagaaaattgcccttcgggaaatccgaatgctcaagg

SEQ ID NO: 12310 - DNA, 2300 bp, Homo sapien
actatgcaatacgcaaacaataaaatgttatacaaatggaatataaagttatttattctttaaaaatgcacatatgatatgatttcagtaagtgtgtggctgtttattttggctatgttaagaatacgggatacagtagatgacaggggaaccatcctcaaaacaggggacatttacatgatggataagaaagccagaatcctccttttcttactgaatcctggcagccagatctttaccatcccatggtggaataccgaagagtcttctctgtgaaatctgaccaatgcaagtgaaaaggcctcattaagatcttgatgtcagacatgtcccggctaaactgcccagctagatgacactacagtgaaaatcatagttggcaatcccaccatcccacgcattatgtctagaccttgcagttagtcttttagtcctgtgctcttaaaaatgagcaaacaaccaaggattacaaataaatgaaagagaaaaaacagtctggggaaaacagaggaaacaggctatgaagggtaaggagaacatcaaaagaaaaagtattttcagaaggatgttgcaaccatgagtgagtcaagggcagggtacttttaaaaagttgggtttcaaaaaaacaaaaagagctcttagaaaataatatgacagcatagctgaataattcaactagatggcttagaatataaagttgaaatttctcaaaaaaaatttttaaatggaaaatgttgaaaaaagttaagaaaattgacagcccaggaggtctaatatgtaatctcccagagttccaaaaagaaaacagaagaaaccattagagtgtttcaataatttttccagtattaaagaatatcagagtctagattgaaagaacacagtggatgaaaaagacctttaccaaagcacatcattacgaaatttcaaggacaccggagtcaaaaagaagatctacatttccagagaaaaaggtcaggtcagataccaaggaataagactcaggatacctttatttttattttttgagacagggtcttgctctgtcacccaagctggagtgcagtggcacagtctcgactcactgcaacctccgcctcccaggctcaagccatcctcctgcctcaacctcctgataagctgggactacaggcgcccaccaccatgcccagctaaatttttttgtattttttatagggtttcaccatgttgcctaggctggtctcaaactcctgtctgcccacctcagtctcccaaagtgctgggagtgcaggcgtaagccactgcatccagacccgaatagctttaaatttcaacagaagcaatgccttcaaacttgtgaaagaaatttccaacctaaaattctgtatctgactaaatgtaacataaaagtcaaatgaagagtataaaaaaatttgcctcctatatatcctttctcaagaagctactaaaggatgtgcttcataaaaagggcataaaccaaacaaaatgacataggatgcaggaaatgggatttagcacaggagagaaatgaaagaaatccccagatgatgaggatggaatatccaaggatgaccactacaccaggcatagagagtatattgaagcatatcagaagatcctggccacatgtttttagaaagattaataaaatatccaatgtatctcagtatcttaagagtgaggcaaccagcaaactacgaggttcttcctgaaacaaagcctgagtcaagaacgtgggttagtttattttagagatcccagaaactaggagtgagggacttgtgatattgcgaaggagaaaggggaaagtcagtataaaacatggtgtattattgaggtcatttctgtgtagacagtgggagcttgattccaccaggtcctcaaagaagctatgtgatagctccctgaattgcctcctgaaagacaagtggctggagcatttaaccgtacgctgtcatttttcactcatcaagttgctgccaagggcatcatctccttgcacatggggcagtttgcacatgggcacagtaggctccttaagtgtcaaagaagaccctgagacagaaagctgaaagagtaggaaatgggtcttcagttcccatggagctgtccactgatactggctggaatcagaaggtgggtggaggagatgcttttcaaggctccagggttcaatcagaggtgacagtgattctggagaaaaaccaaccaagccaaacaaaaaactggcagttaactccaggaaagcaaaatgggcaaaaaaaaatgaccactggatgaatggcataacaatgtttgtt

SEQ ID NO: 12311 - DNA, 2300 bp, Homo sapien
aacaccctattttactgttgcattagttattaacagcacctggcaaaattctatttattgagtttagagggcagttttccagaagacagtctctgaattttaatataaaggttgtttcagaggaaatgcttcctggacctgtttgaatggaaaactgtgtgtactctgagttacagttaataactggaaatgtaataaacatagtaacttgagatgatggcagtattcccagatgtataggatgcccagattttggttcatagagttaatgagctccaggggaactgccgtcacttgtcattcaggcaaaagagaaaaacaacaacaaaaaaccctttaggctaaggaagtctcaggatttctgaaagtttaaccaacttcagtttgagatttctatttgtcctttttatcttacctgaaggctaagagtgataaaggcaatagagattttgagtgagaggtacagatgctccccgatttatgatggggttacatcctaataaacccatttaagttgaaaatatcataagtcaaaaaaacatttaatatacctaacctaccaaacatcataacttagcccagccagcttaaacacgctcagaatacttaatgttagggtagctgactgggagctgcggcttgctgtcgctgtccagcatctcaagagagtatcataccgtatatccctagactgggaaaagatcaaaattcaaagtacagtttctactgaatgcatatcacttttgtaccacgagaaagtcagaaaacttgtaagtcaagcctttgtcagttaggaagcatctatattgtcttacaaatctctttagtaacagttctagggaggtaagtgtttctgtctccagagaagtaatcacagatttcccaagtaggaagcgcaaactcaagacacgttttgtttttttttaaccattggtatagttgaggcttttcgacaagctatattcatcctaaaaatagactataattaccaaataaaagcctatattgacagaataactatttttgaaaaaaaaaacctgtaacatatctgtaagttcttctacatgagtattttttaaagctgccaattataacccaattcatgacatcaactcagtttttaaaaaaagatatgaggtactgcagtatgaaacttttgtgggttttgttttgtttttaagcaatttgtgatgtgtctgcattttttctttgtattctatcttgggctgattgagcctcttagatctgtaggttaatatttttcatcaaatttggaaaatgcttggccactatttattcaaaatttctgccccagtctctctcctctgcttctgggactccagttatatacgtaagaacactgaatgttgtctacaggtcgtggaggctttgtactcccactacactcttcttcatgtatccacacgtaagtttttttttttcttcactgtacttcagttttgtttctgttgccgtgacttgaagcttattgatcttttttacagtattgagtctactgttcagtgaatttcatttcaggcaagcattttttggatctagactttcagtcatatatgtactatacctgtatatacacacacatccatatatataatttctgtttttctactgagctattccatctgctcacttactgtgtctatcttttctcttaaatccttgaacatatttatagctgttttgaaattcttgtctgctgattttaacatctgtgtcacctctgggtctggttttactaatttgttttcaactggttatggttcctattttctagcttctttggttgtcttttttattgtatcttggacaatgtaatacaatgttgagcatctggattttatcctctttctttaaagagttaattacctggtatgtctacttaatcctttcaaggcttgtgtcaggttttagtagagtattcagcaaggtctttcctcaggtagaaagccaaatttttcctggtactgtgggatttccagaagctcacagcgctctgttagctgttttctgagataacttgcatactcttgctttgcccttagtattcagccaaagacttaagaaaacttctttgcatatttttggagttcatccttcatacagcttatttttgggactgtgccctctacctaagcagcgctaaattcaaatccttgttccgttcacctgttgagactgttactttctctgtgggctccattttcttgtgtcctagtttggaaagtgcccccaggcagaaagtcagggtaaatatggctcttaccaccatgtattttcct

SEQ ID NO: 12312 - DNA, 2300 bp, Homo sapien
gggaggatgtgaaaaaaaggaggaagggagcaagccatatagtggggggcggtggtgaaggggagacattacgaagagaggaaatagcaagaacaaggacccaaagatggggagatgcttatcatgtttaaggagcagcaagcaggccagtgtgactagagcagaatgactaaggagagtggtagatgaggctgagaaataagagggaagggctgtcttgcccaggagcatttgggtaaggctttcatggacaggtattacagcaacaggtggaaatggaggggtggaaggtgattccaagtaattagaacaaaggaaaacaaaagacaaggagctaagaacgccttaaggatgtttagaatcagaggctggcctagtgtgcaatgaatatacatgtaagtgtgaggaagcaacattgtgagggtagaggaagcaacattgtgagggtaggggaccatgtgttaaggggtgaaggtagagtatgatgaatattcggtttttgattctgtttgggaactgcagaagagagactagggcaggaaggcaccagggtaaaaggcaggcattagctgccccttaaatataatctttgctttttctcaggcatgaataaaatcctgctccagagttgctttagttactacatctatgaagaaaaagggtggaggtcttaagatctttatgggaaaaacactcctaaaactttattgtagtagggagaagagaatatatacaagtagaatttatactattgtaaattaacatgaactaaattgaactcgtctaacacacagtgaatcataagacaaagatgactaaaaaatgagactgagaaaggaaataggaatttcaattttctgaagagcattccacaaaatggctaatccctggataaacaactaagttaactacctctaattttacataaagaagaagaggattgttacaaacatacactttgagttcaaaggtattcacaaggtaagagccagaaccttgctcacaattcatcacctcagtacctctaccagtgcctggtacagaagactcaaatgcttgtttaagcaataaaaagcctatccattacagtttatctcagtagaatcaaacagtgctagggctgtttgataataccactaccttgaaatgctaatattaattaggaggaaattaaaagtaagtagaaagaggggaaccacctgtgcaaaacaacaacctaaccccagaggaatctactggttaattacccaaatgacacaaaaccacttcagcgatatgcagaagtgttgtttggcacaatgcgatatatatcatgatcaaatccaataaacaacgccgttgcaaaaagcaaaggaatttgcccttaatattcataggctgcactaatgctccctttttggaacacacaacaaaaagcataaggcaatctcaatctctttcctctgaaccattcaagaactcagcggatttggggaattgggtttgcttctctacaatgttttttaaaatcctaaattaggtgtaacttactctcatcgtttgtcttaagtaatacaaaacagcacaatacaaagacagcggctcatatccactcttggttataggatgttataaatccctgaaaggaaccgctaaagtaaaacaaaacccagcaagttaatatcacatttttatcgccaaccaaaaacaaacgatcaaacttccaccaggaaaagcatctttttatatgggataatgcttgcataaatgtcaccaatattagtttgcttacagttaaagctcagagacagggtttcatatggcttttttagtcaaactcatccattgaaacaaatttttttaaaaaaatgcaaatgtctgaatgtcaatattctttcctgtctatcttccatgaagcatttttccatgctaacactagagcatccttcggtgtaattccacaagcagattcaaattcccttcaataccataaataagccctattaaaaagcctttaaaccacaaaaaaagtgcaacagcggtttgcaactgtgtggttagttctgcctgttggtagcgattagaacaagccatgagtcgagggtgctcagaaccgagtaaaagggaccccggccgctttctccccaagaggcaacaataaaagcatcctcctctcgccccaatacttcgcaggaaagtggccccattcccgggacccagtcgaccgcaggaaaaaagcacggccagcctcacttaccttatagacgtccccgtaggtgccgctgccgaccctctggacgagttcgtagtcctgctgcggg

SEQ ID NO: 12313 - DNA, 2300 bp, Homo sapien
gtgttttctgtgtgctgcctgaaattccctggagtaacgcaagtgtaaacatgtaagaataaatatatttcagactagataaaggatcagtgcttatatggccagaggaaaaaaatctcaaatgaatctatgacagtaaacaagtgctaagataccaatagaacatttgaagagattttgagtcatcgaagccaaaagtatgtgcccaccaaaacaagtgccaagaatctttgaaagaaggaactgttcttcaacaattttttcaatgcagcaaacacataggctttgtccatggagcatgtaagtctgggcttacttatgttccccaaataagtgccctttgtgtgtggagcacaagaaaatacatatatgccctgtcctgttaaggtgcgaatttaatttctacattatacaattatcaacaataaggagtattgtcaattactccttattatacattatacaattatcaacaataaggagtattttaattctcaagagcagaattaaaaattggatgttcaaagccacaagccaacatctccaacttgctcttttatgatgtttcagtcactaaatgcagtggctgagtgttatctggcttttctgttcaaattctctatgaggctctagaaataacttagccagtataatgtaacactggcaacttaatttctaccttcagagcaagactggaactgaaactgcaaaacagcttgtgaaatatcagccaaattacttccccgaactcctgttccatatatgctgtgcattgttaagtattttaagacctcttatattcgataaccccccttactatcctgtaaaacgctttataaacactttcctgggtgtcagatgcaaaatcttaccctcttcaagctgcagataaggacaccgagatgttgccaaatatgctgttttgtcccagagcacatactgaggaagtggtagaaccagaaccagtctgtgacccctttgttttacttttgcggaactcctggtctcattaaaggtgcaataccagcgatgagacactgcgtgtgcccaacagggacaaaggtcattgagcagtcctaggaattcagactttcagaaatgtctcagaagaactaagtagaaggcaggttgtgcaggtgtgcagtgcagcctcaaactggtaccaccgggatcggtttgcaaaacaggaaggtgcagtagggtgtgccgggacttagttaacctggcactcccccacctccttccccggcgccccgctgccaggttacttctggcccggtgcccttaacgtaccttttccgtgtttaacttggagggctacgttcccatcgcccttcttcctctacccgtcaccctacaggcctacctgacaaatgtggggacggtttagccaaggcccgttggcccacgaatgcccaggcgtgtgccttatttctgagagtgggagggagacagcccaggccctgcaaggacgcgcccggctaggggggcgcggtggcgcggtcgggagggtgttgtgttctcagcaggcctcagggcggcactctggttctgcggccggagtgctcgggcgggccgctgggcgccgacccatgctggctgggaacgtgtctcccggtgacgcagccccgggtggggaacgtggtgcggcggcggcggcggcggcgactgtacgcgcctccgccgcccccgagaggacgcgccgtgcagcggctgagtggcggcggcggcgacggcaaacccggagctgccggccggcgcgcgggaggaggacgcgggtgcggtctaggaagtaggtcccgggctccgcgctcaacaaagacggggccgcccccattaggtacggagccggccctgggccccggctggcggggaggcctcgtcgggcagttcgcgggcggccggggagggggaagggccgcagaccgaacggggatacggggcgccgggggcccttccaggcccctttctcttccacggcccctggcgggacggaagggaaggggccgggccgcgagggcgcgggccgctgggggtcgtagcctgcgacgccaaccagcctttgctcgtccctcgtgcagacggagctgcgggcggaggctccatgttgggaagcggcgccgttcgtgcttgttagcgggaatccgggagccgcggggtgagctggcgggggccgggccctaagtgaagatggaggccccgctgcggcctgccgcggacatcctgaggcggaacccgcagcaggactacgaactcgtccagagggtcggcagcggcacctacggggacgtctataaggt

SEQ ID NO: 12314 - DNA, 2300 bp, Homo sapien
tttcctctttgcatgaattgcagtacaagtaaaataatgattatagcagacacatagagtctcgactttttaaccaccacatagagtcttgactttttccatgctatctgcctctaggttgatggtcaaagcatatggatctgccattactggcaacataaaatatccgcactccagggtcttgttgaagcctatgacctcaaacatttcactgcctaattcattttaaatgctgtatttcaagaataacatgcttaaaggattgtcaggatatttgtcctcgtctcaaactgggcattcagtttctactttatgaagaaggctcattaaataaaatttttggaagtctttgcattaggaaaatatatgcctcttcttgatcaattggttactcttgatctcaaaaacactataaaatcctctggttggccgatttgtcacactgttctggtttcgtattttccttctctttaacgtcatactagtttgcccacttatttttatcttgttttatagtaagtgttttctgtgtgctgcctgaaattccctggagtaacgcaagtgtaaacatgtaagaataaatatatttcagactagataaaggatcagtgcttatatggccagaggaaaaaaatctcaaatgaatctatgacagtaaacaagtgctaagataccaatagaacatttgaagagattttgagtcatcgaagccaaaagtatgtgcccaccaaaacaagtgccaagaatctttgaaagaaggaactgttcttcaacaattttttcaatgcagcaaacacataggctttgtccatggagcatgtaagtctgggcttacttatgttccccaaataagtgccctttgtgtgtggagcacaagaaaatacatatatgccctgtcctgttaaggtgcgaatttaatttctacattatacaattatcaacaataaggagtattgtcaattactccttattatacattatacaattatcaacaataaggagtattttaattctcaagagcagaattaaaaattggatgttcaaagccacaagccaacatctccaacttgctcttttatgatgtttcagtcactaaatgcagtggctgagtgttatctggcttttctgttcaaattctctatgaggctctagaaataacttagccagtataatgtaacactggcaacttaatttctaccttcagagcaagactggaactgaaactgcaaaacagcttgtgaaatatcagccaaattacttccccgaactcctgttccatatatgctgtgcattgttaagtattttaagacctcttatattcgataaccccccttactatcctgtaaaacgctttataaacactttcctgggtgtcagatgcaaaatcttaccctcttcaagctgcagataaggacaccgagatgttgccaaatatgctgttttgtcccagagcacatactgaggaagtggtagaaccagaaccagtctgtgacccctttgttttacttttgcggaactcctggtctcattaaaggtgcaataccagcgatgagacactgcgtgtgcccaacagggacaaaggtcattgagcagtcctaggaattcagactttcagaaatgtctcagaagaactaagtagaaggcaggttgtgcaggtgtgcagtgcagcctcaaactggtaccaccgggatcggtttgcaaaacaggaaggtgcagtagggtgtgccgggacttagttaacctggcactcccccacctccttccccggcgccccgctgccaggttacttctggcccggtgcccttaacgtaccttttccgtgtttaacttggagggctacgttcccatcgcccttcttcctctacccgtcaccctacaggcctacctgacaaatgtggggacggtttagccaaggcccgttggcccacgaatgcccaggcgtgtgccttatttctgagagtgggagggagacagcccaggccctgcaaggacgcgcccggctaggggggcgcggtggcgcggtcgggagggtgttgtgttctcagcaggcctcagggcggcactctggttctgcggccggagtgctcgggcgggccgctgggcgccgacccatgctggctgggaacgtgtctcccggtgacgcagccccgggtggggaacgtggtgcggcggcggcggcggcggcgactgtacgcgcctccgccgcccccgagaggacgcgccgtgcagcggctgagtggcggcggcggcgacggcaaacccggagctgccggccggcgcgcgggaggaggacgcgggtg

SEQ ID NO: 12315 - DNA, 2300 bp, Homo sapien
acaatgttaaaaggacacacgagctgaccctcagccaaattaggggaatttaggcattaaaaagaatggtgatgcatagcacaatttttttaaaagcttccattaatttatagagggactcaacatagaaaagtgggagagggaatgccagctacttaatttaaaagacatgacatcaagaggctgaggtgggcagatcgcttgagctcatgagtttgagaccagcctgggcaacatggagaaaccccgtctctacatacaaaaacagccaggcgtgctggcgaccgccagtaatcccagctacttgagaggctgaggcatgagaatcgcttgaacctgggaggtggaggttgtagtgagctgagatcacgccactgcactccggcctgggcaacagagggagactgtgtctggaaaacaaacaaacaacagataatgattttaaagcctccatttaaaaaatcactaatatgaaattgattcaggcaaggatcaatggatgctaaaatcagtggatgaaaagttattggccaatagtacaaaaagtcacatacagagagctatttatttaagcatttttttgtgattcacacagtctcaaagtattcacctgcagattacttactaattataaacacaacaggtttttaaaaaattaatttctttttcaattgggcataggtgttgaattatataaattttttcttttttgtgtgtaatctattgtactcttaaaaatgggattcatatgaaagggattttcaggctggaatgtaagctgagaatgatagtaaaggaatataagaagaaaagcagaccacacttctcttttgttctatgaacttggtttataggtataaggatgagataatgtctgtcttcctatgttgtttcattaatgtcatttcaactctgttgagcacagacttctttaaaaccatgttgtaaacttggttacagtgttcacgactctgcagtcactagaaccagtaactgaaatataatgcataagatttggcagtggtgggggagtttgttttcagatatgttgatgttcaaatgtcagtaggaaaacaacgtgaggataaccttaggcagttataaacacacctctggtataatgtcctctcttctagagggcagaagactacaagtatagatttgggaatcatcagcatggaggtcctgtctgaagccatcatagtaaattacattgagagagtgtagcgtgaggagttgcttaccatgaggaattagcagagatcatggatctggtaattaagaggctggcagtgatctcctaagaaccgatcagtacagagtgtgagtaacaaccaaatggcagaaggaaactgtaagggacggcatgatggtatcttgaggttgaggtagtataaagggacagtgtttccaggttactgaaaacaactaagtttgtagcagagagaaagcagtgaaaagggaaagattgaaagtatttttattttttttcttttcctttcaaaattgtctgcaacctttatggctgccagggcccacccatacccagactatgtagtatgatttcagctcaaataattgctattggactataggtctggaccttatctttgcaaatctagtgggaaattttacccagtggatattgagttacagatcgtaatgaatctacagctttcatttatcttgatcttcttgatataaattttgctattctaattttaagacaaactactcagtatacatatacaaaaatgcatgataccctctttactaacatgaccttgcttttaaaatggaaaaaaaaatgggtgcctcgtagataaatgcacattattttagctactttggctatataaatgttgccagcttgtttgtactaatgtataaccgtgcttgaaacaggtatttgaacatccagaatcatgcagtatatcggtttgtgtatttctgataacgctgttaaattctttgagagtgtgttcgaggggggtgctgtttatttgtttgtgttttccgttgaaaatgttgcggtacgtggtctatcactgtcttcacggtctgggggtggactgaggtagggagggtgtgacgctggtatctgtgtgaactcgggcttgtgatgctgagcttggttcatctgctttctcctcccttttcctccccactccttcccaccagcgccacagcaacatcctcagagtctgagcgaactgcgcccagcgcgggcacggagcctcccaccgccagcaacctgcggccccggagaaggcagcgagcgcagtgacagcgcctcaccg

SEQ ID NO: 12316 - DNA, 2300 bp, Homo sapien
tctgggaaaactccaggtgtgaagagttgcctttattaacaagatgctaatatccttttgtccttctctgaggtaagccttaggcagaaacctggcacttctttggctcccccttcctccttcagctcccgccttcataccctgatgtgtaacaaaaccccattgtgctctcacttaagtttcatcactctttcttctccctgcacactatcaacgctttaggactcgtccttatttctgaaccacaggaacaagtaactgtttttctaatgtttctctcagagtacactctgcttctagtgagttccaattctgtttattaagattttcatacccatggcagtgattgatactcccacactccatattcaatgtcagcaaatttggttggctttctttaaaatatgtctaaaatatgtccacttacctctccacctattattgcctgggtccaagccagcaataacttctgactgatctcccttttgcccttagctccattgtctactctccacacagcatccaaagcagtcctatgaaaacattaactcagatcatgtcactcctctgctcaaagtaacattccttacaatggcctacaaagccctaggtgccgtggctattgttactctctaactgcattccccattcgtctccccgtcttttccagtacataaaccctcttactgttcctccaatctgccaggaacatggccacttgcagcgactttgcacttgctgttctttctgcctggaatattgttcctccagttagctgcatggccaatttcctcactctgtcacttaactccaatgtcacctcctcatgagccttctctggtccctctattaccctctcaaaaattgtgagtcctctcttattttcacttcatcacttatcactatctaacatagtatgttttgcttattttttgtcatttttttctctttcccatgacagtagggatttttgtctgttttgcttattgctctatcacaaacgactagcgcagtgggtaatgagtatttcctggttaatgaatgaattgtgggagatctgcaccaagggaacatatggagacagacactagatcaaatgtctcctttgtttgctcatggtaaaacatttgaccatcttcttaatcttacgtggtaaaaaattccatgtcttttgttaattgtgatatatgtcttagatctcttgtgagatgttttagatctcagggaaagcattcctcattattaaagcattaatttggtcactaggggatgaatccaatcttattttccaaatgttatcctgtacatttggcagtcttgctaagttatatagaaggaagtagagtctattattttagatagaaaattcccggtcccgactcgcagtggtcaaagtcttcaaaattctaagatcataacacataacgtcaggaggaaatatgtggctattaatcatactaatgatagtgatgatgcaataaaataattgtaatatgctaacaccaattgtatcttaaaaagaggtactggaaattccatcttgcattcttccgttttttcctgttatagaaaaacgcactccctgatactcagtagaggatcaacttatttctagttaatcagcatgaacgtttccagcagaatagatgctttggtgtagcacttgcctgggagtcatggttagcattccgcattttttagagagctgaattcagcagcctaggaaacattaggaagaacaccttcaaacagggaacaacgtcttggggggaaagagagtcactgcctccgctagggatcccgagggggtacaaaagcaacaacaataaaaactcgtggagagtaggttccacgacatgcgcatgcgacgaactcccgcactcagcggggcaggtttcgtccttcatcttctcagtcggcaggacctgcttctcgctgaggatgagtgaggacagccgcagctcggcggggacggcccggtagcctagagcgccggcacccgagtcccgccgccggagccgcgcctggagccgcggtgggggaggggcagcggcggcccgcgctgcgtcgagcttcccagaattcccagcggccgcggggaaagtttacgggatgtaggcggcggcggcggtagtggtagcggttattcggcggcccgcggcggaccatggccctggccctggcccggcgtcgctgggctttcctcacggcgtccccgagcagcgtcgcagagcgggccgacttccgggaaggaactgaccagcgactgagcggcggccggcgcgcttagcgccctgaac

SEQ ID NO: 12317 - DNA, 2300 bp, Homo sapien
aagatcacacagtgtactccagcctgggtaacagagtgagactctgtttaaaaaaaaaaaaaaaaaacaacaacaaaaaaccacaatttaagcttcttaaagaaggcaattaatcatctttattagtattagaagcccttataagttggcaaaatatttatcactcgaatattagaaacatcttaatatgggctttttttttttttttttttttttttgctatgtaacaaattaaaacaacatttcttgtcttatctgcaagtcaggatttcagaagcagcttagctgggtggtccaactcagggctctcatgaggatgcagtctacatgttggccaggcctgcagttacccgaacgcttcactggggctagaggatctactttacaagctcatttgtacaactgttagcaagaggctgctgttccttgctggctgcttgcctgagacctcagctcttcactacctgggccttttctcagggtgtagcatctggcttcccccagaaggagtgatgaaacagacactgagaccgaaagaccaagacagaagctgtggtccctttatgatctaatcctgcgagtgacataccaacatttctgctgcactgtatttgtcacgcagactaaccctagtatagtgtgggagaggactgtataagggtgtgaatacccggaggtggggctctttgaggcctcttggaggctggctaccccctggtcacacctctgcagtgccaatcagtttgctttctgtaatttgtcccatgaagttagagttctagaccagacttctcagagttgttacttttctttttctaaactgaaactcagttttcactattacctctttataaaaaatatggtctgtttagaaatctgagaaaaatatttcattataaaatattcataaaatttttgttttttgtgaaagttatcatgaccatttgcagtaagaagacctggttgtgctctaaagctgaaatgtcatttaatttcaggtacattcaagtaaactttgcagaaagaaaatgggtttcatttagctgctcattagggggagaaaagtctgtgataggcttttaataatactgaagtttaaaatggacctggaagactacacttctgtttcacaattcttgctgttctcctcagctctttttgatagaagcaaaatcagctttctaagatagtgttgtatgttttttactgagcaatattctgactcggtgtcctctagctcactaggttcttcctgtagtaaagagttataaaagtgaggctggacgcggtggctcatgcctgtaatcccagcactttgggaggccgaggtgggcagatcacgaggtcaggagttcgagaccagtctcatcaacatggtgaaatcccatctctaaaaaaaaaaaatatacaaaaactagctgggtgcagtggtgcacacctgtagtcccagctatttgggaagctgaggcaggtgaatcgcttgaacctgggaagcgcaggttgcagtgagctgagactgtgccactgcactccagcctgggtgacagagtgagactctgtctcaaaaaaaaaaggtactcacgaaatctttaaaattaaaaagttatataaatcaggttttatgtactctcaattttaagcctttaagtttgcattaagacagtatttttcctgctgcagatccatagtagaggataatgaaatcaatttaatggaaaccagcattttttattaatatactacaaaatatcagagtacatggtccatggtaaggatatttcagtgatatgtactgtacatatgtgtgggtgtgtgtactgcgttgtaagataaaacgtatttcttacagtgggtggcatccaagtttaaaagccagctgccttaaggaatctattctgtgtgaggacaggtgattaaaactagattacttaaatgtaagcaatacactgaattgtattatttgtttgtcactgaattaacttggctttcttccaagagttgagatttctgacaagcacagatttgtcaaaataaagtagaacaactcaagtgtttttgtttctgtttcaagggaatattttgttttttttaaacaggtcagtcagatgaattcccttgaacaagaattagaaacaattcatttggaaaatgaaggcctgaaaaagaaacaagtaaaactggatgagcagctcatggaggtaagtttctcagcagatggccttagctatgaagaatatgttaatccatgaatgaggtatttgttgggagagactagacatggcattgaattcccgttgtga

SEQ ID NO: 12318 - DNA, 2300 bp, Homo sapien
gacagagctagactttgtctcaaaaaaaaaaaaaagccagctgtggtagtacatgcgcccataatcccagctacttggaaggctgaggcataagaattgcttgagcccgggaggtggaggttgcagtgagctgagatcgtgccactgcacttcagcctgggtgacagagtgagagtctgtctcaaaaaaaaaaaagtttccatttttaaaattacttctgggttgactttttctgaaaatgagattgtacctttttttttttcatgtttggtttaaaaggtaagaggcttatctatttgtgttatctttttaattttttaaatcattttcaagatccaaaaaatcactttggtagctgaaagcacatttctgaattcagacgttaattacatggacaatatgtgctttggattctaaaaaaaggatatgattgcatatgtgaaaatgaaagtagagtttagcctatgaaagcttttgagttggcagtgcatttcagccttctctttatgtcctctgtgaatcaaatgaatatcttctgggcttaaagataacttcgtaagaatgaagcaacttttaagccaccagtctcaatgcatttgggtcctttatggaactgggccttgccctacagtcatattcattattggacatggcatggctgttttgtcaaagaccattttaaacagagactctccaaatctttttgtttaaatcaaacttcaagaatattgttttattcatatttatatgtacatacacatactttcattagaagactgaggggacaattgaaaggtacttattaggagtcgttgtcattgggtaaacatgacacctgtctcaaaacagcaattacccaatagcttgtttttaaggcttacactctgcaattctcttaagagctgggccccagagatagctactcatccatcagggctccataaccagcagaaaaggctgtcctgggacaagttggatcatctgatgaatgaggaacagcagctgctttggcaagagaatgagaggctccagaccatggtacagaacaccaaagccgaactcacgcactcccgggagaaggtaattggagaagctgcacatcatggcatatgtttgaaaatgactagtttgataggaaaatgaatgttggatatgattggaatggttctaaggtatggatttgagtatcctgctatagcagacttattttaagaatgtatcatttatcatttactcacatataattttatcctgatgtttataaaatatttttataagcagttttatattaaaatatatttgtgactttaatcttcatatccaaaatatagactcatggaaattatgtgaaccatatagtcttcaaattggctggccaccaagactagtagtacaaaaatggtaaaactagactcagatcttgcaggtctaaataactcctcacgagagaaaaaggtgcctcctttaaaagacagcatttcaaggtttaaggtcttttccaaccaccaacttggtgcttgaattccttacctctgctgcatagtctcccaatgatatttaacctatgcttaacaccccttttgaggaggaactctgaagagtcgcagatatttagttagaacacctactccatgccagaaactgctatcacggatgctgcagtggtgagcaagacagacatggttcatgtcttcgtagaactgttttagatgtgaatagtccaataagagcagatgggaactgtcagcccattctctcctaaaagtagtgttcatgtcagaaaaaaagggcctgggaccactgtgcctgttttcctggcagccacatcacatacactgttgactcctggagagttagtagacccagaagtcccctcttcccagtcttgttcctacagtcctgggtttgcagacccaaccagactcacctagaaagggtcttttgaaatccagaaaagctagcttcaagtatttacaggcttgattgaaaaaggatgttaaacaggacccaagtactgaattaaaactttccctatgtttgttgtttttgctggctgggtgattgtattagcattttttcctcttacatttgttcctgttaggtccgtcagttggaatccaatcttcttcccaagcaccaaaaacatctaaacccatcaggtaccatgaatcccacagagcaagaaaaattgagcttaaagagagagtgtgatcagtttcagaaagaacaatctcctgctaacaggaaggtgagtttttgagaatatatggcgtacatctgtgttctcactataatgcgtt

SEQ ID NO: 12319 - DNA, 2300 bp, Homo sapien
agacaaacattttcagcatcaggccaccatagcagagttagaactggagaaaacaaagttacaggagctgactaggaagttgaaggagagagtcactattttagttaagcaaaaagatgtactttctcacggagaaaaggaggaagagctgaaggcaatgatgcatgacttgcagatcacgtgcagtgagatgcagcaaaaagttgaacttctgaggtaatgtatgtaccttctagacgtcacgaatcccacagagcacctcaccagatctaacttccactgcttgccgtgcctagagaaactaacctagtagtcttcacgaagagagcagtactctctagacttccttctgcttctgtgccgtattaacaaataaaataaccttgtttaggaggcattcccttccgctgtagcaaacaagtgttcatatggggtgtgaaagttcacaatggcgagtgtttgctgtttaaccatgtgcatcctcaatgtacctctttaacttttttctagcacttatttcatttagatggataggggattttttttttttattttgctaagtgttactttcctcattttgaggaaacatgttatatacaaatgaatgattttttgtgtattattaacttagtagataagaactcacttcttatgctaatatagaaaaaatgttctgtctttatagttttgtactcatatcacttgaagcacatgctgataacccataaacagtgcaaatggtcaggcaccatggcttaaatgcctgcaatctcaactgtttgggaggccaaggcaagaggatttcttgaggccaggagtttccaggcaagcctagggaacatagcaagactgcctctacagaaaaataaaaaaatgtttgctgggcgtggtggtgcacacctgtggtcccagctacttgggaggccgaggtgggagggttgcttgagcttgagaggtcaaagctgcagtgagccatgatcatgccattgtactccagactgggtgacagagtgagaccctgtctcttttaaaaaaaaaaaaaaaaaaaaaaaaaaaaaagagacaaaacaaacagtggaaatttatcttagaacatataatttgaggagcctccagattctaataaatatgcttgaaaagcagagatacaagtagaattaatttgaaccactgcccacttgacattgtaaaatataattgcatagtcttctagcaaatttggtttttcaaaaaaaaaaaaaacttgtaaactattacaggacgtctgaaatgtctctgaaataatttaattctgaatgtagtttttcctcttcttcagaccatttttagtcctaaaaatcagaatataatgagatgaataaaatcacaaagtaaacagtgtacatatttcattgtggccctttgatttcaatagagaattttctttccctaggtacccaggggcctaaaactaagctaatatagctttgtaacatggcttatgtgtattcagaacaggtaggacttgagactgagataaatgaagacatttgctcaaagcagtatgcttgccattgagaaaaatcaacaaccagaatgagcattgagtcttgattcatttctccaggcttaagggttttttagctacacttctctaacatcttttagtgaaattcttacttcccaaaagaaatgtgtcaatatgtcataactcgatttccaaatactaagagactactaatttagacttttctttttaactggcattgaatactcatccttttggaagttactagaaaatattttccaaagatgccagatgactgccttgtaacaatttttttcaatctctgtgcttcagatatgaatctgaaaagcttcaacaggaaaattctattttgagaaatgaaattactactttaaatgaagaagatagcatttctaacctgaaattagggacattaaatggatctcaggaagaaatgtggtaagacgtatacttacattttcctaagacatttttgcaaagactaaaattcttttacttcagcttttaaagcctaaccattaaattttattttcatcattccttttaggcaaaaaacggaaactgtaaaacaagaaaatgctgcagttcagaagatggttgaaaatttaaagaaacaggtaaggaaatacttaatatttctcaatgttttttgattccaaaattttcccattttttgaaatttataaatttacagcacacggtaatgaatagcatatagctaatgatggtaaggttgtaaattctgaatttgaaaatggaaacttacctcata

SEQ ID NO: 12320 - DNA, 2300 bp, Homo sapien
gtttctaagatttccccctaactccagagagaggtaagtcttttaaatgaattatggctgccagtcttagctttcagaaatgagatccctttccagtataaatgaatcacataggagtaagttaagagcatttttagggagtatttcagttgtttgctcagcagctttctcagtgcatgggaaaatggtttttgtttgcttctggagttggcggcagtttcaataatgctgtatgttgactatatttagggaaaaaatggaaacagagtgtaatagaagaacctctcaaatagaagcccagtttcagtctgattgtcagaaagtcactgagaggtgtgaaagcgctctgcaaagcctggaggggcgctaccgccaagagctgaaggacctccaggaacagcagcgtgaggagaaatcccagtgggaatttgagaaggacgagctcacccaggagtgtgcggaagcccaggagctgctgaaagagactcttaagagagagaaaacaacttctctggtcctgacccaggagagagagatgctggagaaaacatacaaagaacatttgaacagcatggtcgtcgagagacagcagctactccaagacctggaagacctaagaaatgtatctgaaacccagcaaagcctgctgtctgaccagatacttgagctgaagagcagtcacaaaagggaactgagggagcgtgaggaggtcctgtgccaggcaggggcttcggagcagctggccagccagcggctggaaagactagaaatggaacatgaccaggaaaggcaggaaatgatgtccaagcttctagccatggagaacattcacaaagcgacctgtgagacagcagatcgagaaagagccgagatgagcacagaaatctccagacttcagagtaaaataaaggaaatgcagcaggcaacatctcctctctcaatgcttcagagtggttgccaggtgataggagaggaggaggtggaaggagatggagccctgtccctgcttcagcaaggggagcagctgttggaagaaaatggggacgtcctcttaagcctgcagagagctcatgaacaggcagtgaaggaaaatgtgaaaatggctactgaaatttctagattgcaacagaggctacaaaagttagagccagggttagtaatgtcttcttgtttggatgagccagctactgagttttttggaaatactgcggaacaaacagagcagtttttacagcaaaaccgaacgaagcaagtagaaggtgtgaccaggcggcatgtcctaagtgacctggaagatgatgaggtccgggacctgggaagtacagggacgagctctgttcagagacaggaagtcaaaatagaggagtctgaagcttcagtagagggtttttctgagcttgaaaacagtgaagagaccaggactgaatcctgggagctgaagaatcagattagtcagcttcaggaacagctaatgatgttatgtgcggactgtgatcgagcttctgaaaagaaacaggacctactttttgatgtttctgtgctaaaaaagaaactgaagatgcttgagagaatccctgaggcttctcccaaatataagctgttgtatgaagatgtgagccgagaaaatgactgccttcaggaagagctgagaatgatggagacacgctacgatgaggcactagaaaataacaaagaactcactgcagaggttttcaggttgcaggatgagctgaagaaaatggaggaagtcactgaaacattcctcagcctggaaaagagttacgatgaggtcaaaatagaaaatgaggggctgaatgttctggttttgagacttcaaggcaagattgagaagcttcaggaaagcgtggtccagcggtgtgactgctgcttatgggaagccagtttagagaacctggaaatcgaacctgatggaaatatactccagctcaatcagacactggaagagtgtgtgcccagggttaggagtgtacatcatgtcatagaggaatgtaagcaagaaaaccagtaccttgaggggaacacacagctcttggaaaaagtaaaagcacatgaaattgcctggttacatggaacaattcagacacatcaagaaaggccaagagtacagaatcaagttatactggaggaaaacactactctcctaggctttcaagacaaacattttcagcatcaggccaccatagcagagttagaactggagaaaacaaagttacaggagctgactaggaagttgaaggagagagtcactattttagttaagcaaaaagatgtactttctc

SEQ ID NO: 12321 - DNA, 2300 bp, Homo sapien
aaaaagggaagtgttagaattctttcgcttttgagtttttaaacatatatgcaaaatcaagcaaaagaagagtcttgcttttatgaggtcggtcagataacagcccaggggactgtaaaactcagagtgagactaagagctaccgcaacactgaaaatcctggagcaccttggggattctcagcagatcttagttgacaattaactggtggactctaagtgaatcttgttagcgaagtgttggccttgtctaaattcttaactcctgtggctttgcataacaacttggtgtttcttttctgaggctttgatgtttatataacactctcaacttattttgaaaacatttacatagtgattagttaacccaacagaccaatcctgggaagacagccagagcctgcagcaccttagtaacagaaaaactgataattaggagaagagacctgtccaagaccaggaacctggaccaaaattgtgccatgttgctttactttaatgagtggccccagtaaaaactgagctgtatggcagagctgttcacatttatcttctgtgtccacccagttctgctgaaacccctggcaagatcgtggccctgttgtagcttgtcatgttttgaacagctgtctatggaaagaaagcaaacacaacctagagcaacattgatttgttttagaaagctcttttattttcagttctggctgtgttcaacatcttagcttacgtttttcatgttgtaatgatctgccgtatggacgatcacctctaagttagagagttctgtaatttggcttggattaaagatgcttggttagtgaaagctgctgctttttttatagtcaaaggactggttctgagagccttgttgcagatggctgaggtcaccgtcccaagggtgtatgtcgtgtttggcatccattgcatcatggcgaaggcatcttcagatgtgcaggtttcaggctttcatcggaaaatccagcacgttaaaaatgaactgtcatgcaaggaaaaaaaaaaaaccacagatttcattagtaaaatacgagctacctggaattttatgatgtatatttttaacaaaaatgactcagttattgacgtctccaagtttttactgatcctaaggacagtggcaaaatggaaagcctggagtatgggtaggtgagagagacggaacacaggttaaccaggcataaagagatgagatgctttagtgagtggaggttccctgagatgctgtatgattcatataaaccagtcagtggctcctttaaacctcactgtctgaaaggttgaaatagtgtcttcccctttctctaggcaactaagcattacctaaaactcgctgggactaaagcaagcttctgggaatattcttcccgtcacacctcatgtaattgcaccagtgaagttaattgagttgctttttgaggaactcgtgtaaaaggcatttagtttcatgtaaaacagggaggtggttttgtagcagacgtcgtgttcatttagtgcctcttgctgcagccctccagtctagctatgatgggggccatctaagctgaatgaagtagaacgaatcagcttggccacgctgaccgattgcaccatcggggcaggttgtctaaagcttgccagctagcatggaagctctgaccatgcagtctgctggcgctaacaattagttcacttgaatagtcttgctgtcaaagtggcttttcaccttcttaaaatcctgggctagaagagctgggagagaaccaccttcagccttgagtttggcagtctggctgtccgcctgagaaccaggcaagagaggagggtgtcttctactgtacgtgaccctctcattctggtaattttgctcccagtgtgatctgagcttatgtatatgcccctgatgtgagtgcatgcaggagtgtcactggccagggctggtcctacagagactgggggtcttgctgtggggtgcatcagaaactgggtgttcccgagcattccctagagactggtggggtacagagaacgggaatgtgccaggtggtgaccacggtaggactggagaggctgccacaacctgtccttgtctctgtcttacacacaggtgagcactgtgggctatgggatggatgaggtggagcaggaccagcatgaggcccgactcaaggagctgtttgacagttttgacacgacgggcacagggtccctggggcaggaggaactcaccgacctttgccacatgttgagcttggaggaggtggccccagtgctgcagcagacattacttcaggacaacctcttggg

SEQ ID NO: 12322 - DNA, 2300 bp, Homo sapien
gtttgccaatggcatcatttcagaggtctcattcatgtgttctgtgtgcatgtgtaggattgagggataatataattcagtgtcacactagagtgcaaatcttggctccacccccattttgttcaaggagattaatgctgtctccttggacagtggcttaattttgccaagccccaatttctacatcttgcgtgggaaaatgagaagatccacttctaagatttgggaggattaaatgagatgatatacataaagtacttagtttaggccagactcatagtaaatgttcagaagtaattcccagttacagtgcagctttctgcttttatttgacattaaatttatcaataacctgcttttaaagatagaggaagctctgaacattacctgctgccattatcatttagttatataatgatgtttatatacatagtacactccctgcccattctcagtctgttctatagcatttcacatctcctgctttgcttctttggaggtagatctgtagataattcacttgttacctcctcttcagtttaccactcctttgtagctgcaggtattcttttggttatcttaaattccctcttgtatcagctttctctggaattagccactctcgcttgcttgccacatttaactctcagaacaaaccttccagatggatattgttattctcatgctgtaatcgaggggacttgagaaaggttttagtatagattctcctccaaagtttcatcccatagcaagacaatgcagtcgaagtttgtgaatccatttacttaattactagcctattgaattaaacttcagacagcgctgcatgttacagattggcagttggtgttggctttctacttcttgcttaggaggctgaaaatgcctttgagaaagggtgggatgggggaagtggaggtgtgtaggtggatgagatgggcattccaaaattttcatatgcccatttctgtagacctcatttagggtacgtttcctctcaaggagtgatccatacaggaagtcaatccatgatatttaccaaatccctggcttgaagaacagactgactgtagtatgcatttgggggaagatataaaagaaataggagcgtggatcttaccattaaagaactttctgccaagtggggagaaaaaaattcttgcacatgaaattactgatgaacatttgggaaataatatcaaccagtaaaaatgccttctgtgccagatgagcactgacaacttgtcaccatgcgtaacatctcctggatgtttcagcgtgagcatttgttccacaggggtggtgcttgtctccccttcagtcaagcacagtgttttgagaaggaaggagatgaaataaagagataaagaaaagaaagctgccataaaatgaaagaggtttgatttagtgaaaatccaatgacctcccaaagagtggggcatgatagtatatcaaattcgacaccgtggataagatcagggcttctcagtacatcagtgttttattcctctctttcattggtttaagatggacaaatccccgccccttaaaaataatttttaaaaagggaagtgttagaattctttcgcttttgagtttttaaacatatatgcaaaatcaagcaaaagaagagtcttgcttttatgaggtcggtcagataacagcccaggggactgtaaaactcagagtgagactaagagctaccgcaacactgaaaatcctggagcaccttggggattctcagcagatcttagttgacaattaactggtggactctaagtgaatcttgttagcgaagtgttggccttgtctaaattcttaactcctgtggctttgcataacaacttggtgtttcttttctgaggctttgatgtttatataacactctcaacttattttgaaaacatttacatagtgattagttaacccaacagaccaatcctgggaagacagccagagcctgcagcaccttagtaacagaaaaactgataattaggagaagagacctgtccaagaccaggaacctggaccaaaattgtgccatgttgctttactttaatgagtggccccagtaaaaactgagctgtatggcagagctgttcacatttatcttctgtgtccacccagttctgctgaaacccctggcaagatcgtggccctgttgtagcttgtcatgttttgaacagctgtctatggaaagaaagcaaacacaacctagagcaacattgatttgttttagaaagctcttttattttcagttctggctgtgttcaacatcttagcttacgtttttcatgttg

SEQ ID NO: 12323 - DNA, 2300 bp, Homo sapien
cagtgcaaaccaaactgcaggcccattgtgttaaataaatcatctttcttggtagagttgctcttgccaacccacaccacgcggtaaccatgctccatgctttccctcctttgtagcaaggctggaggtgatcccagttcccagtcccagggctaactccaccccacttactcctctcaagaaagcgcatcttgtgtttttcaaattacacaacccccagcaattctgatcttcctgcacagggagtgaatgccacttccaatatcccctgacccccaggaatcactgttttaaactaatgatcaatatcatccttaaggattcttgcaggttaaaaagcgatgcttggagaggtaaccagtaggatgaggcttccatggcagagattaggtgaaacaagaaagacacctcttcattcttaccttccaagactgttggctgttttagtgcccagtgagcattattgtctgtcttacaagatgacctctatgtaagtattctggtaacaggttagctatcctcttaatgaactgcgtgtgtgtgtgtgtgtgttgtatcatattactggatgactgaacaaccatgcatacagtgtatgagtgtgtgtttgtgtgtgtatgtgtacttattcaagactgtttaaaaaggagagaggagcataaatctctcttattctgcaggcacgcttatataccgtgttgaaagaagagagcctgggcttttgaataagactgagatgtttaaaatttttaaaaaaattttttgaggtaactgtaaattcgcttgaagttgtaaggaataatagagagattccctatagacgcttcacttaatttttctcaatggtaacattttgcataactgtagaacaatattacaatcagtaaatggacattagtgtagtccaaatgtcttattcaaatttcatgagtttcacgtgctctcatttgtgagtgtatattcagttctatgcaattttgccacatatgtgatctgcttttgaatctcagttctgtggagttcctgctgtgtgatcctgaggaagctctttgacttctgggagatccattttcctcatctgcaaaataatgtctgcctcctaagagtgatgtgagaattagataagataatttctgtcgagtttctagcgcactggattctcaaggaatgctggtttcctcttgtctgttgcttgctttctcggtagaaaaggaatcaccagtttcctgctaaaataaccagacttgtgggttgtaatccatcaggcggatccttcaagggcaacacatttaaccctgcagctcaaaaagaaccatggcctggacttgggatcctatttgactgcaatgagatcagaagtgtagggatgggggagtgagaacgcagactctggggtagtaggtaggaggcgattaatatcgagcaactgttgggctgggaaccaccaactccaaggagttttcgtcctgtgtggcttgcgaccgagggttagcttcacccggagaaggctgcacaggggcgggagcctgtgaggacgtggtgggcaggtgcggaagccagtgtagacccggcaggagggtcgcgctcgctctacagggttccgagtcacttctacagcccttctgcctcctgaacaccctttccaatgttgatggccaatcgacacccgagggctgggaaatcacccccttaaagtcccgcttgctgaaggcgggggcccttcctctgcgcgaagacgctgcggcccgagtgtccgcggtgcgggtgagtgtaggcgtgttgggaaagaaagggaggcggacaggcaaggggcgagggtggcagcgccagccccagctcggtggcgacctcggggcgccagcctcctacacccgcacccggagccccggcgtttctaacttcagatctcggaggcgggcgctcggagcgggagggcgcgtctgcgagggctcaggcggcgccgcccgctcctccctccgctgcctgagccgcgcgggccgcagaggaggagccgcgccggggccggcgtcgccctgactcctcctccccgcgcgggcccggcccttcctccccggcgtccagagctccgggtggccgcggccgagccgggagccgagcgcgctgggcgcggccgtcccgctgccgccgccaagcccggagtgcgccagcggccatggttcccgcggcggcgccgggcgcctgagccccgggacgcagtaagtggcgcaaccccggggacccggacccacggcctgggggtgcacggaggcctcgcgctgcccccgcgccgtcggcgaggc

SEQ ID NO: 12324 - DNA, 2300 bp, Homo sapien
gactttgttccctgatttccaggatgtgccatttgaaaggggctatttatactgggaaagaccttcttgcagagtcttatgcaacctttcaaaaaatgggccatagtgatttccaatttcagagatttttgctgagcatttcaaacatatccctagacttggggcttacaactttgttcatccagcaagtagatggaaatatcctctctcaacctgagcaagtagatggaaatagactctgggaccatatgcagctgttcttctctcctccaagctctcctccccatctttgatccctccatctccacttggcatggccccagagtcccatccagagcttccctgaacaagttctgggagattccagaccacgtttatgaagaactccaagggtagagccgacatctgcttgaagctttctcatcatgcaggttgtggctctgtgaaaacccacctgctgctggctcatcagtcaggcttggatcccattggtcctttctgagctaattcctcttctatcttgatgtgtgtgaatcagaaactgaacattccagccaggtgtggtgacagagacctgtaatcccagcactttgggaggccgaagtgggagaattgcttgaggccaggagtttgatagcagcctgggcaacatagtgagatctcatctctatacacacaagcgtgcgtgcgcgcgcgcaccaggcatagtggtgcatgcttgtagtcccagctacttgggaggctggagtggaaggattgcttgagtccaggagttcaagtgagttcaagtacagtgagctatgattgcaccactgcactccagcctcagtgacagggtaagaccatgacaagaaagaaagaaagaaagaaagaaagaaagaaagaaagaaagaaagaaagaaagaaagaaagaaagaaagaaagagaaagaaagaaagaaagaaagaaagaaagaaagaaagaaagaaaggaaggaaggaaagagaaagaaacaaagaaaacaaacattcccagagcaagtataagagtattaacaggcagtgaacaaaatccccctttgccctgacagttccatgaaatgagctagtactcaaagaaaacttccctttcttgaaaagtgtgggtattttcccccagaccatcttactatcctcaagcagatgggtttccacgcactttctggtgctgacagccccctgctgtgccctctgaacacagacactacaaaaaacccatttcacctcttaagatttgcaccttgcctccaagatgaagccttgatgctggcatccgaatgtatccaaataaaacctaattccctttcttcctcctttgtccccacacatgcaggccgtggcttccctagagtagctctggtagacagttcctgctcctaggagacagttgcacaatgtaaacctgcaccaagatgtaaacctgtaccaaggtcaaagtttcaaggtgtgaactccttggtacaatgatgaggttctgctacatgctgctacgtaaacaaaataccgaaaaggtcttaattttttgctacatggagtaattgtgttcataaccccacgtggacagacaaatcattagtaaatcaaagggagccaaagaaattctttctatagtaagggtgacagggtggggggctgtgaggattttgggggtggatggggaattggagacaaggaggcttcagaaaaagagaaaaagaaaaaagtgaggtttaagtagaggaaagcttatattcttcatgaaaatcaaaagctgtggcggtcaaacttttgtgttagtagtaccatggtgaaaacatattttactgcgttgcgcgcgcctcacacccacacacacacagaagtataatggaaatcaatttaaaataaaatgtagcatagctagctataagcttaggacatctgtgtgtgtgtgtgtggccgcgaacagcctgacccgggcggagcgcaccctcgggccgcgtctcccccgccgtaccagcctgcctgaccgcgcggaggaggagggcgggcgcggtgccgccggggcgggaaggtcgcgggcggctgctccggactgcagctcccgcggcggtggcggcgtatcgggacacggcgcgggatggacgcgcaggactgccaggcggccgcatcgcccgagccgcccgggcccccagcccgtagctgcgtggccgcctggtgggacatggtcgaccgcaacctgcggtgagtaccgcccggtccacccctggccgggccccgacggctcaggctgcgcggggatggggcagggggccagggcgcggc

SEQ ID NO: 12325 - DNA, 2300 bp, Homo sapien
acctgggtatgtgtggctctgccattcattgacttgtgaccttggaaagattacttaactttccagtctcatttgcaaagcaaaggtaataattatcttccaaaaatgcctctggtctagcatagaaatcagggcaggggagacaatttatcaaaaatgctttccagcccctcaaccttaccatttgattatattaaacagttttaacaatgatctcttacaacatggaaagggacttacttaatggataatgtgggcaaaaactggaagcaggaggtgatgacattgacctcctgtatccctcacctctctaagaccctcacaagagaggtggcttgagacagaggtgtccttagtgacccctcatggacaaatcgtcacttgtgtgctgacagctcctgattgggtggtttgtgtcacagggaacaatagcgtaggcaagatgtgcatgcgcccatcccactccctgaccaggctccagccctgtgcctcatgggtccatctcttccagggatctcatctcagaagtggggtctcctaacactggctcatttcttcctaagataagtccagaatatagaggatctagggattattccctcactgcctgagactaatgataagaatagctaacacatatagtgcagaattgtgatataattaaaaactgcagcaactgttaaactgtctgaatcctgtttactggtgactttggggtccagcctcagccttctatggggctacagtaagggaccaaacctggctgtggtgcgaacatatcccttcccttcctgtccctgccatgtcctggctttttcagctactggttggggccctgccctattactttccttacctggtttccccttagtcccagtcttggcctgccgtgtagataattccttgtcattgtgtaaaagattttgcttaaatgccatctgacccagaattcccagtgttagtctctgaaatttgggggcggatcacctgaggtcaggagttcgagaccagcctggccaacatggtgaaaccctgtctctactaaaaatacaaaaattagccaggcatggtggtgggtgcctgtaatgccagctacttgggaggctcaggcaggagaattgcttgatcccgggaggcagaggttgcagtgagctgagaacatgccattgcactccagcctgggcaacaagagcagaactctgtccaaaaaaaaacaaagaaaaagaaaaaaacaaaccaagacaaatggattaatttcgaaaaccttgtgtgtttcccaataccttgcagatattttccacactcctgttcaatgctcggaagaaaaattgctgctctgtatgacagctttactagtaaatccttaaaagaacacgttttccttcctctgatagacatgctaatttattttaatttttgtaagtatggaccttccataaattttcctatataatttttcccaaataaagacctcagtacccttaaagttgtgacgtagtgaaaagacatgtcagctgtaaaattgtggttagactgaaatggtctgaaacttatttaatattgactttgaagtctagcaggaatccttgcaaactgttgggagtaaagagagatgcatggccttgtgggtgggggttccattcacagtccttctagttcttacctgcttgcctcctggtaagcaggtagttctggacatttcttgccttttggctgatgattaggtttcaccgaagtagcagaatacttattattttcttctaggcctttttaccttcttaggggaatggtctccactgcttttaaaaagctggagacaaggataaggattgaataactctgtttctctattatgagccatgacactgatgctattttaaaatctagcttttaggtttttgttttttgcccctcctctgcaggctagtcctagctgataaaataaaatactctgctaggagtttagtgtagtagcttgcaacttagaagcctgttaacctgtgtaggctaattcctttctttgattgtgattaaaaggcatggaatttgattcttgaagttgataatgatttttactttccagtcaaagccccatttcttgtggatttaaagaaaccagagttaaagattcctcacacagtgaacttctacctgagagttgaacctggggtgatgctagggatctggtgagtgcacggatgggacaccgggttgcttgatggggcaggtgttcctgttaggactcagaggagcagtgctgtgttacctgcccacggagaggtcggtgctcctggaggtac

SEQ ID NO: 12326 - DNA, 2300 bp, Homo sapien
caacctgaaagagaaaggcgtgagatcagataccagcagcacgagagtgatttttattgaatttgttatcatcgttcctaattcttgctttttttttttttttttaaacttccttcacagggcagcttcgcacagactgaagctggtaaaggtatgtctgaagaggcctcaaagcacccatttcataagtctgtttgatatgtcataagattttcctcaggccctccgcgtggttgttttttgagaggtctccagggtactggtcagggtgggttgtggtgtctggggctcaaagtcccaccggtggacttctgctcctacactgatcaaaacagaaccgagcttctctaggtcccaaagtaccttcgtgaacttaataacctcattgccaaatggaggtgaagacatttttatttgctttctctgagggctgggggatgggttgagagaggttttttttgttgtcgttgttgtggttgttgttttttgagattctgttgcccaggctggagtgcagtggcatgatctccacttactgcaaccttcacctcccaggctcaagcgattctcctgcctcagcctcccgagtagctgggattacaggcaccaaccaccacgcccggctaattttgtattttttagtagagacagggtttcaccatgttggccaggctggtcttgaactcgtgatctcaggtgatccacccacctccgcctcccaaagtgctgggattacaggcgcgaaccacctcacccggctgacgtttttatttgctttctctgagggctgggggatgggttgagagagtattattaaggtgcaaaatggtcactccttttaaaagaatcaacctttttaatttctagtggttataggctaaagacacagaatgtctgctttttttttttttttttttttgagacggagtctcgctctgttgcccaggctggagtgcagtggtgctatctcggctcactgcaaactccgcctcctgggttcatgccattcttctgcctcagcctcccaagtagctgggattacaggcacctgccaccacgcccggctaattttgtttttgtatttttagtagagacagggtttcaccgtgttagccaggatggtctcgatctcctgacctcgtgatccgcctaccttggcctcccagagtgctgggattacaggcatgagccaccgcgcccacccagaatgtctgcttttaaaaggcattcaaggctgggtgcagtggttcacgcttgcagtaccaacactttggaaggctgagacctggagttcaagaccagggtctcaacttaatgagaccctgtctctacaaataattttaaaattagctggatgtggtggtacttgcctgcaattccagctactcaggaggctgaggtgagaggattgcttgagcctgggagtttgaggctgcaataagctaggattgtgccaccacactgcagcctgaatgacagagtgaggagaccctgactcaaaaaaaaaaaaaaaagtcattgaaaccctggcttcagcccatgtaaggctttgtagagtagcatggtggccacacttgctctcctcactccctgctgcatgactctggtttgttgggacagcccctgtgtttccaggtatgcagaagatggcaggctttccacttagccatatctgcctcagaactggttgaacaagctgcctgtttatcctcttccaccctctggttaggtaatctccgctgctggtgaccggctggtgaccacagggacttggtctctcctcccacatgctggctcccaccttggagttctttcctgatcaaacaatattagtggggcccagaatcctggcagtaccagtatctccagtgctttcttcatcctctcttccctgtgcagacaggaagctcctctcctgtcccctcccctcatcccctcatcactgccttctcagagccaatgcttgtagagtggcagggggctgggtgcagtgttgcccaggagtaccatgtttattcatttttaggtttgctttcccctctgcaccctgccctttgcattccccacgtggaacgtggtaaagctaatgtccgtgagaatgtgcgtgcttttcccctcccactcagagctgtctcaatgttcccagaaaggagaagagctgtaggtgtgaaatgctgccaggtgatccttgtggtagttaggacgggtggggaaggagagtggctggtatggcaggactttgcccccaggcagatcgtgggcatcaagtgccagtgccatcattgcccaacaggaccaaa

SEQ ID NO: 12327 - DNA, 2300 bp, Homo sapien
tgctttatttcaaatttcaccccacaggccttacttatttttaagatcaatgattttgatgggcccccccttcccactcttaattcagggtatttctggccccatccggatccaaactctaatgctcatctcttccatactgtcctttgcaggtcatcggtattgcaagagttgcataaggcccaattcagtctctgccccaaaagctcaagtccaaacttcagaatctgggaggacaaggattcaggaaattttgtcagaactatgagctttgaactttcacttttatggtgagggtcacatttggtctgaatcaattaatccattacccgcccccccccccccccccaccaccaccatgtgtgaattcaaaataatcaacttgggtttattataaaaaacaaaatatattaatataagtatactaagatttttctagaaaacttggccgggcgcggtggctcacgcctgtaatcccagcactttgggagaccgaggagggcggatcacaaggtcaggagatcgagaccatcctggctaacacggtgaaaccccatctgtactaaaaatacaaaaaattagccgggcgtggtggcgggcgcctgtagtcccagctactcgggaggctgaggcgggagaatggcgtgaacccgggaggcggagcttgcagtgagcccagatcgcgccactgcactctgcctgggtaacagagtgagaccctgtctcaaaaaacaacaaacaaataaacttagaagaatatatgtgactattggccgggcgcggtggctcacgcctgtaatcccagccctttgggaggccgaggcgggcagatcacgaggtcaggagatagagaccatcctggctaacatggtgaaaccctgtctctactaaaaataaaaaaataaaaaataaaaaatgcgaggtggcgggcgcctgtagtcccagctattcaggaggctgaagcaggagaatggcgtgaacccgggaggcggagcttgcagtgagccgagatcgcgccactgcactccagcctgggcaacagagtgagactccgtctcaaaaaaaaaaaaaaaagaagaagaagaaagaaaaagaaaagaaaaaggaaaaagaaaacttaattctggcaatggactgtttctaaaataatatattaatactacttaatgaggaagaaaaaacctctgacatcctaaaatgccaagtgtttgcctttaccaaggtttaagcacacataaacacgcatattcaaataccacccaaagtggaggtgcaaagatcagcctgtaccgcacagtaacacagactgggttgttttttgtaaagaaggcaactagtccagtgagtaatcccttcattttccacacacatacccttctgttttctccctctcctccccccacaccctccactgcagttaaaacgtaattcgaagaagcctaaggtaaaagcccctgccgcataatgaccctagagcttcacctcacctactctgattcttagtaacctacctctaaggatgagagacagggtgctacgagcggggcgaactttggtccaggagttaagaaacctgaaccctggagtcctcaaaaaaaatgaatgaaaataacagaggcgccctgaggatccaagctggggcggtgccaagggctggcaagtgaggttgggacaacagaagtcaaacgtgccgtccttccagatcccggcgcttatggcggaagccactccaggtgagaaatcctaacagtcataatggcataacaaataaacatcggcaaaacagcagtctgccaacgacgtgcttccctacacagacgtcctcctgtctccacactctagaggggagaggcggaacaaatgctgcctccgcagattttggaaatccggaagggagcctccgagcccaggtcccgggctggcaggggtctcgccggcgcttggacctcgtctcccacccccgagcccactgcggccccagagcctcgggaggggccgggcacttcctctgccctccggcctggggcaggggccgggacgcggtgggagtgcagcggggacggcaccgcccgagggggcgggccccaaactttcgtgcgcgttgaaagctgctggcgcggcggggcggactccacccctgcccggcagcccagcgcctccggccgcacttccagctctctgcgcagcccgccgcgcagcccgccgccccagccatggcgaagcccctgacggaccaggagaagcggcggcagatcagcatccgcggcatcgtgggcgtggagaacgtggcagagctgaag

SEQ ID NO: 12328 - DNA, 2300 bp, Homo sapien
ggaatttaaacccttacatgtcggttctagggccttcactcttttttttttttttttttttttttgaggcagagtcttactccgtcgctcaggccagagtgcagtggcgcgatctcagctcactgcaacctccacctcccaggttcaagcattcaagcagttctcctgcctcagcctaccaagtagctgggaccacagacacccgccatcatgcccaactaatttttgtatttttagtagagacaggttttcgccatgctggccaggctggtctcgaactcctgacctcaggtgattcgcccacctcagcctcccaaagtgctgggattacgggagtgagccaccatacccagccctggggccttcactcttaaccatactttccacatagcagagaagcacgaatccacacattccccagcgagctgctccatcccttccgtcctcatatgcaaagctgttccacttgggatttggagtaacaaattaaaattccagttttgtgtgtattttgtgggtcctcaaacatagatttgaatgattttcaagttttaaattgtgtttagcagtaatttatgtgaatatgcattacctggaggcagagaccatgtcttcttcaatatgactccatgcacctattgttccctgtaagctgttccatgtgcacgtgaacaaaccaaccacaactgcccatgcacacacctctaatactaaatactgagcaatgcttctcagctccatctgctcactacactggcatgtatggcttaaagaagatgttatcaactgggatcaaagagtggctttggaggagagggaagtcagtctttctcccccatttgctggaatagattgaaatggtttatgtccaggacctgaagaaattttgatagagaactggtctccctgcaagctggccctggccctcccagaggatcaccaagatggtataaaagagactcttctgagtagggtcttagtccccaccaagtgtcctggaggacagtgaacaaggccaacctcaggcaaagctctcaagtaagccaggtgcctctctggcaccccctcactttactttctgtgcccgaaaattctcaccaggaatacagtatccgaagtgtggaaagcttccgatactgcagcttaccccatgcctccagagccatcctcagctcaatctcttttctgtttcctcaattaaatctcccagtcttcaatgttcaggccattgctgatcaaggtaataatctctaatacaatttcttacaacttcccactaagaaacccatttgagcttcttaaaatttagaagtttcaatagcattagaaatcctgtcaaccacttgacagggcatacatgaaagggtcataaatgcaaagtggaccccaaatgccaaaggagccaagacaccaaagaatgaggcagacaaattcagtctgttgatataaagtgatttattgggggctgggtatggtggctcatgcctgtaatccagcactttgggaggccgaggtgggcagatcacttgaggtcaggagtttgagaccagcatggccaacatggggaaaccccatctctataaagataaaaaaattagccgggcatgatggcatgtgcctgtagtcccagctactcagaaggctgaagcaggagaattgcttgaacctaggaggcggaggtggcagtgagctgagatcgcaccactgctctccagcctgggtgatgaagtgagactctgtctcaaaaaataaaaataaaataaattgatttattggggggaacttacaaacagaagcttggtcttaggcagctggctacaagacaggtaaatctctgcactgcaatcgcccagacccaggatgtgtatcttgaggaaaaagtatctatactctggaaggaatatgtaggtggctataagcatcacagcctatgatttctacaacattatcaagggttgttttgagggaaacttacaatgaataactgttcctacataaacagtaatacatcacctagacattttggaggcattcccagacttggggttagtcagcagattagcatttaaaataaagtcacttatgtccctactagtgcctaaaaagcatttagatcaatgtcagcataaaggagactggactgcaaaacagaactgtgtgcaaagggaatttgttgaaataaacaggctgcaccctctgggacagagaagcatggtcacctgggaaggagagaaaagggagcttgggtcactccagtatcagcagccagctcagaaatgtagacctgcacaaaataatac

SEQ ID NO: 12329 - DNA, 2300 bp, Homo sapien
cagtttatttatctgtaaaatgggaataattgtgcctacctcttcttgtaattacagggatttaaccaagtaatgtatacaaataaataaatcccctgtttggaacagggtgaactctcaacaaatgagtcattttaagagctctcctaggattgactgatttagctaattcctaaacaaacagatctaacaatgaaatcatctcaagcgacttcataatagaccaaatctttctatattgactatattataaacctgtgttgttctttttgcgaacccaacactgcattacaccatgagacatcctctaaaattcttctttactttgaactaagcataaactttctgctaataagatctcttagatgatatactattataagcagagttcaaactcatacaaagtgtaacagctgctcaccttgctggtccaagatattgtgacttgtggtcaaatgcatacaaaagccataaaaggacactcctttctaatattttctcaataattaactttcattacaattcaattaatactatattgaatataattattagtaatttctcttgggacctataaattaagtgtatcctgcaagtgcagctaatgtcccaaccatacctgaagaaattttatctatgtctgtaaacagagtgcatatacctttggatgctctggtctcaactagttgaaagccagcttaaaaataaatcacgtcacatttatgattaacatggctttaaataacaatggggactttattcccccacacaatgatcaactactgttctcactgcaactaaagatgttgaaaagataacctagtttattggacaatttctacaagggcagtgtaataaaatgtccattttttttctggacaataaagtacttttaaattatcaacatagctgcatataatcaagttatctcctgtctggaaggtggaaaattggaatatttctagaacttgcaaagagtttttgtcctttacttcatgaatcattcagcaaaagccggctatgtactatttcaaatgttactacctcagaatgtcacttgactcaaagattttcctttccttttcttcttcctccctccctttcttcccttccttccgcctttcctttcccccccccttccttcctccctctctccctctttcccttcttccctccctccctccctccttgtacagggactaacactagaatcaccgcctcaccatgcccctcgttggaagaaacagaaaggcacacgatgctgtaagctatggcagatgcccagggcacgtggggttgaataatgctgtttggagtgaaacactgagactccgcagtcacacagtgattcatttacagagctttactaaactacgggcactcagaaatagacaaactgttcttgcctcaaccgaaccaaaggcccagcgggcctcgaaaaagctcagccaggtgctttgggaggccgcgaggaggaagaaggatccgtggaaggaagcacgttcacaccacggcactgaggcctctgggccgagctataatttaaagcatgaaacgaaggggtcatagattctgactaatgctgaccatttccatcggttacccagttgaatctcatgtcgacactaggaaatcgactttatacatgctctttaggaaacgagggacgcaggatgaaagaagccaagagtgtcgccagggcttgcgccagcgccgtcagactcccgggatgggggagctccagggcacggcgtcagcggattcacggagaaggagaaaagccccactgccgtgcagaagcctaggcccgggtgagacgcctgcgaaggctgccagcagcggaagagaaggggcgtcctccgtgctgcgcagcactcgcccgcggtaggtgggcgcggagctcagagctgggagccaaacgcaaacgctggcgagaagccccagccccctccggcagcccactcgctgcggggaggggtttctcacgcccccagctcctgggagactgcaccggaggtcggaagtaagccgggcgaggatgaatcatcccgcctaactcctccttcccggtcccctagcctccgcacgccggcccccttcagagatcttgcagccgcgagcgaagactgccctatcctcagactctaccgaaccccctgtggcctgcggagacgaggagacggacgggtctggtggccaatgagagcttcgatctcttgccccccgcccaatgggccgctgctcatgggccggggcgggactaggagggcaggtaggggcggtccgggctggcgcgcggc

SEQ ID NO: 12330 - DNA, 2300 bp, Homo sapien
aagacagaagatatcccctcaatagtataatatttctataatattaccaattacatttcaatttttattcccttttaaacataagtcattggggggctataaagcacattatggccaaacagtgcaacatgaggggaaaatcttcaaaggccttcaagaatattttaaagaaatggattcaaagaaaaatagtaaacttttggctgggagcgctggctcatgcgtgtaatcccagcacttcgggaggctgaggcaggtggatcacttgaggtcaggagtttgagaccagtctggccaacatagtgaaaccctgtctctactaaaaaaaaaaaatgtaaaaattagccaggcatggtggtgcacacctgtagtcccaactactcaggaggctgaggcacgagaaacacttaaacctgggaggtggaggttgcagtgggccaagattgtgccactgcactccagcctggggaacacagcaagactccagtctcaaaaaaaaaaaaggaaaaaaaaagtaaactttcagagaaggtgagcagaatatcatagaagttaacaaagaacattttgggtacttatcacattcagagcttgaagagagtagaactcagcacttgttgaatgaatgaatgaatgaatgaatgaacaaaggaacaaacttatatgtgtccgggttccaatcccagcctcaccatatttgaccttgagtacttaagtgtctttgcttatcttcagtttatttatctgtaaaatgggaataattgtgcctacctcttcttgtaattacagggatttaaccaagtaatgtatacaaataaataaatcccctgtttggaacagggtgaactctcaacaaatgagtcattttaagagctctcctaggattgactgatttagctaattcctaaacaaacagatctaacaatgaaatcatctcaagcgacttcataatagaccaaatctttctatattgactatattataaacctgtgttgttctttttgcgaacccaacactgcattacaccatgagacatcctctaaaattcttctttactttgaactaagcataaactttctgctaataagatctcttagatgatatactattataagcagagttcaaactcatacaaagtgtaacagctgctcaccttgctggtccaagatattgtgacttgtggtcaaatgcatacaaaagccataaaaggacactcctttctaatattttctcaataattaactttcattacaattcaattaatactatattgaatataattattagtaatttctcttgggacctataaattaagtgtatcctgcaagtgcagctaatgtcccaaccatacctgaagaaattttatctatgtctgtaaacagagtgcatatacctttggatgctctggtctcaactagttgaaagccagcttaaaaataaatcacgtcacatttatgattaacatggctttaaataacaatggggactttattcccccacacaatgatcaactactgttctcactgcaactaaagatgttgaaaagataacctagtttattggacaatttctacaagggcagtgtaataaaatgtccattttttttctggacaataaagtacttttaaattatcaacatagctgcatataatcaagttatctcctgtctggaaggtggaaaattggaatatttctagaacttgcaaagagtttttgtcctttacttcatgaatcattcagcaaaagccggctatgtactatttcaaatgttactacctcagaatgtcacttgactcaaagattttcctttccttttcttcttcctccctccctttcttcccttccttccgcctttcctttcccccccccttccttcctccctctctccctctttcccttcttccctccctccctccctccttgtacagggactaacactagaatcaccgcctcaccatgcccctcgttggaagaaacagaaaggcacacgatgctgtaagctatggcagatgcccagggcacgtggggttgaataatgctgtttggagtgaaacactgagactccgcagtcacacagtgattcatttacagagctttactaaactacgggcactcagaaatagacaaactgttcttgcctcaaccgaaccaaaggcccagcgggcctcgaaaaagctcagccaggtgctttgggaggccgcgaggaggaagaaggatccgtggaaggaagcacgttcacaccacggcactgaggcctctgggccgagctataatttaaagcatgaaacgaaggggtcata

SEQ ID NO: 12331 - DNA, 2300 bp, Homo sapien
catgtttggctagagaaacctggtgaacctcggggctctttagtggatggaagaccaggagaggaagaatcaagaattatcttttttggccgtttgatgtttgagcttctgaacccccaaaatctgagacaggtctcagtcaatttaggaagtttattttgccaaaattaagaatgcgcgcccatgacatagcctgaggaggtgctgaggacatgtgcctaaggtgggtggagcacagcttgattttatattatatattttagggagacatgagacatcaatcaacatatgtaagatgaacattgtattggcctggaaaggtgggacaactcaaagcaaaggcgggacaaactcgaagccaggaaggggcttccaggtcataggtgggtaagagacaaatggtggcattcttctaagtttctgattagccttccaaaggaggcaatcagatatgcatttatctcagtgagaagaaggatgagaggcaggtttgccctaagcagttcccagcttgacttttccctttagcttaatgattttggggccccaagatttcttttcctttcaccagctattacatacccaagagatgtttagcaaggagttgaatacatatgcctgtagttcccagaaggatcagagtctgaatgatatacagttgaatacatatgcctgtagttcccagaaagatcagagtctgaatgatatacagttgaatacatatgcctgtagttcccagaaagatgagagcctgatgatatgaagagaaaggtggcgggagatggggggcggggggcagtaaagcatcctggagatgccgatgtccggaagtaaaggaggaccagccaagaagtttgagaagaatcagctactgtaggacagaaaaaaaagcgagctgcccagacagcaagatagtaaagtgtttcaagggtgtggtagaatggggctaggagtcatgctagatgcattgagaagaaacaattgggatttatcttgctggtcgctggtgtccttgagagggctattcagtggaggggtggggaaggggactaattggggttaattaagttgaaaaggtgaggtaagatagtggcaactatttccttgagacttagtctctctctatagcccagattggagtgcagtggaatgatctcggttcactgcaacctccgcctcccgggttcaagcgattctcctgcctcagcctcctgagtagctgggactacaggcgcctgccaccacgcctggctaatttttgtatttttagtagagacggggtttcactatgttggtcaggctggtcacaaactcctgacctcaagtgatccgcctgccttggcctccctgttttgctaggattacaggcgtgagccaccgcacctgcaactattttcatttgactgatggggcagtgcacattttggtttgcatttgtatttacgaatgtttgagagaaaaaactcaaatatcttacaagcctatgtgtctggttccattttgaagtactgacctaggatctctgtacctactgaattttttttgagagataacatacacctgaaagtgcataaagtgcactgtcttaaaatgtacagcttgatccttctttaaaaaaaatcatatacgtacgcccatgtaactactgttcatatctagatgttgaacacctccaacacatccaacataaccataatgttcctctgcaccttccctgtctataatctctcagaagtaaaccaatattccgactcctataaaatccattagctttactacatgtttcaaagaaaacaaatgagaactctgaaggacatttaattggaaaactgctttagcacattataaacttaccaatttgcttgtaaacgctaaccatttggcgccaaaatcctgggagggtcttttaaaccgttcttcctcaaagcaccgccccactttttacaccacgcctccttttgctctgttccttcccccacaatattgggacaccctaggcggtagaagcagccgcttttctgtcatgcgcattgcggagagtcgttcttccctctttcccgacttcaccactcactgggatcagacccctgtcatgcgcattgagagtcctctagacaggcgctcctcgcagcaccgtagtgcgcttgcgctgagcagcccgcgagggcggaagtgggagctgcgaccgcgctccctgtgaggtgggcaagcggcgaaatggcgccctccgggagtcttgcagttcccctggcagtcctggtgctgttgctttggggtgctccctggacgcacgggcggcg

SEQ ID NO: 12332 - DNA, 2300 bp, Homo sapien
tcaccccagacctactgcatcagaaactctcagtatgggtttgggaatcatgaacatgacccccaggtggtcccaatgaatgctcaagttgaagacctgctgctctagcgtgtacagtgtcccagtattgtttgttactgtatatagtatcctaaggtctagtgtgggtttgtcacagctttataactggcttatagttacagtccctgtaaatgaattgcttgttataaagaattttgattacattatttttggtttattgtatttgtatatacatttcctttacaaaatcagtaaaatacaaaatcaacaaattataggtactggaaaaaatgctgctgactatatgaaaacaatctctagatggctgtacattaagccagtgcttttcagactctgatttacatacagatcacttgggggatcttgtgaaaatgcaagactggattaaggcctgaggtcctgcatttccaaccagctccaggtcagtgctgctgttctatgggtcacattttgaatagcaagccactaaaatgttatccatagttattgttggaaggtcaaatggtggggagttatgctttgtacatttcacctttgcgcattattttttaaaaatattttttacaaataactatattcagagaaaggatgaaagatttttaaagtctttcaccagaatttgccttactttgacatctctctgctatgcaggcttagccttgaaacacatttccaagagtgaagcaaaaggaaactcatttattggccctagaaatccccccactgatactgtagaaatgaatgttaaaaagcagtggtgataggtatagagggaagtaggaagaaattcatattagctggaatttttttagtgccagtattagaaatctaactgaaatgggcttaaggagataaaggacatttttaagaaatctgagggaaatgcttgctttcgtcatggctgaatgaagtgttcaaacgatgtagtaacgagatctgctttcttctgcagtggctttatcttcaggcagttcctctttccctagggtggccaccagcagccctaggctctgcttctatgattagaaaccacagcagaatgagaacctcccttcccagcaaaaattccagggacgactcccattggcaggagcccgtctctgaaattttcgcagtaattttgattggctagacttggccacaggcccacttctgaagaagtctgggggtggtgtcaacaacatccacgacagctgagaggaaggggtgattccccaaaggaaaatcaaagttttgatacaaaaacaagatggaatagatgtaaaactgagagatggtgttctgttattgtgccagtcttccagcccaatcctttcattttgcttatttggaaatcagtttaagggatttattcaaggtcacatgggtagtcaacagcagagcaagacttaacaacttctgccctatttctacatcctctctactgtagtactaccaccttcttggaaactaggaatgaatcaaacatggagcttctataatgcttgccttatctttgaaatgtcttcttaaatactgtatttcatgatattgaatttaaaggaactctaattgcacatctctcatctttgactctcctacattgactgcctggagtaagaaagccacattctttctgtgatagtaatccttgctactcctttcctctttggggaaacaagtcaaagcttgacaaagtgtagctgctgatctatttgaacgaagttcgatccctaaccagtgatcccatgaatgaggtggatgccctatggatggagaagctcacaccggcctctgctttttttgtggtatattttatcccgagagcttgattaataatctagactgggtcctccctttgggtgggtatgttgccctcccaattttcccaggcacagcaatatctctgcagacaggtacgggcatgcatcagaaatctggaggctcgcccaaaaagttatgtctgctgtttgtgaaggggcaatgtagcaattatatgagtaatgcagtggcagatcttctatgagaaattaaaactggagaaagagggctttcctccttgaaggaagggtgttgggtgaactaacactattttctcctgccctttcccccaatctcaatccctttctctccaaacattcttccttgagcaccccactctggcactcaaaaagccatgggaatgggaaagaagtggctggaagtaaacagcctgcttactcacagcaactgaaaattttgtttcgacgattctggtt

SEQ ID NO: 12333 - DNA, 2300 bp, Homo sapien
catttttttttttctttttcagacagggtctcactctgtcacccaggctagagtcccgtggtgtaatcataattcactgtggcctcaacctcctaggcccaagccatcctcccacctcagcctcctgagtagctggggctacaggcatgggccaccatgcccggaaaatttatttattttttatttttagtagaaacaaggtctggctatgatgcccaggctgtcttgaactcccggcctcaaacgatcctgtcacctcggcctcccaaagtgctggagtaccgctaatttaaaaggcagtcattgaaacatatttcttgttctcttttgcatcatggagttatgactttaaatcataagtacagtatccttagaaactgcccagttttatcagaaataagttctgaatgtattgtcaattgtgaaaagacaaaagatcacagttcctaatattcagttctaatggcatggttccccaaaatgtaaaagctgtgactgagacaattatttcaagagagcttcagctgtaaataaacacaaaactgaattcctttgccatgcaaacaagaggcacactttcaaccagtaacagctggcttcatatattcatctttggatgaaaagagcagggcagttttttttttttttttttttttgagacggagtctcgctctgtcgcccaggctggagtgcagtggcgggatctcggctcactgcaagctccgcctcccgggttcacgccattctcctgcctcagcctcccaagtagctgggactacaggcgcccgccactacgcccggctaattttttgtatttttagtagagacggggtttcaccgttttagccgggatggtctcgatctcctgacctcgtgatccgcccgcctcggcctcccaaagtgctgggattacaggcgtgagccaccgcggagcagggcagttttaaagttgacttctgagagcatcagattttggatagtgtcctttctcaggtcctgtttccttgtctcctcatcccattttaaaagccagacacataaaccccggcactcctttagcgaagggctcagtgagggcgtttttgccacccgtggccaggggtcattgggtcagcaaagtcagaggaaacctagaaaggcagaagcccaggaggttgacgccctgcgggtctaggggccaggtgctgggtgtctctcctttcgtgtgcggttcccagcagcaggtcctggtgggcgcagactgaccggagaggtgtggctcgccccctccccagaccccgaggtggcaatgaaacctccatctcctggcttgattccttgtgctataaaaaatcttccactggccctttgcatctctcgccctccatcccccaaagccactatcgggaggggacaaaaataatttctgaggggccatgggcactaaaaccacagcagacagaggctgtgtctacctgaggaactggagaggtagaattagagggggaggctgggcatcctcggcggcgccccctccatccagcgtgaaacccacgaggcgcggcgtctcgagtggcgggcgggcagggggctgcaggattcacgaagccacctccgccggggaccgccttctctcggagtggcctcccctccggcgttccgctttagtaagacgacactcaggccaaacagccgcccccggccagcccgactcggctctggagggagcgccccgagggagtccagccggaggcggagaaggccactcggccagaaggtggggagccgccggcgtcccctcgcacctccgtctccacagcagggggaaaggccctgatcgccgtggtccacaccaccgcgtccacctgaggctcgcctcgcttcctgggtccctagaggggtggcgtactccgctttctcctgcccccaagtggccgcacccctccgcgggacgcttggttgggtccagggcggggcgggcgggcgctccccgtactgccgcgagctcagcgcgcagctcccgcggctcggctgccgccgcggccagttggggcgggtcgggggcggggtctcagggggcggggattcgggggggcgggtcgggtcgggaggcgtgggtggggggcggggcggacgcggagcgcccctctggctggcggggccaaggggctgagaggagtggggcaggctcggcgccggtaggaagagtcagaggggtgaccagagagcccaacgcctggtgctcaagactttctccgaggtatgaacaagaaccaggcgtctgggccctttccgctcgccccatcgctcagccgccgcgc

SEQ ID NO: 12334 - DNA, 2300 bp, Homo sapien
tcattatcattgaaaaaaaggatttgaaagcagatagtactaataaaaggggagaatgccatatgtaatgcatataggtaaaatgataaactgtcatgttacaatattttaatatatatatttaataattaaggtattttaatacacaaataagctgtgagttgctgcctttgccactattagtgatatgactttaagctttctgagttttattttcagaaaataaattgacctgggtggtttcttaaactctatccaaactctaataaaccttgatgattctgaagtcaacaagatagaatcagcagaattactgtcctccataatactactttaaacatttgagaaagcattattatgagataataattattatttgtaataataatacaaatattatttgtatgagttattatttataataataatattgagaaagaaaattgtatcttttaaagactatcagttaacttttgacttgtcagaataacttattgccagagttccaaattaatatggctttgtgattgaagtatactaagactcagaaaaggaatctggtttaggcactaaaaatatattagacaaaataacagtgataaattaaaagctaggcaggctgggcatggtgtctcatccctgtaatcccagcgctttgggaggccaagatgggaggattgcttgaggtcaggagttttaagaccagcccaggcaacgtagtgagagaccctgtctctacaaaaaaaaaaaaaagtcgattgagactctgtctttaaaaaaaagtctagaccaactcgttgtacagtagatgagtttttggggtagactattaagaggaaagctttccttgaaaggatacttgtcctgagtagacgtccctcaaaagaagatacacccatgaccaataggcttatgaaaaaatgctcggcatcactaaatagcagggaaatgtgacatctcacacctgttagaatggctattatcaaaaagacaaaagataacaagtgttgacgaggatgtggagaaaagggaacccttgtacactgttgctgggaatgtaaattagtacagacattatggaaagcagtatgggggttcctcaaaatattaaacatagtactaccatatgatcctggaaccccattcctgggtatgtacccaaaggagatgaaatcattatgtcaaagagacatctgcactcccatgtatattgcagtattattcataacagtcaaggtatggaatcaacctaagtgtgcaccagtggataaatggataaagaaaatgtggcacatacacacagtggaacacaattcagcctttaaaaagaaggaaatcatgtcatttgcaataacggatgaacctggaggatgttaggtttaatgaaataagccaggcacagaaagacaaaccctgcataatctaaaaaagtctgactcagggaagcagagaatagaatgatggttacctgagactgaggagttagggggactggggagatattagtaaaaaaatacaatatttcagttaggaggaataagttcaagagatttattgtacaacgtggtgactgtagttaatgatgatgtatacttgaaaatgctaagaataaattttaagtgttctcaccacaaaaagatacatatgtgacataatgcatatgttagtctgatttattcattccacagtatatacatatatcaaaacattatgttgtataccataaatatatacaattttattagtcaattaaaaaaacaaatgaataaaaattttttaaaaaagatacttgccaaataaatatttttagtaatctgagtaggctatgctgcttactttctgaaactcatttatcatttatcatgcaccatggtttcagagctttgtccatgtatggtaagatctgtgagtcttgtactttattaccatgttgtaaaaactggtactgtgatcatcattactgaaacacaaccccaggttaaagtgatttggataaagcagcagttgttttctactgtcagcttgtcctttcaaggaatatatttacgatgcattaaattgcctgattgtggctccctgggtggacttagttgaattgttattttacgtcgtgcctttttcccctacaggttaagattctgtgtcaccagttgctggtccaggtttgtgacctgctcaggctaaaggactgccacctctttggactcagtgttatacaaagtaagtcttagagccctctctgatggatttagccaactatccctgaggaaatgacatcttatagctataacttaaattgg

SEQ ID NO: 12335 - DNA, 2300 bp, Homo sapien
ataatttatcccacaaggaattttaaatgaaactttatacatttcagaatctataattttccttactaaataggaaacaaaggggactttggcaaatcagagatttttcttcctgaatttgattcatggtttccttccaaagggtaagaaatttgagattttgccagatggcttgccttctgcccggaagctcatatactacacggggtgccccatgcgctccagacacctcctgcaacttctgagcaacagccaccgcctctatatgaatctgcagcctgtcctgcgccatatccggaagctggaggaaaacgaaggtattgcagggtctggggtgtggaagcaaattgtacctttgccacctgtggcctcttactctgaatgggggttttgagctcctacagaattggattttgggactgggacactccagattgagagcagcattactatttacatctcagtatttccagaaggcaaagggttaggcttgagccccacctactgtagcacttattcagaatatctgaggtgactgcatttagctatctctcaagtacagtctctaaggttttcccatgcctgacttgaaaatacttgcaaaaagccacccataaaggcacagggcaagggtttatctgcaactcagattttatctgcattttagagctttgtatttacactgacccaccttagtgctattatccacaggtggtctggaattctttccaatgtgattatttcttagggttagagtgacaataaaggtaggtcacagatgtgtctgcagcctctgattgacggctgggaggcccccaagtctgttctagcaagagtgccaaacaaaggagagggaagtcagctggtcctgtggggcctttgctgagatgcagatgaaataaagcagtctgtctggggcctcagagtactggaccctgaaacggggatcatgtcagggtgggaaagaaggcagtgctaagggtctgtaacatccgacttcaactttacattaatctgatagccctttatcttgagttgtggcaccctggatttcctccatttaacacaccccaaccctaatcctcaaaactgctacattacgtatttgggtttgtttttttttttaatgctttggggttttgtttatgctttcaaagatttgttttgcaaaaattagttttataaattcatgttgtagtaatatctaacagtaatttgattagattggatttggtgtatttgtgtgaatatcagggtgaagattcatattttaggttcatgtctgagacaagttttgacacctcagacctcatctttcctttagaaaccaggcaaatacccatcctttcttaaacaaacaaaagaccttgtagaggtttgtgcttctgatagatttctctcaaaaattctctgtcaatccaaatgagacccggtttggcaattcttttgtaatttcgtagcgattagaacatgaatcattcctcactgtctgccacaaactgcctgtgtcttcagagagaattggtataactgtcaggtgtattggcttcagctgctgctagactgccacttcttccccacgatgactcatcagtgtaacaaatatatctctcctatgctgacatgaatatgaaaaggaattcagatggggacaggaggaggatgaagaagcaggagaacctgtgagaataggtgacataattacgtgcagagcccataatttgccaagtcagcttcattcctaaacgtctaacatggcaccttgagaagttgatttgttctatcagctttctgcctgcagcattttagtacattttttttgttcagatgaccttaagagatcccttcagagccttaaagaattaatgaccttcctctataggttctaaggtaaaaattgcaaagaattttgagttttcagagagacagggcgttgttcattgccaaccatagtaccaagtgtattcggaggcttaagtgagtaggtgtctttgtttgttttgtgctgctgtaacaaaagaccacagactaggtaagttctaaagaacagaactttatttcctcacagttctagaggctgggaagtccgggattgaggggccagcatctaccaagggccttcttgttacttcatcccatgatggaaggtggaagggtaaagagagggtgagaaagagtaaaagggggccaaactccgcctctcataatgaacccactactgcaataatggcactaacccattcatgaaagcagagctctcatgatctaatcatctctttaaactcccatgtcttactact

SEQ ID NO: 12336 - DNA, 2300 bp, Homo sapien
gtgaccactgcgtacatcactgaggccactgcagtctttctcggggaagatgacacatctgaactgaggtaccctccaacgcctgttccataaaatcaggaaacatctgacaggtgagacccataggtggagaaggctttatacttcccacctgatgatgaaaccctcagaatggaggaaacaattttatcgtaagagaaaagtgtccccgagatgggaagaaaaccaaatatggcatcagggaaatacaggattatgttattgttgaaggtgtcacaacatgcaagatgggggagttgagaagggtcacagaagaaattaggaatttccacatccttgaagcaggtcatttgtaaggcaatcaaattgtacagctgggcatctaaaagactgagggaaaaaaaaaagacaacaaaagtagaaagccacagaaacacgggttcatgatggctgaatgatatagagggtgacatttggctacaaactggtcataggccatcacactcaggagtatgtctgtcttccatgcctccaaaaatggcaaagagagacatctgagtcaggcagcctgcataggagatgactctgctgtgagattggatgtccacagtcatcttggggactgtggtggaggtgaaactgatgtcaggcaaggacaggttggagaggaagaagtacatgggggtgtggaggtgggagtcagggctgatggccaggatgatgagcaggttccccagcgccatgaccaggcacgtggacaggaacagcccagtgaggaccggctgccgttctggatcctctgagcttctaggaggaggaatatagagacatctgttagattctgtgggtctctagagattggacaccttttgcctagaaaagagggttgagaaattggaaacaagtaaagcaacacccagcatcatgtctgcattttgcatagaagcaattcacaagtcatgttttcagatttcagagcaatccacactcagcaatagtttgcagtgctgacaaactcagttgtcttctaatgctttcatcattgatttctgtgttcttcacttcttgctctacacacctgccttagagacactagattcaagaatcttccaagaaccaaatcatcctatataagaagttcgtcattgctagaaaatacagcctatcttttccgaagaaaacgatgtaatgaaaccattctcttcactttaagaaaaaggttatcctaatgaaaggaaattaagaactcaaatattttattttattcgaatagattgatacaaattcccttgatttagaacatctgtaaacactgtataactgctgagaccatgccatctggaaatgaaattaaagttgatggttcataagcagaaaatagttccacaggccaggtgggtcccagtgatttcatcattacgttttctgacttttctccttcaagagagtaattgcttcctcaaatcagtgggtcttgttttaaaattcatggaagctataactcctatccttagcttaggtggacttagagttttcatcagaacgtttggccggacgcggtggctcacgcctgtgataccagcactatgggaggccgaggagggcggatcacgaggtcaggagatcaagaccaccctggccaacatggtgaaaccccgcctctactaaaaatacgaaaacttcgcccggtatggcggcgtgtgcctgtagtcccagctactcgggaggctgaggcaggagaatggcttgaaactgggaggcagaggctactgtgagccgagatcacaccactgcactccagcctgggcaacaggagcaaaactccatctcaaaaaacaaaaaaccaaaaacacacgctctgtcacactgacgtcacactgatgacagccaatttttgtgaaccaaggaagtgtcaattcaataatcagcatagatgtttactttggctatctcctatgtgccaagcaagatataggctctggggaatcagaaacaaaagagactcaattgttcctctcacaatactcagtacttactgagacaaggacaaaataagatgtcctgtctggaatgcagggacacaagaacttcaggtcaggggatatttccgttgaaccgtttggagtttaagctgaaaatattaacgaatgtatctaaagttcactttgccttgactttatgcatccatcacatagagatcacgcagcgggcacccactatgggtttcatcatcgctcacttcccttggatcaactagaaatcaactcagatgagagtgctgagtctcagaggatggacgt

SEQ ID NO: 12337 - DNA, 2300 bp, Homo sapien
aaatctgtttctctatgggctaaattagtgtatcatatgggccaaatcactttttaaaaataggtaattttcaatcataaataaaggctggtgcagtggctcatgccagcactttgggagaccaaggcaggtggattgcttgagcccaggagtttgagaccaacccgagcaacacggcgaagccctatatctacaaaaaaataccaaaattagtcaggcatggtggtgcgcatctgtgtggtcccagttactcaggaggctgaggtgggaggattgactgaacccaggaggtcaaggctgcagtgagctgagatcataccactgcactccaacctgggtgacagtgagacctgtctcaataaataaataaatatccatggatctttaaactataattagatcttagaggcaatcttgcccagcatttctcaaagtatgctctgaagaactacgagagattctgtgaaggcagtactcagtggccaaatacgtttgggaaatgccattcttattctgtagaactccctctcagagagtcatcccagatgtcagaatatcaaaagccccgagaagtcccatggtaaataaacctggtcaatgttcttgaacctaagattttgcaaaatgatttgagctctgaattccccatctgcactttttaccctgcgtgccacctattgatccagtttgggacgtgctggcctgagtgatgagtcagtggtatatgctggaaataatattaagaaatggtagttacagggctggatccatcctctttgtgctctgtagtcccccgggcacagagttttgtctcgacatcactgctccagcatctataaaacatgggacactccagttcattgcagcttccacctttgacaagataggtattacaaaatgaccttgtgattcagctgccaaaaattaacagtaaagcaccagtaactctgtgaatcctactagattcagtttttaaaatgtataaaccatttgtcaaaaggcagaaaggtggatattggaaaaggaaaaacagattaattttaaactacttgactcagatataatcatgaaaaatcaaggaggtgagttatcaaccattttagtttttgtatatatttggagtaatatagaatattttttacatacaatttttttcacacacaagttctcatcatacatattactaaagatggataatacctaggttatgaaaaccatataaacctggattaatcaatttttcttatgtggttttatcaggctgttacaaatcaattttaaaaagacaggaaagcagctaaatttgttgttaattctctgaagttgttggatagaagtaaaaattcaacctcaaccccatattaaattcaagcatttggaatcttaattctaaaatttagaactataaaaagaagaacattctaaaaaaatgtgtgtgcgacctgttttttgctttgttttctacctaacttaattctgccacccagctgaatatttcaggtttccttggtggaacgcaggctgagtgctgaagggctctagtcacctgagaatggcatctgcctgcccgtcaccatgccaacacccctggctacaaaaaagggatttcccctttttccagtcttccctcccatgtgggacaggtgcatgcacccctactccaggaagggcaccattcctaattacaattgcttccttccctccacttttgtgtgagagaagaaagcttgagatgcaatcctttgtcttttcaaacatgattcttttggttttgttttgttttctcgctattcttactgacgtctttgtgtggtgcagcggctgggatcccactgcatctacatggcaaccaggaaatcagtcattcagagtttccatggtaaccagagggggggaggggtggaaaaatccattttatcacggtatgctgtgtcccttcctggaagcctacagaatttttagacagaggtcattatgaaatcaacaacaacaacaaacgcccgttggcatcaagacaggcctgtgaactggcatccccaggcaggctgcagactgggagggtgggagtgagcatgcagctgaccccaccatgaggcacagggcgtcgccttctcccctcagcacagaggagaggtgacgaatgccacttggtctctgcagcgtctgtagagggaagtctgtaagcgggagtgtcaaccccaattggcagattctctgacacttcaagtctgcaaaggaaaagcaggtaaccgacgttgtgtaagaagtgagcctcttggtttgggtgggggcacagctct

SEQ ID NO: 12338 - DNA, 2300 bp, Homo sapien
aaaatctagtttttagctttgtatagagttttgttggcacctcccaacactggcgattaacctactgtgagttttataagggccagagatggaagaactaattaaaaggcagcaggcaaaattcctagagattttattgtttgaaagaggttttcctatataggcttaagtataaataccaacctatataggcttaaatataaataccaaccatcggaggatggttgagagagagttagaaacaaaaagacacaaaaaattactgtacttgaatctagagtttatgccagaacctacttgtctaaaattaaccatagtcttgtttccaaccattaataacatgcttctcatttttcttagacttggcatcatgcatatttaaatttacatttaaaagttcctggtaacctttggcacaagggttcctggtttggagataactcacatgttggtggattcatgcccaatccctctcactactgcatttctatctgctggtggatcaaagctagttgctcattttcaatcttaaatcaatccattttgtaattttcaggtgtgagtgagttgacatcagggtcctttttgatgaaagatttccttgaaaaaataagcaaactgttcaaatcaaaacaaagggtgttttgggactgtctcagaacatttcatagaaattaaattctgtaccttctaggttaacgtgctgtggtcctcacgatgtgtttggaaggctcaactggagagttattctccatcagtcctagatttctaacatttcctgttagtttacttgctggaggattaaggcaaaactggattaaaaaggaggagttggggaattaactgtttcctggcaagattagctttccaggcactgattcctgagaagaggtgttttttgttgttgttgtttttgtttttaactccataatgttgcctggacactagaacaggattccccttcccccatctcatgtttaatctgtagcttccccaaagtaccttgtgttagtactagggggagaatgactcacacgttgaataaattgttattaaagcatctgggctcaattgtgaacatactaatagtgaggaattggaaaaccaagtactggtgagggttcggctgctgactggcgaaatcacttgctgaatgtgaggcccaacatcctctaaaaataataagagttaatatgtgccgaatacgtcctatatccccagaactattattagcaccttgtataccatctcatttaatcctcatatttccaatgtagagcatgactatcatcaactatgttttgcagatgaggaaactgaggcacatagatgttaaataatttgcccaagttcatacagtcattaatggcaatttggattgaaattctggcagacagagacagcttgcaggctctaccctggtgggttctacgatattacctcctaagatgaagggaagggactggaggatcatgagggtccttcagccctactagtgtgtgtggaatggggagaggagtattcagtttctctgttgggaatgtgcagcattcagcaccacctcattccttcccatctatgagaatcttttgggaatagtcctcactattaggcctataggtagcattgccaacttggtttagttcccgtgccccataagaatacttatcagggccattcttttctgagcatgtgggttaagtaagatctcagtggtagtgggaccttggagaaatgaagcctctgaaatgttggccacagagaaaaatgctgcagtgagaagctgcaagctgcaagctgcaagctcccagctagctggcttgatggggaccacagtaaatcaggaggaacagtggaggctggtgtgggatctcgggggccagaacctggccaggggatgttgacccaaaaaaaaacagcagcagcagtagaaacaacaacagcaagaacaacaatagcaacaagccaggttcaggctaaaaaagcaggcagtgtgccaggaagggggccgactgagcagtgtgtggaagctgtcgtggaggtgaccgtggggggatgagaaaaggggaaggaaggaacagacagcaccagagggacttgaacaaagggagaagggggattaaagtcaaatcactgtcagcagcccaggagcagacaaaaccaccagagtaagccctgaaatggaaatgagagggaaaagaagcaagccgctaacagctaccaagaagaggaggaagtgggagatgcgctgcttcctgtagaaagaacgttgattgaagacaaagctgggtggggactag

SEQ ID NO: 12339 - DNA, 2300 bp, Homo sapien
tatatctagcaatttctgccacttttgttattctgttgaacagaggaaatatattgtttagattttgatgtattttcttccagtctttatgtatcagaaagatactatgtataattatactagaaaatgtgttatataatacaacttatattatgtatataatacatgttagtgcatatatattagaaaaatatattaagacatagaaaatatatattagaaaaaacatatgtaaatatgtatattagaaaattgttgagttcacactatatataatattttatattttttactttaaaatttaaatgacaatgcattttacattctttttactttataataaaataaccttattttaagttactttttaaagtaacaatatttattaattttaaaataaagttaagtaaaaagagaatataaaatgcattttttcatcatttaaacatttttttcttttttccgagacagactctcactctgtcacccaggctagagtacagtagcatgattatggctcactatagcctcactctcctgggctcaagctatcctcccacctcagccttccaagtagatgggaccacaggtgtgcatcaccatgcctggctaacttttgacttttattgtagagaatatgtctcgctctgttgcccaggctggtctcaaactcctggacacaagtgttcctccctccttggcttcccaaagtgctgggattacagacatgagccactgcacctggcccgtttaaatttcttgtattcattgttttaaaattttatcatgtggagtttctgttttacttaataggttgaattattgatatttaggctatttcttaacaccttgataattcttctttgtccacattgtgggtttgttttggttaaagtcatggagtggcatcactaaaacaatgactgagaacatatttgggtcccttgataaacaggaccagacggctttccagagtagttgtgccagcttccactatcaccaataacaaatgagtgccgggcccagaacccccttgaacaggcttattttgcctgtcccacctagtctttgttacccaagggttcattctccgaaaataagttgtttttagcccttggcttttttttttctttttgctgtcattaatcatgagataatggttttctaataactttagcccatttaaaaacatatggcccctatggtagtctgggaatataattggttgggttgagattgtagcacacaggccagtctcaagtaatgtgaggcctctggagacactgatgttcgtttggccctagaaccccttgcgaatttgagttccaccctcattcatactattctagatgtgagatatctctttgttctcagacactgcaaaataggaatgggaaagtgttccttgaggctttagcaattccctttgagctgagtgctctaaagcttttcaggaataaagaagctcatctacacaggaactttctcccgtaggaaccacactcggcactggacaaacgtaggccactctgcctgatagccacagaggtcattagtggctaagggcataggtgtcttctacttctaaacagcctatagaagctgtgggtgccaaagatactcttataaccaccaacgtgtcctccaccctcctaaagggccagatacacacaaactgtatgcactcaaactctgtccctaatacctggagcaagagtgtgttggtctctgctgctttggtcatgctcggagcaaattagattaggtcaggaggaaagattgttcttattcattccatcggtatacagcctctcccaccaaggactctgcttcctctaggttcctaagtggcctttgtgttttcatgttttcttgcatgctaggagatttcacaaagaaagggactccaatttcacaaatctatttcttaaaagaaagagagttaataaaagttcatttctaggctctgaaatgtaaacctgtgagacctcctgcccttataactatattgccattaccacccacccccgtttcagaaacttcattcattctacttatccagctcttgtgtatcatgttatttttccttttaaaaaattcgtttttctctctgctttctcaacagccagatctgccagtgagcctcaggctttaggaactgaagaggtaagaattccaaaatattttcttctagaatcttgaatttaaccagaacttaaagaggaaaaaaaatgttaagtggtctatagatgaaagcatgtgatgttttattgaaagaaacagtcatagagtccttatca

SEQ ID NO: 12340 - DNA, 2300 bp, Homo sapien
gggctgatgactagggacagtcttaagttgctgacaatggggaccctgaagtggaaagactaggccaggagcaaacaacttcattttttgccttgaaaggtcaatttcagaaaacaaatggtaagagatgtttttccttatttttttaaagaaattcatggtctgcaattgtatttttccccctttttaatttattatttatatgtaagtatttattattttcccttccatgattggttcattttttcattttttggttagtatttcattaattatacaactagcatgcactacaatatgagattatagccatatctttgatcaaattttgttggaaatgagacactcttgaactgattttcttgattcactctataagcaccttaattgaaaaatacagattatcttacagtgcccccttaaaactaaagctgtattctagcctctgtacttctttttattattattatttttgagatggggtcttacatgttgcacaggttggtgtgatcatggctcactgcagcctcaaccttgcaggctcaagtgatcctcccacctcagcctcctgagtagctgggtccacaggcacacacgagcatgccaggctaatttttctttcttcttttttttttttttttagttttaatagagacaaagtctcactatgttgcctaggctggtctcaaactcctgggcttgaactatcctcccacctcagcctcccaaagtgctgggactacaggcatgagcttctgcacctggcctgtacttctttgtagtacattttatatttcttgtaattcacttactctttctaactccagattataagtatttatttacacatctatatttgtcattatacttaaacttcctgaaaatagagactgtagtttactcatttgtatgctcctcagatcctaagtgtttaattaaaatcttaattaatgaaatgaaatgaaacgtacatagttggcttacccccaagaatttcaatagctccccttagcttgccatgagaggcttttccttatcagagccctgcctttgtctatagtcttatcagctgtcattccctctcaccctccagcccctataagctctagtccctctgggccatgctgttgctcatttcttgcctttatacatcctcttccctcaaactaggttacccttttgactgcatggtgaatgcctcaccatcttcaagccttagtttatacttatctgtttattgtttccctcattagccttttaaactccatgaaaataggggcctggtctgtcttgttcactgctctctctccactgtctgaaaagcaagtagagactggatcaggaaagatcttaaatacaataaggagttttgattatttctagggggtaaccaggaaccactaaaacataagcagagaaagttatgtacaggtttttgctttagaaaaatctctctcatcgctgtatggaggaatggtttggagaacgcaggactggccctaagaaatcaatcagataattagagtaagcaaaagtgatgaggatctgatctgtggctgtatcagtggggtccgaaaggaggtgagggatttgagagttaggagagacagaatggcaggaattggtgacctactggatgctgtgaccgagggtgagggggagtgagggacgatctcggcttcagatttcactctggctgaggatatctggaacgatcgcatcgtattaacaattgtatgtttacctgtggatcactcccaattagtctgaaagcatcttactatagggaccttgctttgtagtctttgtattaccagtgttagaagagcacctgttatgtaggaggagtaataaaatgaatgaatgcactcaaaacactaaacagtaattctgtaatccaacgggaggtacagcgaataccaaaagcctacatatactattctctgcatgctatagcaagaaagaaaggaaagtggcttcccggtggttttctgcctattgtacaaccaggaagctgacaataaagtttatttgagcgtcgacgtgcgccgacgtggccccgcctccccagccggagccgcgattggtgggcatttgccggcggccaccgcttttaagccacgattggcgaaggccgccgtcatttcggagcgactcagcgcctgcccgccctctcgccgcgtcgccggtgcctgcgcctcccgctccacctcgcttcttctctcccggccgaggcccgggggaccagagcgagaagcggggaccatgttccgacgcaagttgacggctctcgactacca

SEQ ID NO: 12341 - DNA, 2300 bp, Homo sapien
tcagctttggtacttaccagccatgtgataataactgatttttttaaaatcccatctgagctttagtttccttaacacaacgactacctgttatcagttgtctattgctgcataacaaattatcccaaaatgtaatagcttaaagcaacacacagcttcttcagcttctgaagctgaagctgtaattctcagttttggttggtctggaatcccaccaaaactataattataatctaaccaaaactataattctcagttttggtgggtctggaatctgcacctggcttagctgggtcctctgcttcagggtctcttgcaaggctgcaatcaaatgtcagccagcgctgagataccatctcaagacccaactggggaaggatccgtttccaagctcactgacatggttgttggcagaattcagttccttgctgactgttggccagaggctgccctcctcagttccttgctatgtgggcctccccgacataacagcttgcttcatcaaaatcaatgagagggaaagtcaactaacaaggaagaagccacaatcttatttagccttcttctcatcactcttgccacactatgtttgttagaaatcacaaggccagtccacactcccagggcagagattatacaggggaatgaacaccaggaaatggggatcattggagaccatctcagtgtttgcttgccccaaagctcatagcttagtaccactaaataaatgttagttattattattatgctgaatcgagagataaagtaaaactacagagggccagtagttttatatcagggagtaacttcagatgatgttgggcaagtcaagtcatctgtctttgaactttcatttcatcctcagtaaaataaaaatacctgaccccagaaagaatgagaaaatatatgtgcaagcataaatatatttttggaacatcaaatatacaactctccactctgaggaagcaaactgctttgggccagttttccattttgtgtctgctctatgagtctcacagtctgatgtcttcacgttttttagcgtttggtccagtgggcccataggaataaacacctacaaagagcagtgtgtctctggagagtcctttaaggcatttccaaggatttgctttttggtttttttctttctttcgttctttttaaatatctttgcttttaaggacctcatggggggcctgggagagaaaacagactgtctgggaaattttaagctcttgataataaaaatggtaataaaatctcctccagctcctgaggcttcgcagaggggatgtttatggtggatggggttccccttctcctgcgcagctggtttcgaggttgtgcggtttccagtcctgcggagcagctcaggttaccgcctccgtggccgcgggggagggcatctccgacggccgcagcaatgggcaagagatcagggtcttcccatccccgcgactcgcccctttctgcctggtaaccaagcgggatgcctcatcctactccccaaacggagcggatcacacacagtagtatttcatggtctttcctgctgcggttttcccgggggaaggtacttccagagggtggccaagtcttccctagcggccggccttcgggagggggacagaacttaggagtcagccctctgccttcgtacaaaggctcgcttctcctcagggcgtctctgggtggagcgaagcggccgaggggaccacgacaatgtccctttgcttttcggaccgatggccaggcctccagagccaggagcgcccgggaccccagggcagggagcaaagctcataccgcaaccccgccacccgcccgcgccctgccagcctgttggggccacagcgcgcaggccagcagccgcactcgccgctgcggggttccctttgcgctgagctcatctcctgcaacgccgctgccccaaaccttgcgggccatttggtcccgggggtggggctccttgggggccgcggggcagcccggatgagaggatgacccgggagctccctgggggcggagtggaaggggcagctccaggcagccctggccaggagcttttaccccgccagccccgctgctccagcggccgctgccttagaaaagttaacgagaaccagatgtggtggccactgccgaactttctcagagccggtgattggtccccagccgagggcctcagccaattagcttgctgggtgggcctggagtcccgccccgcccaggcgcccgcggagatccaggttcgaggctggcgcggcgcggagagtgggctggaggccggggcgggacgc

SEQ ID NO: 12342 - DNA, 2300 bp, Homo sapien
acttgtggcaatagcaagcagtttcaaggatgaatacatagctcaaaagggggcagtagtgttactggaaagagttcctgatccagaccctaagagagggctcctggatctggtgcaagaaagaatttggagtgagtctacaaagtaaagtgaaagtgactttattagataagtaaagaaacaaaagaataggcagagcagtggcgtcggctgcttgactgattatacttatggttatttattgattataagctaaatggggtggattattaatgagatttttgcaaaagatgtggggaattcttttctcttcccagattcctgaaggaggagggttttgattcaagccttaaagatgagaaggtgttggcttgaaattgaccaagaaattgaccttttactgtaggtaaaaggacttacctgtgaggatgttgtattggagaattaaagtctcagcttcaggtgagacttcagggtggctgtgacgggagataaagttagagacataaactagagctactttccaaagggccttgctgcaatataatttagtggttaggagtggaggtttagagatcagacagaattgggttcaaatctcagctttggtacttaccagccatgtgataataactgatttttttaaaatcccatctgagctttagtttccttaacacaacgactacctgttatcagttgtctattgctgcataacaaattatcccaaaatgtaatagcttaaagcaacacacagcttcttcagcttctgaagctgaagctgtaattctcagttttggttggtctggaatcccaccaaaactataattataatctaaccaaaactataattctcagttttggtgggtctggaatctgcacctggcttagctgggtcctctgcttcagggtctcttgcaaggctgcaatcaaatgtcagccagcgctgagataccatctcaagacccaactggggaaggatccgtttccaagctcactgacatggttgttggcagaattcagttccttgctgactgttggccagaggctgccctcctcagttccttgctatgtgggcctccccgacataacagcttgcttcatcaaaatcaatgagagggaaagtcaactaacaaggaagaagccacaatcttatttagccttcttctcatcactcttgccacactatgtttgttagaaatcacaaggccagtccacactcccagggcagagattatacaggggaatgaacaccaggaaatggggatcattggagaccatctcagtgtttgcttgccccaaagctcatagcttagtaccactaaataaatgttagttattattattatgctgaatcgagagataaagtaaaactacagagggccagtagttttatatcagggagtaacttcagatgatgttgggcaagtcaagtcatctgtctttgaactttcatttcatcctcagtaaaataaaaatacctgaccccagaaagaatgagaaaatatatgtgcaagcataaatatatttttggaacatcaaatatacaactctccactctgaggaagcaaactgctttgggccagttttccattttgtgtctgctctatgagtctcacagtctgatgtcttcacgttttttagcgtttggtccagtgggcccataggaataaacacctacaaagagcagtgtgtctctggagagtcctttaaggcatttccaaggatttgctttttggtttttttctttctttcgttctttttaaatatctttgcttttaaggacctcatggggggcctgggagagaaaacagactgtctgggaaattttaagctcttgataataaaaatggtaataaaatctcctccagctcctgaggcttcgcagaggggatgtttatggtggatggggttccccttctcctgcgcagctggtttcgaggttgtgcggtttccagtcctgcggagcagctcaggttaccgcctccgtggccgcgggggagggcatctccgacggccgcagcaatgggcaagagatcagggtcttcccatccccgcgactcgcccctttctgcctggtaaccaagcgggatgcctcatcctactccccaaacggagcggatcacacacagtagtatttcatggtctttcctgctgcggttttcccgggggaaggtacttccagagggtggccaagtcttccctagcggccggccttcgggagggggacagaacttaggagtcagccctctgccttcgtacaaaggctcgcttctcctcagggcgtctctgggtggagcgaa

SEQ ID NO: 12343 - DNA, 2300 bp, Homo sapien
agctgcaaagaattgaagtaggtatgcttcagaagaacaacccatgcaatatttttagaggaaggattcttaagctagtgtccattgggtctcctctgggtaccatagaagggcttcaggaaatggtgaacagcctgagattgatgtaaagtgtgtgtgtgtgtgtctgcgtgtgtgtctgtgtgtgtgtgcctgtgtgtgtgtgtgtgtctgtctgtctatggaggagaccacagctttcatcaaattctcatgtcttttggttatggggcctgctcttcctttcacttcattaagtcgagtggggctcttctaaacccattcttatgtgctaggggctagagatgggaatgagagagagtaggtagaagacaagggaactaactctatacaaggccttctattgagtcaatataagtgaaaggcttagagagtgtccaacctgcatcaggaccaataaatattagctcttattattattattacactatgccaaagcacttcaagttttctcaacctcacaacaaccccacaagttcagcataagtctcatattccattaggttgaacaactaacccagggtcacacagccagtggtggagttcagaactatctaattccaagcttagattcttcttttccaccctgtggcctgaattactggccagactttcagtctggaggcagcctctctgtctacccttcaggctttcacatctaaatcccaagggtcttgctctttccctgagtctgtccatcagaactggcatgaggcctaaaaatgagccgtttcaagcccaggcatcatctactcacttacataacaaaaccttagtcatcccactgagattccacactcaaagccaatttctctcacagggcatcgaatgctagttaaagatataaaatcacgcttatcacaattaactcccttgcctttatgatgcagccaagtcaaagcccaaacaggaataaattttttctagtagccacaaatcagaggagtgagaaagctctatgccaaatctaccattttctgatttcaaaatccatgctaaaaactgcagttaaacatcagctaccaaaacacccttctatcaaataagaatcatggtgattgcatgaattgagcactttctatgtacttgctctttacgtgttatttctatgcctcagaagagccaagcaggccagatagatgttactgcttgagaggctaagcaagtcccataaggtcacacacacagtgaggagcagaacctggactcaaacccaggcctatctgatgacagcaacagtgctgctaaccatgcccttccccccagctctctacagtcaatgtgattcatggcacccaggaccaacaccggctcttggctttcccacaaaccacttccctgaaatctggacaacttcttgggaggaggagtcatgggaacaggacagatgaactccaaaatagaagatcgggtgagaggtccggctctgctacttctgtagctctgtcaccacgggcagatcacttaactttccaaggcctcagtttcctcgcctatgcaatggagatgaccgtgaatgccccaaattgcgctgatctagtagagaagaggagctaaggctcaggggctttccagacgtgagttatctttacctttccttgactagctaattcaagacaactaggtagaagccctttctcagcctcccctcttcgctcatctttcgagttcttggccaccccagttcaaacaccagcaccattgccctcctctcaggtggctgctgcttaatttcccctccactttagtagttcttctcttgcctcgctagaaggactggtgttgggtgcttggaattctggctattttcctcctgccgttccgactcggcaccagagtctgtctctactgagaacgcagcgcgtcagggccgagctcttcactggcctgctccgcgctcttcaatgccagcgccaggcgctcaccctgcagagcgtcccgcctctcaaagaggggtgtgacccgcgagtttagataggaggttcctgccgtggggaacaccccgccgccctcggagctttttctgtggcgcagcttctccgcccgagccgcgcgcggagctgccgggggctccttagcacccgggcgccggggccctcgcccttccgcagccttcactccagccctctgctcccgcacgccatgaagtcgccgttctaccgctgccagaacaccacctctgtggaaaaaggcaactcggcggtgatgggcggggtgctcttcagcaccggcctcctggg

SEQ ID NO: 12344 - DNA, 2300 bp, Homo sapien
gggagagagcttggttatcaacaactatagtgtccacatattgaactatactgtccacatattgaactatactctccacatatttctgtgcaagactccttgtggtgcaagactgagtcaggggttaggaagacaagggggcaggggcctgggggaggatcttcaactgcactcttgctctcgtattcacaaaaaccaggggccggcctgccaccaggtacccatccaaagaaaagctagagacaaatatataggaaaggttaaatagtaggtttttgttgtgaggggccttatgaaaattaaaaaggtataaaaatattcggaaaataagcactgtgcaaattcagtgaatctaaaatcccttatttaatagtaaaactgcagtgcagaattatgctataaatcatagtgttttcctattaagaaatacttctgatttaagtttgatgtttccccattgcttggggtgagatgggggaatgttggagtaggggaatagtcagagatggatggcaaagattggtaataagttgttactgacctgcagagtttacagcttgaaagaaaaactgtaggagttaagatcctctttcctaggaatccatgccatgagaagtttagggattgaagtagtgcctgctgacatgtgaaaaccggcctgtaaactttgcaagcgatccagtaaattatgcttgttctagtgggaaccaccccccccaactccgcattccaatccccaggccagaatcatcaaagttggcaaaaaatattcatggagagtaagcaggctgtagcaagataggctcttcagcaggcaatctttgcttcctcccacgttatgactgtctttcttgccagttccctaggcagatcagacccttcacttcccagttggcctcccttccccaagtgaatgtgacttcttacagaacacaattacctatgttgtctgccaaactggattttgttttgttttgttttgtgttaaatatcagcccattttcacgactctgcaattatgacaatatgtggtaggaaaccattactgtcagctccagtctgaaactggccacttaccaatacactttgccaggaacaagtctttctggatggatactacgtggttaacaacatgtaaagataaacggctaaacaaaatatcaacattttcttacaaggctcagcttaaggacagaacagtgatgtgcaatggttttcatgttgtatccacaaacacaattctgtataagacacactcctctttttttaatggttgcttaaacaagtggttatccgttatgctgttgacataggaaacggtgaaatgctagtaaccgaatcaaagcggcagtgcaacaggccgctcggtggtgcgcattgtgtggtttggttccttggatggacacacttgctttacgcttcatcccaatttttgtcccaacctcttagtgtatcttcctgggaatagtaaaaacaaagcaaaacattctggtcttacttcaagctgcctttgcactgttattcccttgttccgctcatttcacgggattgggttctcctaacttcattgtttggtgagttgctttgctttgctcgttgccccgatcttctgtgtattctgcgcagaccccgcaagtgctcctgcactccctcccagccctctgctggggcttaacgcttcccagccgaggtcagactgccgtgcgcttcgagtaccggaccccgaggaagcgagaaacgccgctcccgccggtcgcgggcagcttcagtacaccggcaacacgcgcgcctctgcccagtgccgcgcccagcgggtgctcagactccttctctccctccccgccggcgcgccccagggactcggaacgcccccgcgagtgtgacgcgtcctgcctcccctgcagctcgcggacactcgcacttgcaaggcctggccagcactcttgggcccgccccccgacagtgcgggggcggagacgacggctcccctaggctctggctcccggccttggccggcgcgggtaggcgcgggagcctcgagcgccgctcggatgcagcagccgagccgccactcggcgcgcggcgggagacccagggcaagccgccgtcggcgcgctgggtgcgggaagggggctctggatttcggtccctcccctttttcctctgagtctcggaacgctccggctctcagaccctcttcctcccaggtaaaggccgggagaggagggcgcatctcttttccaggcaccccaccatgggcaatgcctccaatgactcccagtctgaggactgcgagacgc

SEQ ID NO: 12345 - DNA, 2300 bp, Homo sapien
ggataagagaactttgataggaagtcacttagcaggtctgatttgggaagaaataagggtttatatttgtttatatgctcatacaaaattcaagtattaatatcctttaatgtaagaatttaaaatttgtgaagaaatatcagtgtacattctacacatttttactgggtacatactgtgtaacagacattgtgcaaggcagtgggatatagtggtgataagacagacttaaggccgggcgcggtggctcacgcctgtgatcccagcactttggaaggctgaggcaggcagatcacgaggtcagatcaggaccatcctagggctaacatggtgaaaccctgtctctactaaagatagaaaaaattagccgggcatggtgtcacgtgcctgtcgtcccagctactcgggaggctgaggcaggagaatcgcctgaactcgggagaggaaggttgcagtgagccgagatcacgccactgcactccagcctgggcaacaagagcaagactacatctcaaatatacaaaagcaaaaaaaaaaaagacagactaaatcttgcctatattatcagattgttaacactaaatctaaagtgataagttattacatctatgagaagtaatcaagaatctttgaaaatatacaaattaatttcagtattaaaaacatttggtgataaaatattaaaataccacattcacaattttaatcatatgatgaagtaacatttaggctatatcctaaattgatacacaaagattccttctttgatctagtatgatactaaattttatcttttattagaatttattctttcgagttgtatggtgcttattttatttagtgtttgatctctttccacacagtgatttataatattttagagaactttacacgttttattatagagcaagtaggaatttctgcttgagattctactgtgtgttttcttaggctgaaaagaaattataatgtttagacaggataggtatctgaagtcctggatgagtttcacatgtgtcatttattcacatgcatatttaaggtactgcaggtgctggaaaatcaatgataaataaacagacatagtccctgctctcaaggagttgtcttggtagagacagacgttgatcagataatgaatagtatataattacataaggagataaggaaaagagcatggttctataatagcatatgtcaagggaacctgatgtagatcactgtgtcagagaaggctagtccttgaagttgtacacggtaagaaagatttaattctgcaaaaggttggtgggggtaagctggtaccaaaatatttgagttttgaaaagatatctctagcattagtgtagacacactgaattcaaagaggcgaattagaagcctattgtagttatccaggaggaacgacaacttgagtagtggcagtaaagagaaatggacagtaattagatatattaaaaattcaggtggtaaaattgaaagaacatgctgattaatcaataggcatgaagggccttgggaatggagaggtatgaaagatgatgctttgttttttgagttgcacaagagcagcaacgttcaccaacaaacagaaaagaaaccatatatggttttagacttgttgagtttgaggaggtttccgttcaaaggaaaacagagaaggtagtaaggatatatgggtctggaacttcaaggagtttgggccaaagacataaatttaggattcattagattgtctatggttattgaggttgtgtaggacaggagtgaagaaaaacaagagaaggcagcttaagctgagccttgagggacctccaactctactggctgaagagcctgcaaaagggaacaaaaaggagaagctagaaaggaagggaaaaggccaacagggaatggtgttgcaaagatcaagggaagagagtgtttaagcaggagtgtttcatgctgagaggttaaaataagaatgggatagaaaaatactgaagatcctaagcaaatgcattttctacaattagtaattacaaatgtgcattttccttttatttaggcacatctactatgcttcttactagaataaactgtgcagattggtctgatgtatgtactaagcaaaatgttactgaatttcctatcataaagatgtacaagaaaggcgagaacccagtatcttatgctggaatgttaggaaccgaagatctcctaaaatttatccagctgtaagtattcagcttcattataagatctctgaatgtttaggtctttagaagttctaattctcagactttgctaacacttaaaat

SEQ ID NO: 12346 - DNA, 2300 bp, Homo sapien
aaaccacactagcatctggtacctggacaaacgactgtcccagaatctacaaaatagactttaaagttccctgtggaatacttagctaggaaaaaagacagcaacactcttcttgggcaaagcatatgacaaaggccagcctggacaatatagtgaaacctcgtctctaccaaaaaaaaaaaaaaaatcagccgggcatggtggctccagtgcctgtagtcccagctacttgggaggctgaggtgggaggactgcttgtgcccaggaggtggaggtttgtagtgaactgtcactacagcctgggcgacagagcgagaccctgcatgaaaaaaaggaaaaaaaaaaaaaaaagcataggacaaaggatggtgaggtaagaaaagctgggtctttgttgctccaataaacgtagcaatgtctttcacaaggatactgaattcgtaatgtgctgtgtattctaaagaaaacaaattatttccttttaattttgcactacttgctaatcttatttccaaataggaaaaaaaaaagtcaacaactatgtgccggcccaatatacgttagtcgatctgattattcctcggttcttcacagcagtaacacagcatgtattttctctctcaggcccaggaatagcgccaccatctaccatacacaggtccaaggcttcgatacatgtggaatttaaacagtacagaatattctacttcctctccaggcaatcatcatacttacaagtctgtttctgcctttttcccaaaacttaagcccagagcatcttcccaaattctacgtttgaaagaaccagcttccccctgctcacagatcgcttcaacatccatctgatactactactactcttccttaagagacatttcccttggccttgggaggaaagggtctttcacttaagagctccgattctccccgtcgcccctttccatcccctcgacccacaaagggctccggtgtttcccgccgttcatgcagcgaaaagagaaagcaaaatgccctcaggaggctccaggtgaggcccttcggtgccccagagacgggtgtcttaagtcagactccggagctgtgcagtgcagccctggctacagaaagctgcttcgtctgaatccccgggtctgcaggcagagcccacagcctgaagggccagcgctgtcacctacctgcccgggacctgcgggcggggacctgggccgttcccgaggccgcgcggccaacagttcccgccgccacgcgacggaggaggaggcagaagacggggccgtgccagactagccgggtagcctggaaccacttcgccaacctgcaaaggcgtagcacttctccctcccagcctgcagccgccaccgactcggcggagtcggcctcctgggaaaaaacaacctgcgaagctcctccttctcctcgtgctccctacgcgaggcactctctaaccaatgggaaacgtggtgggcggagcgagagtgacagacgattacagagtcctcccgccggcgcgaacgggcggtgcagtagcagggccaatcagcagcgtgggtgggaagtacaggggcgggagaaagtagggaaattacgcgcccaatcagatctcggggccctcgagcgacgggtcctgcggcccgtggccttccgagcgcggcgctcagggggcgtgcctgcctgggccaatcggcgcgagcccacagtgcggagcgagcgcctcaaatgctcgggtttctcagctgattgtctccagccgagagttgttttttgcagctacggagccgagccgcagcaggaggagccgagacccccggggggtggggggaaagaggaggcggggtccgggggagccgcggctgctttgcgctggactccgggtcccgtcacggcgcttcctggggttagaggctggggtgggtggggggtaagggggcagtccttctccccttcgacggcggctccgagtccagccccttccttcccgcgctcgctcgcccggcccccagccccctcatgagggtgtccgtgccgggtccggcggccgctgccgcccccgcagccggccgcgagccctccacgcccggcgggggcagcggaggcggaggcgccgtcgctgcagcctcaggcgccgcggtgccgggctccgtgcagttggcgctgagcgtcctgcacgccctgctctacgccgcgctgttcgcctttgcctacctgcagctgtggcggctgctcctgtaccgcgagcggcggctgagttaccagagcctctgcctcttcctctgtctcctgtgggcagcgctcaggaccac

SEQ ID NO: 12347 - DNA, 2300 bp, Homo sapien
tcctcccctcctcaagcttttcttttggtgggaaggaggacttttttgggggaaagtcttaaaatattatggcttaaataccacaagctgacacacatgattgacaaccttacactcccaaacctgtttgaaatgggtcaaatacctaagcgctgcagaacaatgcaatccaaccagcaattccccataaaagagaaagggggtgtgattaggttccagatattaagcaagttattgcaaaaacagtttggtggttttgtttctgcaataggcacaggttaagctagtatttttttctcttaattagctccaaaaaagactatgctaataggaggtaggataaaccgctaaagcacgaagcaactggggcaaacattaagggctttatggaggtccttatcctgatcctcagcattggttattgatcatcaaccctgctggggaactatcgaacgaaatttatgtgaggcttatcgagccacaggaaaggagatgcaggagggaatataagcttctaataaaagaaacgcagcaacaatagcagaggaacagctctgcctggtgacgtaatggctggcagcagtccagcttcagcagagctgctgctacctcagcatccaacctccctcaacacagtccggcttcggcagagccaccggggctgctacttcttgcgatgccactttgttggtgccaccaacgccttacctcggagggccagaacaccgaacaaagggttcgttccgttgctgttttaagttgtcagacacacacactcactcactcaccccctagcccgaacccctcagtaatcaagccaatcagccacttaagtttaaggcgaaaacactggctcacactccaggtgtgcctcagtttccccaggctggtttccagtccgcctctcgctgcccaccccccgcccccgctggtcctcagcgggagttgatcccggcggccccgcgcacccgcccgggccccgcatgccggccctcccgccttacctccgccaggtagaggttgaggagacagagcgtggagaactggagacaggaggggaagcagtagagcagccagtgggggaagaagtgcaggtgagcgggcggccggagcaagggcagggagccgctgagcgagaaggcggcggagaagagggtggtcctgagcgctgcccacaggagacagaggaagaggcagaggctctggtaactcagccgccgctcgcggtacaggagcagccgccacagctgcaggtaggcaaaggcgaacagcgcggcgtagagcagggcgtgcaggacgctcagcgccaactgcacggagcccggcaccgcggcgcctgaggctgcagcgacggcgcctccgcctccgctgcccccgccgggcgtggagggctcgcggccggctgcgggggcggcagcggccgccggacccggcacggacaccctcatgagggggctgggggccgggcgagcgagcgcgggaaggaaggggctggactcggagccgccgtcgaaggggagaaggactgcccccttaccccccacccaccccagcctctaaccccaggaagcgccgtgacgggacccggagtccagcgcaaagcagccgcggctcccccggaccccgcctcctctttccccccaccccccgggggtctcggctcctcctgctgcggctcggctccgtagctgcaaaaaacaactctcggctggagacaatcagctgagaaacccgagcatttgaggcgctcgctccgcactgtgggctcgcgccgattggcccaggcaggcacgccccctgagcgccgcgctcggaaggccacgggccgcaggacccgtcgctcgagggccccgagatctgattgggcgcgtaatttccctactttctcccgcccctgtacttcccacccacgctgctgattggccctgctactgcaccgcccgttcgcgccggcgggaggactctgtaatcgtctgtcactctcgctccgcccaccacgtttcccattggttagagagtgcctcgcgtagggagcacgaggagaaggaggagcttcgcaggttgttttttcccaggaggccgactccgccgagtcggtggcggctgcaggctgggagggagaagtgctacgcctttgcaggttggcgaagtggttccaggctacccggctagtctggcacggccccgtcttctgcctcctcctccgtcgcgtggcggcgggaactgttggccgcgcggcctcgggaacggcccaggtccccgcccgcaggtcccgggcaggtaggtgacagcgctggccc

SEQ ID NO: 12348 - DNA, 2300 bp, Homo sapien
ggcctcaaaaaatactgggattacaggagtgaatcactgcacctggcatatgtatttaaatacttttaaaataactaatttctagacattaatatcttagttttaccttgtcgaattaagaactaaaatatattaaaatacattaaatggtttatgcaccttaaatttattgaaataaattactttaaaaatgttttaaaatgcaaagtgaataacttttacagataaaatttatctaagatggtttctgagtgaaatattttttggttacagaatttctacaagtgtgaaagaattagaaaacttcaggaacttgttacagaatattcattaaagaaaacaagctgatatgtgcctgtttctggacaatggaggcgaaagagtggaatttcattcaaaggcataatagcaatgacagtcttaagccaaacattttatataaagttgcttttgtaaaggagaattatattgttttaagtaaacacatttttaaaaattgtgttaagtctatgtataatactactgtgagtaaaagtaatactttaataatgtggtacaaattttaaagtttaatattgaataaaaggaggattatcaaattcatatatgataaaagtgaatgttctaagtctctcaaactagcgttttatgtaataatatgtaatataaataaaactatggtaaatgtgacaagcatttaataggaaaatgctaaggaggcctcataaatgacccataattaccaacgtagaatttttcagtacatttagggttgctggatttagcaaataaaaataaagattgcccagttagatttgaatttcagataaacaattagttttttaatattttacatggaatatttggaaaatacttatactaaaaaattatttgtttgaaattcaaatttaactgggagtcttgtattttatctggcaatcctaaaatacattggtatgaaacaaatcacttttagaagtatattgctattttgattgggttgtttttgtgtgtagaaacgtacaataacaactcaaaggcacaggagatttctaaacattgtgaaaagttgaatagattatatatttattctcataatactttcactaatactaaataaaatttggggaacactttttatttttatataatttccaatttacagaaaagtttcaaaaatagtacaaagagctctcttacccagattcactaattgttcatacgtgctttatctttcatgctttctctgtacacacacacacacacacaaatttttcctcaatcatttgaaagtcagttataggcatcatgccccttaaaccctaaatacttcagtgtgtaatactgaataattactaaaaatgattttctcagaaaaaaaaactcccacaattctggaactataatactgtaagccttagaataaataatactttcaagttccaatctaaagttctttttgagttttgttgcccgttttatgcttgatgtgtatagtaatagggtaggctatttattttattaaaattttttttagagacaaggttttgctgtgttgcccaagctggaacttgaacgactgggctgaagtgatcttcccacctcagcctcccaagtagctgggaatacaggtgtctgccaccatacccagtttcatttttgttttttatacccgaagttcatttcctttgtctccctaaaactgaactgtaattttgggaggttttcattagtggaagctcttcatttataaagctatttgaaggggtttaggaatttatatcacatggtaattgtagagaaaaagaagctatatacctcaaaatcgtgccctctttacatatgtcttatcaggtataacatgttgaaatgtcacattagtagtaaagtggggtttatttatatagtggttaagaaatgtcagtttacactgctgtatacttcttcttctgtgtccctaaggcctggtacagtgccaagcacatacttggtatccaataaatatttgttggatgaatgtatgcatatgtattcagtatattttaaatgaataatcacagaagtaagtttaataatttgtcctatttttctctgtcacttcctttttctctaaggcaggaaaggaaagacattaaaccattaattaagtcaatcctcttggagactcaaaagactatgaagtgatcactctatataaaatataaatacagtgtgggttcaaatggccattttttgtgtgtccctctctctcatcttatgcttcccttcctttttttatttttattttttggagacggagt

SEQ ID NO: 12349 - DNA, 2300 bp, Homo sapien
actggggcctgtatataggaatatgaaaaagagcttttggccaggtgcggtggctcacgcctgtaatctcagcactttgggagtccaaggcaggcgaatcacgaggtcaggaggttgagaccatcctggctaacatggtgaaaccctgtctctactaaaaatgcaaacaacttagctgggcgtagtggcacgcgcctgtagtcccagctgctcaggaggctgaggcaggagaatcacttgaacccaggagctggatttgcagtgagccaagattgcgccactgcactccagcctggcgacagagtgagaatctatctcaaaaaaaaaaaaaaaaagaaaaagaaaaaaaaaaaaaaaagctttcaggttaggagggagattgtattaatatgtacatgtgacatgttgtagatactagaattagagcttctcaggtccatcaggatctcagatgggttgttgacttttactacatgtctacttggcagtgataggcagagctctagggtttgcagtaaaatacatgagtttaagtcatttgaactatttcaacttttaatgtgcatgcaagatgtcggaaagctgccagtttcacctagaaactaccttcttaggcttggtgaagtggctcacacctgtaatcccagcactttgggaggcagaggcaggcagatcacttaaggtcaggagttcgagaccagcctggccaacatggtgaaaccacatgtctactaaaaatacaaaagttagctgggtatggtggcgcaggcctgtaatcccagctactcgggtagctgaggcgtaagaatcacttaaacccgggaagcggaggttgcagtgacccgagattgcgccactgcactccagcctgggtgaggaagtgagagtgtctcaaaaaaaagtcttcttaaaacaacaaacaaacaaacaaacaaaaaacaaaaagtaaggccaggtgcggtggctcatgtctgcaattctagcactttgggaggctgagatgggtgggtcacctgagctcagagctagagaccagcctggccaacatggcaaaaccccttctctactgaaaatacaaaaattagccgagtgtgtggtggcttacgcctgtaatcccagctactggggaagctcaggcaggagaatctcttgaacctgggaggcagagattgcagtaagccaagatgacgccactgcactccagcctgggcgacagagcgagactccgcctcgaaaaaaaaaaaaaaagtaatcccagcactttgggaggctgaggcgggagaatcgctcttgaggagtttgagaccagcctgggcaacatggtgaaacctcgtttctactaaaaataaaattagccaggcgtggtggcgcacgcctgtagttcatgctactcaggaggcttaggtgggaggatcgcttgagcccaggagttcgaggttgcagtgagctgcgatcgcatcattgcaggccagcctgggtgacccagggagaccctgtctggaaaaaaaaaaagcggatagactagtcccaactctgaatgttaaaagaccaggactgggtatcagaggacctccaatccttgctcaccttacctcacttctctaggcctgtttcttcctatgatatgagcgggtggcttccaccctcgctgtctaatacagtgggcactagccagccacatttgactatgaaatgggtctagttcgcatcgaatacacactggatttcaaagacaaaaaaagtcaaatatcttatgaataaatttaatgttggttatattttgaaataatattttgcacattcggggttaaataaaaatattttaaaaataaaatgtacctgttatttttactcttttgctgtggctactaaaaatataaatgacatatgctgccctggtctagatgctctctaatatccctttcagctttaagactccgccgggaacacggtggacacgtaattcgtacgatttgattgtctcgcattgagatacggaaggattggccgggagtgagcgggctggggctgggcggggcggcgcggggcgggcaccccccgccccccaaccccgcaggaaaacacaggcccctccggctttcgctctcgctctgggaactggaaggacccccgactcccgcgcagggtctggggttgtgcgcgtcgggttgcgtctccaggccgggggcgtcagggagccgggggcggggacgggcgcgggcgcagcggaccgggcggggccgagccgggaagctggtcggtgcgtcagcctcacgcggcgggaaggaaccggtccgagg

SEQ ID NO: 12350 - DNA, 2300 bp, Homo sapien
gtggtgtgcgcctgtaatcccagctgttcgggaggctgaggcaggagaatcacttgaacccgggaggtggaggttgcagtgagccgagatcgcgccactgcactccagcctggcgacagagcaagactccaactcaaaaaaaaaaaaaaaaaaaaaaaaaaaaaagaaaaatagaatggaatattcacacaatacccatgagaattgttcctaataaatttgaaggcatcctttatgtgactttgggtcattaatttacaaaaatttgtactttatttgtatatttaggatgtatatatttaaactcaaacattcatggccattggataaggtgagaccaaatggaatctatttggagaattttactcatgttttttggacaacaattaattgtccccaggaacaatgatagcaagaggtatagcaatgaggacctgtaatgcaaaaattggagtcattactacccttaaaataaatatctattcaaaagaacactattgagtacatgccatgtggcagatgttgtgtttaggcacattatcctatttaatactcatgacaaccccattagataagtgcaattattatgatcattttacagagatattgagggagtatgtaattttccccaaatcacaaaaatctgaaagttggccaggcgtcgtggctcacgcctgtaatcccaacactttgggaggctgaggcgggcggatcacttgaggtcagtagttggagaccagcctggccaacatggtgaaaccccattcctactgaaaatacaaaaatgagccgggcgtggtggcgggcgcctgtaatcccagcttctcaggagggtgaggcacgacaatcgcttgaacccgggaggcagaggttgcagtgagccaagatcgcaccactacactgcagcctgggtgacagagtgagacacagactcaaaaaaaaaaaaaaaaaaaaaaaaatctggccgggcgcagtgcctcacacctgtaatcctagcactttgggaggctgaggagggtggatcacctgaagtcagcagttcgagaccagcatggccaacatggcgaaaccccgtctctactaaaaatacaaaaattagccggttgtggtggcgcacacctgtaatgccagctactccggaggctgaggaaggagaattgcttgaacccgggaggtggaggttgcagtgagctgagatcgcgtcaccgctccagcctgtgcggcaggagcaagactccatctcaaaagtaaataaataaatacataaatctgaaggttctatcagacttcaaagttcctgcctcagcctacttcagcatctttatcttgtaccccacatctctacaacccaccccctactggtctcattggcctcctttctgttcctggaagtgagtcaagctttctacccacaacccccaccccactccactccaggacttgcactgtttgtttaggttttcttcagttgttgcaaggctggctccttctcatctcagatatctgttctagattaattcttcccaccatacttctcaccgtgttttaattccttcacagtatttgttaaactctgaagttttttttattattatttcctatcaaatgataagcagatctacctttaatacctcattcactgactgaatggatgaataaaactgtctacttctccagcacgtggaggtcttggacagtactgtgttataacaaaggccatctgtgttgtgtcgacaggccatcggaactcctttgaggtattacacatttcctacttcacttccatctcagtttattacagagccttttatacttccgggacagcagtgacttaatactgaggcctctcaggggaagaccgggataactgagtcctgctttacctatctcggcttgcaagaaacggtataggtggaggcctctttcagtgtatgccggcgctctaggtgaaccgagacatagaggtggaagtggagtagaaagacggggccaaccggaaggggagggctcatgggcgaacccacccctccaggcagggtttcgcccctcgccccgccccttcccccgcccggacggccatggccattcccggcatcccctatgagagacggcttctcatcatggcggaccctagagataaggcgcttcaggactaccgcaagaagttgcttgaacacaaggagatcgacggccgtcttaaggagtgtgagtgcacctttctttccatttaatcaagtgcctcgactcgcttctgcctctgacaaagcagaagcctttcgccgagcccggcaaccgagcct

SEQ ID NO: 12351 - DNA, 2300 bp, Homo sapien
agctgctctaaaaattatttttttctctcactttattgctgagactgaggcaactaaaatagttttgataattgaagaggatagatgacagaatgaaagaatgcacataaagccttcctccagttttacctttccccactccaaattctgtgaaagtgatatcaagagtccaaatacattttccacttcaaatagaaactaggtagcatgggtaatgcagtgtcaaattctttctccttagaagtatttgaaaaatcttttttcataaattatacagatccgctcagaagataacatagcatttggaaattataaaatctcttagaaaccttaaattgagatatttttaaataacacaaatactcattttattcaagtaactaatatatcatcaactaacacattgtcagactagctatattttagagagtttgttaaatgcagtaaggtttttcatttattcaagaaaactttagaaattgaggacaatattttttatgtcttttagtatttctgtgtacagtagaattatttgaaaaaataggccaggcatggtggcttctgcctgtaatcccagcactttgggaggcccagctgggcagatcatgaggtctgagcattgagaccagcctgaccaacgtagcgaaacaccatctctagtaaagatacaaaaattagctgggcgtggtggcgtgtgcctgtaatcccagttactcaggaggctgaggcaggagaattgcttgaacccaggaggtgaggttgcagtgggctgagatcgccccattgcactccagcctgggtgacagagcgagagtctgtctccaaaaaaaaaaaaaaaaaaaaaagcagtcccagctactcaggaggttgaggtgggaggactggtcgagcccaggaggtgaaggttgcagtgagcgatgatcaggccacagtactccagcctgggtgacagagtgaaactctgtctcaaaaaaaaaaaaaaaaaaaaaaaaaaaaaattatcagtttattatcaaatttgtagaaaaatctttgtatccatttatcctaatataaatgttatgtctgacatatcataagcactttatatattggattttattattagcttttcctttaaaaaataattgatgaaattttggacattggaaattagatccacatagtttaatttcataattcttgacatgatggaagccttcagatttattaaaactacctggtagctatagaaagatacatagctattaaaaggtacataatctagcttagaactttgaggctagaaagtatatccctttatataagagagagaaaaagaattctatcaaatgaccattctgaagatagaacatatctatctgtagacaatacatttcatggcattagacatataaaaggtgtgtgctattttttttaatggttagaatttttgtaaaatctgattcttaatattcttagttactgaatcaaatggatggatttgatactctgcatagagttaaaatgatcatggctacaaacagaccagatacactggatcctgctttgctgcgtccaggaagattagatagaaaaatacgtgagttaagattctttacctactgtccatttccctttgtgcccatttctttttccatacttcacttcaccttccactgtattttaaaaaagataaaactggactataaaataattttttattttcagatattgatttgccaaatgaacaagcaagattagacatactgaaaatccatgcaggtcccattacaaagcatggtgaaataggtaaggaagtcatctattttatatgtatttacatttggtaaatgaagaaaaatacttttagaaattactgatagtttcctaaatctggttttaaattcagcaaatgtggtggttttaaattcagcaaatagttattgagcatctactataagctaggaaccattgtaagtgttttgtaagggctgacaatatagcaaggaacaaaacagacaaatttctgccattagagaacttatattcttgttaggaaaaaacagataaagttagtaaaacaaagtataatagatgatgataagtgctatggagaaaaataaagcaagaaagtggggggcgggcatggtggctcactcctgtaatcctaatggttttggaggccgaggcagaaggaccgcttgaggccaggagtttgaggttgcagggagctatgatcatgtgactgcactccagtttggcaagacgctgtttcaggggaaaaaaaaagaaaagggggataggaaattagggaagtg

SEQ ID NO: 12352 - DNA, 2300 bp, Homo sapien
gtggatttttgaatattattttaaaatagtacacatacttaatgttcataagatcatcttcttaaataaaacatggatgtgtgggtatgtctgtactcctcctttcagaaagtgtttacatattcttcatctactgtgattaagctcattgttggttaattgaaaatatacatgcacatccataactttttaaagagtatgattcaacgtaatatttgctaatatgtgactgggttttcttggtttatgtaagacgataggtccctgttgaggatgtggaggtctggaccctcttccaggaaaaattctaacatacaattttgcgtatactataatttcaggaaatttattgtttcccaagctcatccaaggactctttaggtatgtatggatacctggctaagagtgtatgatgtaggggatgtaggagtgtcagaaatgttcaaaacatgatttctgttacctatacatgattcttatatcatctggcaataaaagctataacaaagtacacaaaggaatcatcattgggcatcaataattattaaagatgctggtgaaaagaaaagacaacttcagtttcataaacactaaagaaccaaaaatacatgacctagctaattatacaataattcttcaaattaaaaacttcctagcaggatattatgtgcctttttataattttagaagatgaacagttaaaatagaaaatggagtggtcaagttagccatctcatactcaaattattgtacagttctatttctatgtgttggcagtgcattttatgtgacaaaaagtagaatgtagggggaggtttaagtcaaatatctatgtgatcttttcacttataatttgcatttagttaaggagtgactatcttgccttttacctttgtgctggcggtggttttttaaagaatcaatttggtgtacaaatcctttctttctttttttatttttgattttttttgagatggagtttcgctcttgttgcccaggctgtagtgccattgcactatctcagctcattgcaacctccgcctcccggatttaagcggttctcctgcctcagccttctaagtagctgcgattactggcatgcgccaccacacccagctaatttttgtatttttagtagagacggggtttctccatgttggtcaggctggtctcaaactcccgacctcaggtgatccacacgcctcagccgcccaaagtgctgggattacaggcgtgagcctccgcgcccggcccaaatcttttcaccatgggtttacaggcataacgccaccacacccagggaattttaaaattgttttttagagaggggggtcttactattttgctcaggctggcaaactccttttaaaagatattgaaagccatctggtttattatttttatttcaaaatataataatggaagaaattttacagtattatatacaatttactgagtcagctatcagttcctttttctgatttttttctagttgccattcttgatattttctaggtaatctaaactgagttgtattttcaagtactcttaaaatactttaaaaaattttaaattgagccgtttaattctttgcttaaaggtgatgggtattttattttctgtatggcaccacgtgattttaaattgaactcttcatttattagtcatttggttataaactcagcatagattgcgcagaattttgagaggggagaaactatagctttcctttcggatgccactggtgggtagcctgttttgcctgtttgttcttatgttaaagaagggctctacgtcctgtctggaaagggcggagctggctcggaccgccccactgcctttcccaggaccttcactcgtcctgtcccaccgcagccccgcctcctccacgccgggtgagctgtggcctagcagcatccgaggctccgccccccccacccccaagcgtctgcgctctagcgaaggggcggagcagggcggtggcgcgctgacacctggcggcggcggagggcgggcagaaggcgagcgtgggctgggattggctgaggcgacgcgggtggagggggcgggaaggaggcggggagacggttgtcgggctggttcctgtgctggatcctgggcggcctgaggggtacggagactctgggggagggagacggcagcggcatggcggccgggtgtaagacgcccgaccctcctcttccctgtcttcgccgccgccgctgctggagtcactgggaccctgtagtctgcgtgtgttagttgtaatcccgccgccctcctgtcagccctccgctccg

SEQ ID NO: 12353 - DNA, 2300 bp, Homo sapien
atagctgaggaattacaattcttcatttccttataatagggaattttgtattgaattctatttgaccctcctgagaatgaggaccatcattctgattctcattgtttattttcattcactgaatttctttttcccattttagatctctatctggaatgagaccatagaaattaacaatatgagagactattagcctcaatttttattcctgaatttttctttgcatgcacatgaattagatgagaaaccatgttatttcagcaatagtactgaaaatccatttgaggggaagtatctttgcacctatttgctatgtgacttggaaaagttacttggaaacagatatgtttttacttccttgcaaggtgctctcaaagcaaacaagagcaagtcatgttatcacaaaacactttccatcacaaagggaaaattaaaatatattttgtaaaaatattttgaaagcaaaagactaaaaattctagaattgagccatgtaaacatgctcttgttaaaatgtgcaaaggttatatttgaatatctattgagtataaaagttaaagagatctatttaaagtaaatgaagaaattgaagttttcattagtcatggaagtggcaacatcagccatttacttgtattttaagtgttgttcatctaaaatagctatattagtctttattttgctagcagatattttgaatgtgtaggttatattccaattgatactaattgctgatatttcaactacttggtaatattttctttagaaatggaaggtaaattactatggtaaaacagctttaaacatttagtaattaagtcagctaatcctaatatttttctggctccccataaaattgaatgtctactatgtaacactttgttatccaatttccacagaatcttttgagcatatgaagaaatctggggattattatgttacagttgtagaagatgtgactctaggacagattgttgctacggcaactctgattatagaacataaattcatccattcctgtgctaaggtatgtgctgcttataaataaaatggacagctgttttctagcacaactgactttgagtttccattagacaaatctgttttctcattgattttcagtgcctcttagaaatcccttttcccagtgtgttctgagagctttaagaaagaaaatgtataacagtatgaattgtatgctaaaattgttctgtaaggtggatcaatttggtataggcatagagaaaccaaacaacttagcagtaatgcacaaaatccctaatgttactcttttaaaaaaaacaactctgaatataccacgttagcataaatttgtttccacatggtaaagggttcagattattccgttctaattatgatacatctaatgcatgtagtgccctttcatccctcaataactcacataaaatagtaaataaaaaaagagggagagaaaaccttaattcaatgagaataaggtaggaacacttgggatgtgttctgtcacacttaggaatttcggtggggtttctgtactagacattaattttatttggatatctaaaataacttgctagtaagcaaggagtagaatgatggatatattcatgaaaaggttacattttggtgatgttgatcctgatatttgtttaaagacaatggggtgggaaggttggggacatagccaaaacaagtttaggtcacaacttgactcatactatttcctctaataagtaaaaacatctttaaattattaacttttaatagtagtactctcatactagtaggaaacaaacttttgggctaatcagatttgccccagcttctctgtcatatttaaaaacaaaggaaatgttcagctattacagaatattctatgatctctccttctcataagttgtagaaatacatactgaaacagccttcactgtataatattttttgcatttgatttctgttaagttcaagtttacaaaatatactacttattatcagtaaattcttaccaactcgttttagctaaaaacaaaagtaaatgcttactcctttaaacattgtaaatattttcagagaggaagagtagaagatgttgttgttagtgatgaatgcagaggaaagcagcttggcaaattgtaagtaggcagaaacaaggtaaccctggataaattttgttccaatttagtttcttaacaagatacttgtttgaagttctttttggcttcattaattctgaacttattctcactctaatagtttagactgaatttcatgaagaaataaagtattattatacatatttt

SEQ ID NO: 12354 - DNA, 2300 bp, Homo sapien
cagcatttcttctaagaatctagaaaaataaataaaaatcaaccaaaggacataccaatggttccattaaaccagaagttgagactgtctcctggttatcttgggctcctcattgccaagtgaacctacaggcaaagaaaggggttaactgtactggccagagtaatcgaccttgtctattaaggagaaattgggttcttatggcccaatgtgggtaaggaggagtatatgtggaaagtatgagatctctgggggtacctcttacaagccttgtgttctgtgattttagaattgcttatgtttcactttttgctaatttataaaacatacagcagtttgttgtacaggataaactcactgaaaacatttgaccagaagtctgataagaaaaacggggagggccatatgcttaagattagtggtgtgtacataagcatttttttaaatttttgtttgttttgagacagggtcttgctctgtggcccagactggagtgcagtcttgcaatcatggctcacagcagcctctgcctcccgggctcaggttatcctcctacctcagcctcctgagtagatgggactacaggcacatgccaccatgcctgcctaattttcagtatttttttttgtagagacaggtttttaccatgttgcacagactggtctcaaactcctgggctcaagagatccacttgcttaggcctcccaaaatgttggaattacaggtgtgagccactacgcccagccatgagtgtttattttatttatgccttacatattctttttttttttttttttttttttagagacagggtcttgctctattgtccaggctggattcaaccttgtgggctcaagtgatcctcctgcctcagcctctggagtagctgggactacggatgcataccaccacattctgctcatgccctatatattcttttgtatgtatgggtgtaaaaacagagataaaaacagagatatggatgccatcaactcactgatgtttgaagttctgagaaagcataaatcagtaaaggagttaactgaaatttaaatctcacaaatgagcaaaaaatatgatttctggtatatgatctatggggttctttgaatactattgcttaagaataaaatactttgcgatttcaataaattgaaaattatggtacaaggcaaggaaggggagctactagctatgagacttttgtaaattatgtaacatctctgaacctctgtttcctcatctgttaaaatagggacaaagtgctacttaggtaagacacttcagaaatggggctctgaaaaaagtcacttttcttctcctaacgaaaggtttctaaacctcagcactccagacatttcaggccaggtaattctttgttgtgcggcgctgtcctgcgcactgtaaggcgtgaagcagtattcccggcctctactcacctgtgccctccaccatctgtagattccaatgacatctcaccccagatgagaggctgaaaatgattcatacattgccaaatgtctcctgggaggcaaaactgttgcagtggagaaccgctgtcctaaccccatgttcatccaataaagggtttgagggactgagaaatgaaacaatagtcccgaaggagtagaatgcagtggccccaactcctagtttcatgaaggcaggaactgtgactcagaggcctggggatgcggagctctgaactgccagctggtaggaaaagtcctaattaatggattgaatcatgaagggagggcaacaaggaacaaatggagagggccagtggccgagccttcggtctcaggatcaaagaggcccacactggtcaccacttacgctgctgggctgactgctaggtagacgtatctgcagataaaccgagacaatgacgcggtgggaaaggccttggggagcgaggaggaggagccgggagaggccagctttggtccggcggccaccgccccaggcgccgcgactcgagcctcaggccccgcccctcgccctcctggtcccgcccccgctctccgagccccgcccctcgccctcctggtcccgcccccgctctccgggccccgcccctcgctctccgggcctgggcgggtggcgccttggcctccgcctccgctcgcctgcgcgcggccctgcgtgagggggcagaggcgaggtggaggcgttggcgctgccacgtctgggccgcggttcccaactgtggcgcgggcggtggaggaggaggtggggctggcgctgaagccggatccggatccggtgctgtgcacactggtgggggagagtccgac

SEQ ID NO: 12355 - DNA, 2300 bp, Homo sapien
ttatctaattttgctttaatctttgttaaggaataattttaaaacatactaaaaaggctcaatgaaatgcccagaacacttactaattccttaactttaagtataatatttattatatgggtctaaaattatttctacctaaatgttcagaattttaatgacagaatatttgtctttaagtctcagaggttgtgtaagcctagaaattgtttatcccgtggtcatatgatgtgggagtagtaaggaatggaggaaatgctgccctggggaactgtatggaatgtagattgtaagttaaaaagagaaagtaaagcaagtgctaatttcatttttcattcgtagttttttaaaattatttatacagaatcttgtttctaaaagtgaacttatttgccttcaaaggcaataagtaatttcaaacctgaccaattttatcatttcacagtaaggtatcagggagataaaagagcttaaacgagagctgccacacattgttttcactgtcaactatttgttttctcagaagccttttaaatgatagttcttgactagaaactatcaactgaagatttatctttaactgacaggaggacagtttgtgtgtggtccgtggttaaagatccttctggccttgcctttcatgttgccatctaatcaaatgcacatttttaaccctcctttctctcactagagctataggttagattttttggtgtgtattttgttctctttgaggcagagtctctctgtctcccaggctggagtgcagtggcaccatcatagctcaagcgcactgcagcctccatctcccaggctcaagcaatcctcccacctcagcctccctagtaactagaaccacaggcacgcactgccactccaggctaatttttgtattttttgtagagatggggtctcgctatgttgcttagactggtctcaaactcttgagctcaagtgatctgcctgccttggcctcccgaagcactgggattacaggtgtgagccaccacactctgctggaatagacttacaaattgttggccaggcacagtggctcacgcctgtaatcccagcactttgagaggccgaggcgggtggatcacttgaggtcaggagtttgagaccagcctggccaacatggtgaaaccccatctctactaaaaatacaaaaattagccaggcatggtggtgcacgcctataatgccagctacttgggaggctgaggcaggagaatcacctgtacccgggaggtggaggttgcagtgagccaagatggcgccattgcactccagcctgggtgacaagagtgaaattctgtctcagaaaaaaaaattgtttccagagaatagcgaccatgatgttattgccctggtgcctagtaagtagtgacattcagaagtttagttgctactgtgtgtcagataccacactagtcacactggacatagtgctcagtaattattaagctgtatccagttgcgttctggaggctgtaggaagatgtgcaggccacaaggacattcttccctacctgggcatagactcgtagttttcttttgggtctatcaaaataacctgttgtatttaacctactttaattcccttcaattatatatatattaactaaacatgctgtgggtatttttaaataaatatgactctcaaactggatttttaaattttgaagaattattctatatgttgatttatgttaatctaaatggaaatgactaatgccataaagccgaaattcctcatgtagtatacggcatctctttgttttcccttccaggaaaaaggatgcaaaaaacacatggtaactgaggggtttgcttttcttgtgtaaaaaaagaaacagatgggcactgcacttattttatgccttcaaattcttatttctgaaaagcagtgcatggatcatattatctgactaaatctgagaagactttaaaggcttttggatacttttattttgctactaaaataattggctttaccttaaccggtgagaactgggtacacgatgtaactgggtacacgatgtagggggaaagaaatatttgctctttttatcttctccctacaaatttctacccttaggttctttagcaacatttaacattctaaaataatgtggagtgtttctcagtgttctaaatggaaagtaattgctgcttcctcattttcatttttcattcttgcatttactttgcttggtttctacctaaagtagttttttgcatgacttttggctggaattttggtttgcaggtgaccgcaactttttctttgcttcgtt

SEQ ID NO: 12356 - DNA, 2300 bp, Homo sapien
aacatttgttcttctgaatatggagtgtgtatgatcttatattctgtgccaagaggaattgaaaaagcaagccctactaacaatttaaaattttcttcgtagagcctactgcatgatcatatgacattgtgctttgttcatgtcattcttggacaattggaataagctttaggaagctttgacagtgtattatcttatttatccttaaatcatccctgtgaggtagagtccaaggtcaggaaatgtcgacttacagaagttaaatggcccataattattattaataagtgacaaagaaaggtctgcaacccaagtctctctgactgcagagctctacttcactgtatttattatactgttactacttgtttatgccagctgttatgccattatctaacacctagttcagtaaatctgcactcccttctgtaaagcctcctacaaagtgaaattctgaagagagagtttcgcttttgttgcccaggctggagtgcaacggtgcgatctcagctcactgcaacctccacctcacaggttcaagtgattctcctgcctcagcctcccaagtagctgagattacaggtgtccaccaccacccccggctaattttttgtatttagtagagacatggtttcaccatgttggtcagctggtctcaaactcatgacctcaggtgatccgcccgcctcggcctcccaaagtgctgagattacaggcgtgagctaccacacctggcctgaatacagttgttttcattccagcttcccaagtatatgtgtatgttaccttctgcagcagatgccttcataaaatactatggcaaaatccaacatgttaagatgccacagaatgagggctgcttgtattgacttgagatttcttaaaagtaaatttagccattttaataaaaattttttgttacaggatgtgaagttaccccagatgtaaacatttcaggccaaaaatttaacattaaactcctgattccagttgcagaaggcatgaatgaaatctggcttcgttgtgacaatgtaagttttccagttaaaaatacacttcaattttcttaaatgagttgaccagtcatccttatattttatacttgaaagacccacctcgtgatacattgcacacatcagtatttcttttctccaggaaaaacagtatgcacactggatggcagcctgcagattagcctccaaaggcaagaccatggcggacagttcttacaacttagaagttcagaatattctttcctttctgaagatgcagcatttaaacccagatcctcagttaataccagagcagatcacgactgatataactcctgaatgtttggtgtctccccgctatctaaaaaagtataagaacaagcaggtacttacttcattttacttcatctactgtgctggtttgtttttataattttgtacataactttgtttttcccctcttaaacaaaactttttagtcttaattttgtatcagatggttagaatataaaatacagttagagtatccctaatctgaacctctgaaatcctccaaaatctgaaactttttgagtgccaacatgactctcaaatgctcattggcacattttggatttcagatttgggatcctcaactggtaagtataatgcagatattccaaaatccaaaaaaatctgaaacccaaaatacttctggtcccaagaattttggataatggatactcaatctgtagaaaataaagtaacctttagtcagtttaaattggtcattaaaaaaaaaaatctttatcattttaatagaacagataaggacacagaatagttgagaacttactctaaacaaattgcagaaatcattctgttaacatggtgttctttcagacattttagggaattgaatatggtctcaatgctttgtgttccttaatttatttaattttattccatatataattaagtaaatgtgacataaagtgcagccagcatttctcaacaaaatctgtaatacctgctcttgttgaaattggcttttccagctttagaaagaaactttacaagagtacatttttagccgtgtcttttcttaacattttcagtcagaacctaaccacaattttacacatagttacacagtttggtaaattttcattgaaatttgcttttgttcactctgtttagaattcttttctttggaaattaataccataaaagggctgctacttaggaaaatggttctttggtacaacataaaaagtcctttacaggggaatttcacttggtataggccctggtattctctgcccccaa

SEQ ID NO: 12357 - DNA, 2300 bp, Homo sapien
cctcagcctcctgagtagctgagactacaaccatgcaccaccacacctggctaattttttatttttttaagagatggggtctcactgtgttgtctagtctgatctcaaactcctggccttaagcagtgctcccgccaccactgggaagtttgtttttaaagtaataatgtattagtctctagtgcattcaatacagtaagaatagatctaatactctaatactctgcaaattcttttacaagtggtgggaagacatttctgcagaggaaaataatctcaagtcatggtaaaaatccacttagtgatgtgcacatttgaaatactacaaaaagaagaaaatagatctcgggaaaattgtgaaacactgggtttggtttttaagtatagggattagttactgctgaagaaacacttcaggccttttacaatgtacagatttatatgcacctacaaacagtttcagcactattaaagatagcatattctcatgggttgtataaattgccattttgatgaaaattttgttaaccttttatgctatttgaaaatgcctttgtaccaagaagaatatggtccacaagactatgtaatgtgattttgttgtttaaatctttatcattgtattttatgtcattctgtttattaagtaagctagttcttgatatcagataccaaacattagaaagaatttcaaatattaaaaaaattaaaaaaggatttaactctctcctagggtgacattacttccattcctgaacttgctgactacattaaagttttcaagtaagtacaaaaaggagggatgccaaatattaataactgtcagctttatagtcatggtcacattattgaaactaactgttaagtttgactaacaaacgcatctactgtaaaaggatttaccagttaggtgaacaccaaattaccacgagagaaaataaccacttttacaaaattaaaatcacaatgctcattcttttatcagatttttctttaaaaaaaaaaaaaaaagattgtgaaacctagattgcatcatacagatgctgaaacatagtaatacagtggcacagcccctccgggcctcagttggaagcagtacataatgaactgtgtcactgccagcgattatttcctcgttcagagcgcaagattctattgaactctgttcatttgttcatggaacattttatgtaaagttctagtatatctgatcaagatttttaacactctatccagctatattccacagaatcaagagagctcggcattaaggcagagaggagaaaaaggaaaaggaggtgatgtggaaagtactattttctactatataagatacaaaactactctagaataaaccatttaccatagctgaacatacagcagttcaaaatatggaacttctgagataagggcatgatttcagatccactaccctaccctttctccttcccccttgacccacctttctcatctacctgcacctttccttacacatcctcatgactgctctgtcatcttccttctgtgtttgatattggagtggcaagttaatgtcaccattggaatttaccccggagaaagaagcacatcccccactttcagtcctgccaggtaaatttgcatctttatagaggctccaaggcaatcctgcagacacccataaacctgcaggtaattacaggatctaggaattttccaattactgacatttacttcacctttcttttcctacccttcccatgtgacctgctagttagtgatagatgtgatggctacagctgcagaatactggaacacaggccctactgcctttctcctcggaacgctgtttgtgggatcttctagagtagattgagaagggaggctcgcatccagtaacagtagcactgactaataagacgctgaccaagggggatcaatttcagcacgtgtaaaacttgaccccagacttaaattaatattgtgaaactttgctaatacagcgttaataaagttacttccaagtgattttgttgttaattctctttgatacataggccaaaaaagctgactctgaaaggttacaaacaatattggtgcaccttcaaagacacatccatttcttgttataagagcaaagaagaatccagtggcacaccagctcatcagatgaacctcaggggtaaggagagcctggcacggctgttgttgatggtggcatccccattggcctaatagtcaatgagccacttgctgggataaacaagttttttaaaaaaatcaatttctttactcctttgggtacttgaaaaatgtttaga

SEQ ID NO: 12358 - DNA, 2300 bp, Homo sapien
ttcagtcagtagctgctgtatccagtgtctatcatcgtgaatgtcatggcatgtacagagaaactgaaatgctggatgcaattctaggtggtggtgtaaagtttttgagttggcagaaaataaagaataaaagaaagaaaaaacttccgtgatctcaagacccagagagcttcttaacattttgctgtatttccttacagtctttttctctgaacatttaacgtaaataagctcttaattttatagctgcatatccagttctgcagttttgtgccctaacaagcaattccttaatttattaaaaacattttcctgtatattttcaaccccataatttacataaactccctcatctccggacattcatattgctttcaagtgaactatttggaacgtccacgagtagaaatattggagagtagacagataagagactgaaggcatcaatttctccatgataactagctaaaaacactgtagtggttttccctatttttttttctgccaagcctttggcatctgactaaattttgctgctttcactcctttctgagttccacccctttcttgaggcctctcatcttgtttcccagtaatgttaatgaacaaaaggttatctgcctagcgagttccttttccaagcgtttgagacaattcgacaagattatgagactgcgaactggagtcttttatctttaaaaggtattttaatctgagccttcttgacgtttattttctgagcccatgaatttgctagcgaggcagtttctctggtttgctgtttctgaaaggagttccctcaacagagtacaacagttaatgggggaagtggaaacaaaagcgggaagcaggaggaccgttccccatcactagccagtcttcaacaggtgaagttgtttagctcttcctggtacctgcaggcaccgttccagaagtattaaaatccaaggtgtggctgagggtgggatggaacatgtatctccatctaacagctttaatagactgttagttctaacttgcatataaaaacacacaaataagtacaaagagctggagaagctggggaaacagtttctgagtaaaacctgtggcactaggttgtgtctttcctttcccctcaggcaagagcatcatctgtttgactggcatctggctggagcgtccgaaggggttaagaacgcttgcaaactcctgggagtccagtaggagttgctgatggtgccggacattgcttgcaaagcaatttttgtggttcacctccctcggggttttcttattcttttgtaggacattcaaggagttggtttgggcatttactttttaaagtttctccgtcccagactcctctctccagctcccggggtgcggcacctctcacctccctgaggctttttgtctcgctgcaggcgtggggagggggcgagaggactttgttctccgaaaacgaccttgccctgggaatttcctggggccgtttctcacggacaagccccctctccctgctgccagcgcggacacacgccgcgggggccccagtccagcctgagctctagacgccccgccggccaccagcgccccgggaaaggccgcccgcgctcccccgctccccctcctcagggcccgccgcctagagcccggatgttggattcaattcctgagccgggtccttcatttccataaaagggcagcgctccgcggggccgagattgccgccccgccgcgccccccgccacccccgcgccgccccgccccacgccgccccgccccgcccgggacccgcagccccctcccccgagcgcggcgccgggagggcgggggcagaggcgaggccggccggacccgctcagggcagctctgcgggcggcgaaggagggagccagcgcgcccagcccagccaggctcggacagagggggcggggagagggtggagcgcggggagccaggcgaggggccgcgacgacgggactccattagccgctccggccacaggcagcgcttcgccagccgaggaaccggacgcggacaccgccgccccgcgagcctccagcccctcgcctgttgccgcgcgagtcccgggcccggagcgctaggagcgcgcggtgagggagcgggaccccgccgggacccgagggggcgcggcggggaggggaacggggagtcagcccgcgctgtgtctcggggccggccggcaggtgaagccctccgcggtccgctaggcggggacggtgtggggcgggcggcgccgggaccgaggaacgctgcggggcgagcggggcgtagggtcctcccgcagccccggc

SEQ ID NO: 12359 - DNA, 2300 bp, Homo sapien
gtttctttgacatttgtgttggtttgacaccagcatgttttccattttctctgtaccaagctattgtgaatttgtggacaatgaaaataatttgaaatctctgctcttaaagaactcaagttttctttagaactatttaaaaaacaccaaaggaaacctctgaaaatcctgtccatcgttcagtcagtagctgctgtatccagtgtctatcatcgtgaatgtcatggcatgtacagagaaactgaaatgctggatgcaattctaggtggtggtgtaaagtttttgagttggcagaaaataaagaataaaagaaagaaaaaacttccgtgatctcaagacccagagagcttcttaacattttgctgtatttccttacagtctttttctctgaacatttaacgtaaataagctcttaattttatagctgcatatccagttctgcagttttgtgccctaacaagcaattccttaatttattaaaaacattttcctgtatattttcaaccccataatttacataaactccctcatctccggacattcatattgctttcaagtgaactatttggaacgtccacgagtagaaatattggagagtagacagataagagactgaaggcatcaatttctccatgataactagctaaaaacactgtagtggttttccctatttttttttctgccaagcctttggcatctgactaaattttgctgctttcactcctttctgagttccacccctttcttgaggcctctcatcttgtttcccagtaatgttaatgaacaaaaggttatctgcctagcgagttccttttccaagcgtttgagacaattcgacaagattatgagactgcgaactggagtcttttatctttaaaaggtattttaatctgagccttcttgacgtttattttctgagcccatgaatttgctagcgaggcagtttctctggtttgctgtttctgaaaggagttccctcaacagagtacaacagttaatgggggaagtggaaacaaaagcgggaagcaggaggaccgttccccatcactagccagtcttcaacaggtgaagttgtttagctcttcctggtacctgcaggcaccgttccagaagtattaaaatccaaggtgtggctgagggtgggatggaacatgtatctccatctaacagctttaatagactgttagttctaacttgcatataaaaacacacaaataagtacaaagagctggagaagctggggaaacagtttctgagtaaaacctgtggcactaggttgtgtctttcctttcccctcaggcaagagcatcatctgtttgactggcatctggctggagcgtccgaaggggttaagaacgcttgcaaactcctgggagtccagtaggagttgctgatggtgccggacattgcttgcaaagcaatttttgtggttcacctccctcggggttttcttattcttttgtaggacattcaaggagttggtttgggcatttactttttaaagtttctccgtcccagactcctctctccagctcccggggtgcggcacctctcacctccctgaggctttttgtctcgctgcaggcgtggggagggggcgagaggactttgttctccgaaaacgaccttgccctgggaatttcctggggccgtttctcacggacaagccccctctccctgctgccagcgcggacacacgccgcgggggccccagtccagcctgagctctagacgccccgccggccaccagcgccccgggaaaggccgcccgcgctcccccgctccccctcctcagggcccgccgcctagagcccggatgttggattcaattcctgagccgggtccttcatttccataaaagggcagcgctccgcggggccgagattgccgccccgccgcgccccccgccacccccgcgccgccccgccccacgccgccccgccccgcccgggacccgcagccccctcccccgagcgcggcgccgggagggcgggggcagaggcgaggccggccggacccgctcagggcagctctgcgggcggcgaaggagggagccagcgcgcccagcccagccaggctcggacagagggggcggggagagggtggagcgcggggagccaggcgaggggccgcgacgacgggactccattagccgctccggccacaggcagcgcttcgccagccgaggaaccggacgcggacaccgccgccccgcgagcctccagcccctcgcctgttgccgcgcgagtcccgggcccggagcgctaggagcgcgcggtgagggagcgggaccccgccgg

SEQ ID NO: 12360 - DNA, 2300 bp, Homo sapien
gcgagactctgtctccaaaaagtaaaaatctgtctaagacatcttacaaggtgccatcgaattaatgaaaacacttcatttatctgattattaaacgtgtgttttggttaatttagggctcatgagataaagtaccttagagatggtctggttatgttgcacctgtaatacaagagtgtaatgtaaaaatattattcccagacagttagtacaagagacaggagtctactggactttcaaaccttaaccaattgtaataccagtaacctagaaaccataaatcttaaaaatcctgctctaaatacttttttaatctaaagtatgctacaatattggaatgtattttgtagactctctgaaaaatgaaaatattcaaatactgaacatcaaaataaaactttattatagcctaatagaattgtaagatgttggatttttctattctctattatgtttatgctgtaaatattttttttaatggaagcactccaagaaccttgcatcctgttaaacagtgtaatgccaagtaagattttcagacaagaaaaatgcccccttaatacttctttgggacaaggctggtttaactaaatattaaactattttaaatagcatttattctctgaaaaaatagcttcatataattgtggaaagtcttttaaaggatccttttagctagtaccaaataaatataacattgactaaccattcgaattttagaaaatctctcatatgttaaagacttacaactgccatattaacttcactgaactggaagtttaatataagattcaaatacaaactgcacaatcctgggcaagttatttctgagattgtatcttatctgtatgatgtagatgataatattttgccttctaggattgttaggattaagtaaaatatatatacacccagctagacaataagcatttcattaacatatactcattttattcattgtctcgtaacttgaaagtgaatttcagttcataggtctgctctgagccctgtcctttgtataacttaaactttgttgtaactttaaaggaggattccaaactcttaaatttttattattcattttatagtttttctgtgatttttaaaaaaattaatactttgttaaatagtttacgtcagaacggtgcaaggcagtttttacaaatgttatctgttctttctcacatctctgtaagagaggaagtgttacctcctttctacagctcaggaaactcagggctccgagacctagtgacttaacaagcatcatgcaattaataagtgacagaggctgggcgcagtggctctctattatcccaaccctttgggaggctgaggtgggaggattgcctgagcccaggagtttgagaccagcctgggcaccaaggcgagaccccatctccatcttaaaaaataaaattttctaaaaatgtaaattaaaaaataagtgatagaaaccagaatatgaatttgggggattctgatgccgtatccattgccttttctgctgtctcattgctacttcacatcagacagatgctcttatgctggcatctgatttatgctgttactgtatcaatctattttaaaacagagcttaaatagagctcctaaaatattaaaaattggccttatttgctgtttcccaggattaccatctactacttcaactttgctcctaagactaaaataaatctaattgttacatatcagaacataataaaaatatttctctgaaaaactaattgatagacactattagcctagactgtttttcataatctcatcattagatcaagtgcatattaacagtgaacaaatagaaatacatgtttgaaatagctattgttttttaattaaattccttctcggaggtttacttaacatgcagtagagtaagaacagtttactaaaatccaagcattgtgatttaacactgtgtttctttgaatttttttttttaaatcaaggcttatagattagaaccattaatactgaaacactacagcaacatttcacctgtccagatccactggtacaatacttcaaatcctttaccttatgaacatatgaagccaagctttctcaacccagctaaagaacctacctcagtttcagagaatgaaggcatttcaaccataccaagccctgtgacctcaccagttttgtcccgccgacactatggagaatctataacaaatataggcaaagcaagcatattaggtaatttctcttatgtattccttatctatgcatataagcactttcctagacataagtttgggggactagaagtattc

SEQ ID NO: 12361 - DNA, 2300 bp, Homo sapien
gaagtacaattcctcataatgtacttgtatcctagtggggaataggttttcataaaaatgtcttatgatcatacatcttgaccagagctatatctttttatatttagcttgaggttattttcagcccatctttaaatcagtagagttagactctgccagtagctaactctgtggcaggtcagtttgtctctttgtacctctgtatttttgtaagtaaaatgggagataatattttgccttgaaagaattttaagaaaataaatcaagcatagtgatttgaaggtacttagctttctgaagatgggtatgttaatttttcctacctatataccagagctataaaggaaaagcttaaggtcctcaaaacataagaattatcaaattatgaattgatggatatgttatatcaatttcttcactacttccacaaacattgctgtatttgtggtatgtgccagacactgtgataggacattctgtttggtgctagggatatataagaaatggtcaagacacattccctggctcctggggcttacgaattcctaaagaaaataggtttggaatttttttaaggcctcattttcaccaagcatatccccagttacagaaatgcagcaaccatactgattttttttttttttttgagacaggatctctctgtgttgcccaggctagagtgcagtggcatgatcatagctcattgcaggcttgacctcctgggcttaagcgatcctcctgcctcagcctcccaagtagctggaaccacaggcacatatcaccaagcccagctaattttttagttttctttttaagagacggggtctcattattgttgcccaggctgctatcaaactcctgggctccagtgatcctcctgcctcagcctcccaagtagctggaaccacaggcacatatcaccatgcccagctaattttttagttttctttttaagagacggggtctcattattgttgcccaggctgctatcaaactcctgggctccagtgatcctcctgcctaagcctcccagagtgctggattacagacgtgactgactgcacccagccaaccatactgatttgaacatcatggcagaaaaacatttccttaattttgtattactaaaatatctttcaattttggatttctgctatgatgagcaatatccaataattattggctttactatccattccaaaaatacctcattttctaatagattatttttttcccagtttaaaggtaaatttttttcccctctgagtcttattttgtctagtacttagtgaaatttttttcttttttttttttagacggagtcttgctctgtagcccaggcgggagtgcagtggcgtgatctcggctcactgcaagctccgcctcccaggttcacgccattctcctgcctcagcctcctgagtagctgggactacaggcgcccgccaccacacccggctaatttttttttgtatttttgtagagacgaggtttcaccgtgttagccaggatggtctcgatctcctgacctcgtgatccgcctgccttggcctcccaaagtgctgggattacaggtgtgagccactgcacctggccacttagtgaaatttttacaaatcctttgatatttttagtaaaatcagtagaagaaactgaaattaagttgctctgtcaaagctattgagggcttgaggtatatatgccttagacccagtgaagagtcagccacatcacccgggaaagcagttaattatcaaaacacatagaagctgtatattagaggttaaaattatgatagttaagtaactcaatggtttaaaaagttgccattccctgtagcaggattaatcatttataaaataaagtccctatccattacttgcttcacataactttttttatgtgaaatagtgttttattgaattaagttccatatctgagttttttagataacatattgattttaaaatctgagtgttataattcttcaaacaaataaagtttgtcttggagaccttcaaattagcttttcctttttgcaatagctgttcatagtttcaagttgagtcgaaaccatgtggactggcacagtgtggatgaagtatatctttatagtgatgcaacaacatctaaaattgcaagaacagttacccaaaaactgggattttctaaaggtaattgttaaatattactagagcttatcaaaattttgggaatctgactttctctcatattcaaaatagacaattcatattctgtttttagtatgttttaagtatattaaatttagtgacagattc

SEQ ID NO: 12362 - DNA, 2300 bp, Homo sapien
aagagggtcctgatcttagatgctttcagtcagagctgcagtatacagttggataggttgttcactgcacaaggttaaccagctaagggcactaattggggcagaaaatccagcctgtattctacttgacaagccatcaactccaacaccgctctgtatctgcccacaggaagcaatgccttttttcaaattcctacaaaggccctgtacaaacttcagatagtcttgatttaaataatgacagagtaataatgtctgacaggttacatctcaggagcaagaaaaattgccctaccaatctgattccaccagagagtaaaagaaatagtgaagactgtctattcttaaaatgaaaacactgaggttggagatggtttttctctggattctcaacatagggtgatgtgcttacaaaataattttttttaaataaaaaagacccacataagggagcctctgtattcaacttgatcccagaatatgagttacagaatcagagatgcataaaaatctggaagaaaccttaaagttcatagaattccattgctagaaggaactttagatatcatctggtccaagaatcttaattttacagatgaggaaaccaaaaagatcaggaagattatgtgatttgcctgtggatggttagcaaagctaaatctagaacctggttgttttctacctctcaatcgaacactctttaccacagctggttggacttgacatcattataatcaactaagactgattgcgcacccactgtgtgggagaggctgacatggacttggtttccatcaagggcctagcaatgaggttgagaaaacaggaaatccaagcatcaaaagataagtaataatatgagatggcatatgaagcaaggtttagattccagtttcccagtgggagtggtgacaccaaggtgagtgatgggtgtggggtggagtgccctcgtatccacccacctatgcgtcctggttctgtctggaggcaccagggccaggtgacaaaacgtccaggcgaggccgcagtagggcctaaggtcaaaaagagcaatgctgaatcctacatcctggggccctcctaacacgtagcttaaggctctgggctcatgacccacattgtaaggatgagtggggtaaagcctatccacatctgggctgtgaattccagaagcgggggaccgaggcagctgtgcatgaagaccgcaaggaaggaggaagggagccgaggaggcccaagagcggcgggcgacctgacaccaccctgccctcccagccagaggggcaggggggaaccccgcgcgcggcgccggtgcagcccgggcttccggggcggcgcacgcggccggggggcggggcgggggccgaagcaccgcctacgtcgggctgcgtgacaatggggccggcggcagaacgcagctgcggcggctgcgggtctcgtgggggcggagcggtcgccgctgccgccgcagctcgggtcgggatttgaaagattagaaacttcgggtggagagggcggcggcgttgaatgtgtggcggaagcgctgggggtcacggctccgcgcgccgccggacagccggcggcgtctccacagcatgaattacccgggccgcgggtccccacggagccccgagcataacggccgaggcggcggcggcggcgcctgggagctgggctcagacgcgaggccagcgttcggcggcggcgtctgctgcttcgagcacctgcccggcggggacccggacgacggcgacgtgcccctggccctgctgcgcggggaacccgggctgcatttggcgccgggcaccgacgaccacaaccaccacctcgcgctggacccctgcctcagtgacgagaactatgacttcagctccgccgagtcgggctcctcgctgcgctactacagcgagggtgagagcggcggcggcggcagctccttgtcgctgcacccgccgcagcagcctccgctggtcccgacgaactcggggggcggcggcgcgacaggagggtcccccggggaaaggaaacgtacccggcttggcggcccggcggcccggcaccgctatgaggtagtgacggagctgggcccggaggaggtacgctggttctacaaggaggacaagaagacctggaagcccttcatcggctacgactcgctccgcatcgagctcgccttccggaccctgctgcagaccacgggtgcccggccccagggcggggaccgggacggcgaccatgtgtgctcccccacgggcccagcctccagttccggagaagatgacgatgaggaccgcgcctgc

SEQ ID NO: 12363 - DNA, 2300 bp, Homo sapien
cccgagtggctgggactacaggtgcccgccaccacgtccagctaattttttgtatttttttttagtagagacaggatttcaccatgttagccaggatggtctcgatctcctgacctcgtgatctgcccgccttggcctcccaaaatgcggggattacaggcgtgagccaccgcgcccggccttagtacttctttttttttttttttttttttttttttttttttttaacagaggataatgttaacggaaattgtgtagtcaagagttaaaatctggccaaaataatctgaccagatagttatatagttaggctacattctatcaagaaacataaaggaatagagatattttaaatgttgtgatattccttatttataatccccttcatagtacttttcatactgtactataatataatgtatctgtttacttgtctgtatccccctctaggctgtaagttccttgaagaaagaaagaactctctcccattctctcttatagtagaagttagcatagaggtgcctggcatataggtggccagacacctattcaaaccctgtagaatgaatgcttttacagctagtaaacagaccaaagcccatacccaatatcatatgctgcatattgtcaatagaaatactggaggagcaactgggaagcaggcactcagaaattttttttgagtggtaaagagggtcctgatcttagatgctttcagtcagagctgcagtatacagttggataggttgttcactgcacaaggttaaccagctaagggcactaattggggcagaaaatccagcctgtattctacttgacaagccatcaactccaacaccgctctgtatctgcccacaggaagcaatgccttttttcaaattcctacaaaggccctgtacaaacttcagatagtcttgatttaaataatgacagagtaataatgtctgacaggttacatctcaggagcaagaaaaattgccctaccaatctgattccaccagagagtaaaagaaatagtgaagactgtctattcttaaaatgaaaacactgaggttggagatggtttttctctggattctcaacatagggtgatgtgcttacaaaataattttttttaaataaaaaagacccacataagggagcctctgtattcaacttgatcccagaatatgagttacagaatcagagatgcataaaaatctggaagaaaccttaaagttcatagaattccattgctagaaggaactttagatatcatctggtccaagaatcttaattttacagatgaggaaaccaaaaagatcaggaagattatgtgatttgcctgtggatggttagcaaagctaaatctagaacctggttgttttctacctctcaatcgaacactctttaccacagctggttggacttgacatcattataatcaactaagactgattgcgcacccactgtgtgggagaggctgacatggacttggtttccatcaagggcctagcaatgaggttgagaaaacaggaaatccaagcatcaaaagataagtaataatatgagatggcatatgaagcaaggtttagattccagtttcccagtgggagtggtgacaccaaggtgagtgatgggtgtggggtggagtgccctcgtatccacccacctatgcgtcctggttctgtctggaggcaccagggccaggtgacaaaacgtccaggcgaggccgcagtagggcctaaggtcaaaaagagcaatgctgaatcctacatcctggggccctcctaacacgtagcttaaggctctgggctcatgacccacattgtaaggatgagtggggtaaagcctatccacatctgggctgtgaattccagaagcgggggaccgaggcagctgtgcatgaagaccgcaaggaaggaggaagggagccgaggaggcccaagagcggcgggcgacctgacaccaccctgccctcccagccagaggggcaggggggaaccccgcgcgcggcgccggtgcagcccgggcttccggggcggcgcacgcggccggggggcggggcgggggccgaagcaccgcctacgtcgggctgcgtgacaatggggccggcggcagaacgcagctgcggcggctgcgggtctcgtgggggcggagcggtcgccgctgccgccgcagctcgggtcgggatttgaaagattagaaacttcgggtggagagggcggcggcgttgaatgtgtggcggaagcgctgggggtcacggctccgcgcgccgccggacagccggcggcgtctccacagcatgaattacccgggcc

SEQ ID NO: 12364 - DNA, 2300 bp, Homo sapien
agcctgcagcgccacagtccccggccctcgcccaggttcactgcaaccgttcagaggtccccaggagctgctgctggcgagcccgctactgcagggacctatggtgagcaaggctacctggtgaggggagacaggcagagggggtctaggagcctccttggggggaagaagctggtcacaggctgtgaccgaggcaaaaggtggcctaattattttccaatagtggtgctggaggtggggatgctggcgctgaaagacctttaaatatcggctactgcccctgcccaggccttctctgtccagcagtccctgggagattctcacctttgggaagtgcggggcaggagagcagaaacaagagaagcccttggtaggggggtcgttgggaaaaactgtggggtcttgggctgaacgcgttgcccacgggctggaggttgcgatccccggacggaaagcgcgggaggaggaaggagagaaccggctctgaggtccagagagagtgagggggcagagcgacggcgagatggggagagaacacctagctggagcaggttctgcggtagagagcgcagtcctgctggcctctggagagtgcgcgccgctccggaggctgcgtcgaggggagtgtcacccaatctggcccccagctggcggggcgccctgagagcttgcgaactgcagttgcaggacgcgccttctccacgagctattttcgtcgacttgcggaacccaaggaacctcgcctctatcatttcacggtgtagggtccctagagacgacagccaagatcccaggggctcccaggacgcttgttcctgcggtgtcgtgtcctatggggagttcctggcgggacgaaaggcggacgcgcggctcttcctggccctccaggcccggaaccgacgggaaaggttcccgtgattcccgagtccctgcaggcttcttccagcgggagttggtccgggggccttagaggcctccaagcactgctttggaggatggtttccaaggatcgcggtttgtgagttgaaggctttgtgagaggttaaacccccaaaagatacatacttggtaaactgaggctacctgtaaacacatttcggcattaggagaagattcgagtagggaagtgaaggacaaccaccccgagttacattcctttcccccaataaaaagctctggggatgaaagttcttttggcttttatcttttcgatttaaaaatttgagaagaaaaatgtgactagagatgaatcctggtgaatccgaaattgaaacacaactcccccttccccttcctatcctctcggttttagaaccgcgctctcccgccccaggagattccttggggccgagggttttccggggaacccgggcgcccgccccttctactgtccctttgccccgcgggcacagcttgcctccgtctgctttctctacttctggacctctcctcgccgggctttttaaagggcttctgcgtctcaaaacaaaacaaaaaaaccctttgctcttcccaaccctttcgcagcccgccccagcggtggcgcgggaccagcaaaggcgaaagccgcgcggctcttgccgggcgcggacggtcgcgcaggggcgcccgcggcctccgcacccggacctgaggtgttggtcgactccgggcatccacggtcgggagggagggctgagctgttcgatcctttacttttcttcctcaaagtctacctgccaatgcccctaagaagaaaaccaagtatgtgcgtggagagtggggcggcaggcaacccgagttcttgagctccggagcgacccaaagcagcaactgggaacagcctcaggaaagggaggtcgggtggagtgggctttggggcaggagtcatggggcccgggccccggggacgacctggcgctcccggccctgctgaacgctgagttgcgcctagtcgggttttcgaagaggcccttgcgcagagcgacccacgcgcgcggcagcatcttcgattagtcaggacatcccagtaactgcttgaactgtaggtaggtaaaattcttgaaggagtatttgctgcgtgcgactctgctgctggtgcaacggaggaagggggtgggggaaggaagtggcgggggaaggagtgtggtggtggtttaaaaaataagggaagccgaggcgagagagacgcagacgcagaggtcgagcgcaggccgaaagctgttcaccgttttctcgactccggggaacatggtgggatttcctttctgcgccgggtcgggagttgtaaaacctcggccacattaagatctgaaaactgt

SEQ ID NO: 12365 - DNA, 2300 bp, Homo sapien
ctgggctgcagcaaaatgagacaatagctgtcattcaaaaacctttggaattaaaaaaaccccgaaatgacattggtgctttaaagtaaaataaagtcctgcctttaagtccagcatatcactgttgtttctgagtttaaatattaagaaccacatttcgttaatgattaaaacaacagtgattgatttaggggctcagtgagcatttaatctgtcctgacttcaggtaccatgctaaaggagcacaatgcctgatgctgcaggagaaacattaggtaactatttaatggagttttaattttctgttattatttttaataattaattgtgattttgactatttggaagctacaggtatattttgtcctccttttggggtggtgttattgccctgccctgttttaatcagtggttcttagagaaagtgaactcaggagtgacttaaaatgaaggaagacggactttggctaaaattacaattaaataatcaaatcattttcaaatataaagggagcatgcagatgatctggcccaatcctttcattctgcagatgagaaaactgagactcataggaatgaaaagacttgcccaaagccatacagcttgtttctgttgtttggtgcattaggccaaaagacctaggcctaatagatggaaaagatggcaggatgtcttggccttgctctgacagttgcttctctgatctcagatatttcccaccctttgtaatctgtgttccacacaggaagtagttcttgttttttaaatatcgaaggtgtataaacgtaaagtttttatagatgagccacccagggccaatatctgtttaagtaaagacctaaatgctttgcagagacagtaaagtgtcatgtctgtcccagggaaagaaatccaggacaggaaatgctcagtcttccagcactcctctggctacctggagctcaggctatgagcctcaacccctccctgaagcattagctctggagcagaggctgtgatttacttcagagatctgggcaagtccctttaacctggtagtcctgcctttccttgtttgtaaaacagagagatgaggctgatagctccctcacagctccatcagaggcagtgtgtgaaattagttcctgtttgggaaggtttaaaagccaccacattccacctccctgctaatatgattactaaaatgtttttatatgaaagggccaattcctcatctcccctcttcctttaaaaacagaccaaggggcatcttttcttgtctccctgtggcctaaaaggttactgcttctgtggttatctccttggaaagacagagtgtcaggactcttaggtacaccaaaaatgaacaaaaaaatcaacaacaaccataacaccaacaaaaataactgctgtgtcggttcttaagacggcttctgagctagaaacagatttttctaactgtaaaaaacgtggccccagcctgtctgcaggccacctctgtctttaggccttggggggaggagggaagtgagctcatttactggggtctacctcagggtcatcaccaaggtgttctacaaaacgcactttaagaatgttttggaaggaaattcaccttttaacagcccaagaggtatctctctctggcacacagttctgcacacagcctgtttctcaacgtttggaaatcttttaacagtttatggaaggccaccttttaaaccgatccaacagctcctttctccataacctgattttagaggtgtttcattatctctaattactcagggtaaatggtgattactcagtgttttaatcatcagtttgggcagcagttacactaaactcagggaagcccagactcccatgggtatttttggaaggtacggcgactagtcggtgcatgctttctagtacctccgcacgtggtccccaggtgagccccagccgcttcccagagctggaggcagcggcgtcccagctccgacggcagctgcggactcgggcgctgcctgggcttccgggacccgggcctgctaggcgaggtcgggcggctggaggggaggatgtgggcggggctcccatccccagaaagggaggcgagcgagggaggagggaaggagggaggggccgccggggaagaggaggaggaaggaaagaaagaaagcgagggagggaaagaggaggaaggaagatgcgagaaggcagaggaggagggagggagggaaggagcgcggagcccggcccggaagctaggtgagtgtggcatccgagctgagggacgcgagcctgagacgccgctgctgctccggctgagtat

SEQ ID NO: 12366 - DNA, 2300 bp, Homo sapien
gccgaggaggcactgagagcgagtgagggctgctagcacgttgtcacctgtcgataggtgcacctaaatacgggttcattatttgaccaaaggcgggattctacgtctagacatgcatacccacctacattctcttgtacacagtaccatggccgtttctaatatgaaatggaaacctacatatcaaaacaatagctataaatacgtggtgggtgtggtctgttccttaaccctactaaggccttcatctgaggaagcagatctatattaaaagagagcagtatttcccaagtagcccttgagttcacacaaaaattttgttttctaatttggcctttgatttgattttgttttctaatttggcctgagataatcagccaatatggtcaccatattgaacagcacagatctaaaaggatttcccgagtatggaaaatctctgtgggtgtctaggatggttaattttgtgcatcagcttgactgggccatggtgcccagttatttggacaaacattattctggatgtttctgtgaaagtgtttttggatgagatttgcattaaattgggaaacgttgagtaaagcagactgccatccataatatggatgggcctcatccaatcagttgacgagctgaatacaacaaaaggctgaccctgccctgtgcaaggggtaattctgccagtagacagccttcagactttacatgcaatattggctcttctttgttctacaacagcttttggactcgaagtacagcctttcctgagtctccagcgcactggcctccccccatcagattttggactctccaagcttccacaagcacaggagccaattccttaaaataaatctgtttctatatccatatatacacatcctattcattctttatctctgggcaaccatgactagctaatacagtctctaaatcaaactgtggtaccttctttactaaggaattccttctaatagctctatacccattggctttcacaacatgaatcaggggttgaaatttctgcatatttttctcagatctgctccaggcgacttcctttcccatggctagttaaatggggactggagaaggcggagaaatactcacatttttaaaagattacagctaattatgtagacacactggcccttagacctatcttacctggcattttataatttccctttcacacaatataatttaattcatatttgggggacaggaatattgatctacactgtaacttgtctagtttctggaacgataaactaaaacttcaagcatataaaatatgtttatactctaaatttttagttttttccctagtatttgtatgtctagatataattacaaagtctatgtgatgtttttcatgtgacgatccaatacagtgcttccctgagcccttaaaaaataaaaaataaaaatacaacttaaagaaacaaaaactccctaccgtagccgctacaagggaggctaaggcgggaggattgcttgaggacaggagttcgaggccagcctgggcaacatagtaagacttccgtcacaaacacaaaaactcccaacccgggttcgagaccagcctgaccaacatggagaaaccccgtctctacaaaaaatacaaaaattagtcaggcttggtggcacatccttgtaatcccagctactcgggagggtgaggcggagactcgcttgaatccgggaggcggaggtggcggtgagccgagatcgcgccattgcactccagcctgggcaacaagagcgaactccgtctcaagaaaaaaaaaaaaatcacctcccaaccgtatggaccacgctgacatcctgccatcaagaagcaaagctttccagcgtcccccaagcgctagggccgccttctgactcttccgccccgcctccgccccctgcactctcccaactggcgggaggagggcgccctcccagccaatcaacgtcccacagggcccgcctcccgcgcgtctttcaaaggtcttctaggaaccagtcagcgattagaggccgagtcttcggccacccaaaggcggagtaagaaaccagaagcggatctgattggttgctggaagacgccgcgcccacctcacagaaggacgaaccagtgagctaagctgcggggcgcgggctcggccggggcaccggtgagtcgccggcgctgcagagggaggcggcactggtctcgacgtggggcggccagcgatgaagccggtgagtcggacgtgctggggtttggaggagcgaggcggcagggacgcaagcggtcccggggacccgatcctgggccg

SEQ ID NO: 12367 - DNA, 2300 bp, Homo sapien
ttgtctatcaagcttgttcaactcctttgtatttctgtttagagttatgtgctttttgaatcatgcccctatgccgttcccatagcactctgtagaattgcccttggcagttcttaaacctaaatcaaaaggtcattgccttttattttgctgttttccccccttttcttttttaaccacttcctaaaagttgctattgcttagatcctttctgtaatgggaaagatccttgattgatcattcctttctatacaatggggatacacatggtacctgccttctaggactccttgaaggattaagcaaggtaatgtatataagagacctaacagggcctggcgtgaagtgagccctccagagatactcattctattattagacacaactccagagtgtgtgatgtttggatggcttctctaagctctgatccgccattaagctttcagctgtgccgttctacttgctaaaattggaagggaataggggacaactacagcatatgcactgagccaagtcatatgttaggcaaaagtccataaatgcaaattaaaatcactgtgaacttgtcattagtcttgtcattttctgtgatactagtttgctatataaagcatactctctcatgctctgagtttttttttaataattagtaatgttcaaattaacatcttttttcttcttttcagcatgatctatgttttggtgagctcttagaacaacacacagaagaattggtccagttaagtgcatgcaaaaagccaccaaatgaagggattctatccagcaagatcctgtccaagagtagcctgtggaatctgatcagttactttaaaaaatgactccttattttttaaatgtttccacatttttgcttgtggaaagactgttttcatatgttatactcagataaagattttaaatggtattacgtataaattaatataaaatgattacctctggtgttgacaggtttgaacttgcacttcttaaggaacagccataatcctctgaatgatgcattaattactgactgtcctagtacattggaagcttttgtttataggaacttgtagggctcattttggtttcattgaaacagtatctaattataaattagctgtagatatcaggtgcttctgatgaagtgaaaatgtatatctgactagtgggaaacttcatgggtttcctcatctgtcatgtcgatgattatatatggatacatttacaaaaataaaaagcgggaattttcccttcgcttgaatattatccctgtatattgcatgaatgagagatttcccatatttccatcagagtaataaatatacttgctttaattcttaagcataagtaaacatgatataaaaatatatgctgaattacttgtgaagaatgcatttaaagctattttaaatgtgtttttatttgtaagacattacttattaagaaattggttattatgcttactgttctaatctggtggtaaaggtattcttaagaatttgcaggtactacagattttcaaaactgaatgagagaaaattgtataaccatcctgctgttcctttagtgcaatacaataaaactctgaaattaagactcactttcagtgcattgtttgagattaaaaatagtatttcttaaacttgcttaatccatgataaagacatgttgctgtcatttttaaaaagtgacgtactacattatgggttttctgaaaaataccatgcctagatctaaaaaggaaaatttttaaatgccgagcacattaacctcttttgtcatttgacaagattcataaacgtggatggcatagcatcatcatttctcttaccaattaagaaaaattatggtggcacttaaaatattttactttgatttttcctttttggaacagtcagttttaaggtaaaatggcttgtaaatttgagtttttgctgctgcttgtaaggcaggtaaattatggcttgcatgttttcataagcataaataaatcttgtgctttatttgggatgaggaagttaaggcagttgaaaataaaataagtggtttggaagtttcttgagaagaggatcaaaagaaagagaaccaatatatagaaatttcacatgatcaaggaagtttatggatgcgtttgtggaaatcttactctatgaacttgttggattagatgctgttttattctctactaagtgaaaagtgctttatttcagtgctttcccatggttgggagagagtagctgttaactattctgggtaatgggggtgagtatgttgaggaagagatttagaaccagaagagt

SEQ ID NO: 12368 - DNA, 2300 bp, Homo sapien
ttccccccgagactcaggagcccagctggcttcacccagcatatcccacaccggggctgcaggtggagctgcctgccagtcccgcgccgtgcacccgcactcctcagcccttgggtggtcgatgggactgggcgccatggagcagggggtggcgctcgctggggaggcttgggctgcacaggagcccatggagggggtgggaggctcaggcatggcgggctgcaggtcccgagccctgccccgcgggaaggcagctaaggcccggtgagaaatcgagtgcagcgccggtgggctggcactgctgggggacccagtacaccctctgcagccactggcccgggtgctaagcccctcatcacccggggccggcaggggcggccggctgctccgagtgagggtcccgccaatcccacgccaacccggaactccagctggcccgcaagcaccctgcgcagtcccggttacccctcgcgcctcttcctctacacctccctgcaagctgagggagctggctctggccttggccagcccagaaaggggctcccatagtgcagcggtgggctgaagggctcctcaagtgccgccaaagtggcagcccaggcagaggaggcgccgagagtgagggagggctgtgaggactgccagcacgctgtcacctctcaagatctcattaccttgtccaggctggtcttgaattcctgagctcaagtgatcctcctgtcttggcctcccaaagtgttaggattacaggcatgagctgctgtgcctggccaaaagtaacttgataatttgcacacaggtgccacataatcctggtggtacaggttgtactgtccaatacactagccacattttacttaaagtgatgtgaaatttaaagttcagttcctcagtcatgctagacaatttacaagtgcccaatggccacatgtggctagtggctactgtattgggcaatgtttaggtatcgaaaattttcaccatcacagaaggttctattgcacagcactggacagaccctgcttctaaactattctacgcaatttgctaggtgaacgatctttaatgcaaatctaaacatggtcttcttttgctcaaaagccttcaatgattttctcttccatcagcagcaatcagttaatagagtttttttcttttaaaaatggttgtaatggaaagttaaatcaattttgaatcaattttgtgtgttaagaccagcattaaaaacaagtagcaaaagagagaagggaaagtacttatggatcattagtacagttttgtgaaatttttgttttggtcatatctatatttctttgcctctataactagatttccacctcttcataacttgatgtctgtatgatattccactgggttgcaatgaaaaaaatctttctagttgtgtgtggtgagcaaaaaatttgggcttatgggataagaagtctgagctccgtaatgaagcattataaggccctctatgatctgatcccttgctaattcatttctaagtctcaccactgtcttgcacttaggttccattaatacagaattgctgctggtttcacctgagacacgaagctttatttttcttttcttttttccatctctgttgcgtttcctcattctgaactgtttccttggactgccagttctaccttctttttgcctggagaacttatcatcatctaaggccaacttaggaaacacctacagcaggaatcctgcctaaatgctccagggcgggctggctgtccttctttgacctttcagagcatcccacacacatccgtttacggggttataataacgtaattatttatttaggtgttcatttccggcactatactaagttctttcagtgcaggtactatcttattcatctttgtatctgaagcgagaagcgcggtacctgtaacaaactaggcattcattcaataaatatttgttgaaagaataaacgcaagaaggaaggaaaaatcaatcaacaactgtgcggacaatgtcagtgcaacgcagactccggccatcagagggcgccggggcggctgggctggtgcgcaggcgcgctgagagggctggcgccgcggcggtagcggtggcggtcgcggctgtggccgggggaagtgaatggttttacccagagggccctgcgccgcctttctccgctggcaacggcgccgctccccgctcctcctccccagccatggcgttcacgttcgcggccttctgctacatgctggcgctgctgctcactgccgcgctcatcttcttcgccatttggcacgtgagtagctggggct

SEQ ID NO: 12369 - DNA, 2300 bp, Homo sapien
ttatactcaatagaattcctactacctttttttctgaggccctgcaagctgaagcttatttcttgtgatacaagcaagaagaacatgtcacattgccactgccttcctcctctgtaactaaagatgctttgagtctaacatctggatagattataccaaccattaacgtttgtttttcttctgtttccatagaaatgcctcttattaaaagtctgttgccttatatttcagacaacaggagactattcacttagattccaaatggcatctaatctcttcctacaatcattattaaactgagcttaagcattttattagttatcactgggtgctatttggcttttaaaataattatttgttatattcaataggggtacagttgttaaagtttatgtcttccaggcttcaactattccaagtcccttcaagtctgtagaacagtcggtgagagatttccatgccccccggggttaagcagggatgacaaccctgttcagcaggaagtagctttagaagataagatctttggccctttctccttaagaataaggaaggtaaaatcttataaggggaaatgaaaaacagtagaaatggggcttggcttcagctcacccacactagagcatttttttcatgcatttccactcatgacaaacccacaccactaccttactgctaatagtccttttatttaaagaattccaatgactggccttaggagataaccaaggttgagagtgtcccaccttggagaggaatgttgaacaattgattcacagccttgttgccgcaaaccagaccattgggtggcccattactcaagacaaccctggcaaacagataatgctgacctgcataaactacccctaatttgttgtgctcttttaggagagtcagtcagggaattctctcattctcttatgctgcctcccttatgctccggcataagctccaatgaagccttgcctggagaaactcttttggcctcaggtcaatttgcattgagagaccaagaacccatggtcataacaaaatgaggtactgccccaggcagtttgttttattgaaggtacctgttgaatcctagagcctaaactttacttctcccaaaccactttcttcatgcattcaaaactggacttgttccactaagtctgcatctggtacagagacttcttgatgtttacttaggcagtggcccataagagtgctcattgaaacaccaatcatcattcattcatacttcaataaataacttgtatggagaaaagaggctgggcatggtggctgacgcctgtgatcccagcgctttgggaggcacacaggaagactgtttgtggccaggagttcaagaccagcttgggcaatatagggagactctatctctacaaaaaaatttaaaaattagccgggtgtgtggtggcacacggctgtagtcccagctactggggaggctgaggtaggaggattgcttgaacccaggagtttgaggctgctgtgagctataatcgtgctactgcattccagcctgggcaacagagcgagacgagagagagagagaagaaatgtgtgtgtgtgagagaagagagaagaaatgtgtgtgtgtgtgagagagaagaaatgtgtgtaagagagagagggaaagggggagggagagagagagaaagagagagagagagagagagagattgattaaccaagtcctggaaggcagccgtggtcagaagtggggttctggagagggtgggaggaaaggaggtgtgcctagatttgagggagatcaaatttggaaggtaggctgcggtcagtacacacatttaccattgaaaacattgatgtcaccattaacatgctctcagagcttgaagactgcgaaaaaggtccggagaactggcatgacttttaagtatgcaccttgggtttgtttctcacttgcagccaggcagagcgtcctcctctagagggagcagggaaaagaaaaaaaaaaaaaaaaaaaaaaaaaaaaaaatcaggcgatcgcattctgtctaattttgagccgcgccttttgccgtccgccatcacgtgccggcccgctgaggccgcgttgataggtgggggcgactgggccaggcgccggggcaggaagggaggcggccgccgtgccattcttaaaggcgcccgagtgtaggcgacaggccgctgacggccggaaggaaaatggtgagttgccgctgggagggcgggggccggagggctgggcgagccggccagccgggttttcccggtttccggagccggcggcggcgggcagcgcccag

SEQ ID NO: 12370 - DNA, 2300 bp, Homo sapien
gtcacccaggctggagtgtagcggcacaatcgtggctcactgcagcctcaacctcccttgctcaagcaatccttctgcctcgcccagttaattttttaattttttgtagagacagggtcccactatgtcgctgacgctggtctcaattcctgggctcaagccatctccctgccttggtctcccaaagtgctggccttggtcttccaaagtgctggcattacaggcatgagccaccatgctgggtctagggtggggtttcaagctaaactagatcagttatagataataaagaacagtcattcttcctgttcatctgagagtcaaacttttttttaaaaaactctaatatagatactttgtgcttccaagtaatctcatggagaaaagcttatttcatttatttattaattcagtaatatgactacccgacatatactaggtaccggtggcacaaacatcaattatgtgtcattcctgtgctcagagagctgggttcctagcaggctaaatacactagtgagcaggtgctcacaccagaaataagagggctcccatacagttacatactgggtgctttgggagaggcatctccccaagggtttggaagcatccaggaaggcttgctggagaagggagcctttcagattggccaatatttttgttaagtgacaatatcaaatgatggcaaaactgtggatgaaaaactgggaatacaaattggtacatttctggagagcagtgtttttacaaaatctttaaaatgtacattttttaaaaccatagttccacctctagtaatttatcctaaggaaatactttagctgtagggatgttcattgcagtgttatttatagcaatgaaaaattctccaacagttgagggctgattaaagtatatattttcacaaatcagatatatagtaattaaaaattgtgttgtagaagcaagcttctcaaacagtgctgctccagagactacgtgctcatttgccaaggaatatgtgaggccataggacaaacttagttcatctttctcaacacgaattttactggtgatttaggagtgtgacagaggctactagttaactatcccaatgtccattctctttcctcctcagtaacaaaactcttgatttgtaccagggtgtgttgctgctcacgaataataagactacatatccccattctctgatgtggctagatgtggctttaggagtaaatgcaaaccaacgaggtgtcaatgaactgttatgaaagactttcagggaggccaccttgatggagctgactcacagggttgagacaagggagtgaccatttagctactttcagtaatttttaaaaagcttctgtgtgatttaaaaagttttttaaaaattattcttaaagtggaaacaaatacagtttcaaatgtttggctaattctaatttgaggagtacaagaagaggagaaaaggagggggatgtgggaggaagcggatgctttatttctaagagaatcttggataagcaatgctgattttcctctatgattaagtccaatctgaaaaggctgacaagtctcgtataaattgcttgtggtagagactcctttttttgtgttttcactgtgcttatggttatttcattttgtagaatccaagatgcccgccctcctcctcctcctcctccaccctctcccaaatttgcctaagatataataggcagggtttcaggatttagaaacgatgcacgtagatttcagactgcgcctctctctgacatcagaaaacctacattgcctaaggctggcacagagttggccccaaagtctacttagaatttgccggcggaacagcaatgaccactgggccacagcgcttaagacgcccgctgggtaccaatcctgggagtcgggggcggtgcgagtcgggccccccccatcccaggtctgcgtagccaatagctcgggacgggagcgggaggggcgtggcgtgtccggcagggggcgccgtgattggcacgccagctcccgctgtccgcgaggctgccctaaagtctagctcatgagaaccccaggcaagtgcggacctacaaagtttgtccgctccggggcactgtagtggcttttaccctggccgggcgggcggggctcagccgggctgggctgggctccgcggctggagccgggctctacccagagcaagaccctgatggctgcggtgtttctggtaacgctttatgaatactcgccgcttttctacatcgcggtggtctttacctgcttcatcgtgaccaccggcctggtattgggatggtaag

SEQ ID NO: 12371 - DNA, 2300 bp, Homo sapien
aattatacattttatactattttgtgacctgctttcacttagtagtatattcaaacattttttccatatcaaatatttacccacaactacatatataactagtatgataatagcttcagagacttttaatattaaatcaaatgacaaaattggttttttttttgttttttgagacagaatctcgctctgtcgcccaggctggtgtgcagtggcacaatctcagctcactgtagcctctgcttcctgggttcaagcaattctcctgcctcagcctcccgagtagctgggactacaggcacgcaccaccacgcccagttaatttttgtatttttagtagagatggtgtttcaccatgttggccaggttggtcttgaactcctgacctcgtgatcgacccgcctcggcctcccaaagtgctggggttacaggtgtgagccactgctcccagaggacaaaattgttagtatgaagtgataactactattttctactaaccccatcattttgatttagtattaaaagcctctggtgccattactaaattaataaatctttataaacttgtaaagaatattgtgtttttgcaactaatgtagggttttaaaactttttatttgtacataatttcaaaaagttgcaaaaataaaaaagtaaaagatcacccatataccctgcacctggatctcctattgttagcatttctgtcctttgcattattgttctcccatttatgtatgtatgtgtgtattgattgattggttgagataggatcttgctctatcaccaggctggaatatagtggcacagtcatggctcactgcagcctcaacttcctgagctcaagtgatccttctgcctcagcctcctgagtaaccgggccaacaggaatgtaccactgtgcccagctaagttaaaaaaaatttttttctaaagacaggatcttactgtgttgccctggctggtctcaaactcctgagctcaagcagtactcccactgtgatctcccaaagggctgagattacaggcgtgagccaccacacccagcctacccatatgtttatacatacacatatatatgatcgtatatatattttaaatcaatgatttgagaataagttgcatacgtgatgattctttacccctaaatgcttcagtgtgtatttcctaaaaataaggatgctttcttatataaccacagtatagtcatctgctttataaatttaacattgatacagtattttatccaattcacaaccaattttcttctccagttcaggttctagtctagagccagattttgtatttgtcatggatctttagcttcctttagcctggaacatttccatactctgtcttttatgacatgagcatttttgaagggtatagtcacacacacacacacacacacacacacacacacactttttgtaaattaaaacattctcattttgtttgtctgatttttcttatgatcagatcaaagttttacatctgcagccagtgagctgcccgggtgatgtgtccttttcagagtgccacctctagaagcatgcaatgttcttttctctaattggtcatgttaattttgatctcttagtcaaggtgttatctaatttctccactcttctgtttttttctcccccttgatctgtgaggaggcactgtaagatcatgtaaatatcctgctttttattaaaaaaaatttttttgtcctagatttaacatccattgatgattcttgccagatttcatctttactgtgatggttgcaaaattattattttccaactgcagccctccctccagtcggttcttggcattctacaacaagcaagagacttcctgtctctcccatttgtttgtttgcttatctgttgtctctatggcctcatgaatttttcccccagtgttttataattcatggctgaatttaattattttgacgctcaaactgccatttccctgcttcctgccaagactgagggtttgtagtcaaactgtgcccacagattacttggattagttctctcaaaagtcagaaaaccatataaagaaatatactcatgttgttttcttccgtatcccttccacgccattcccacacaccccagtctttagagatagttgttgttttctgatttttcctccctgttttttattttctcttttttcttacacaaaagatagcacatactctatgctacatatgctgttttgtactttgctctttttcatttcagaaaatctggaaatcactgcacaccagtttgcagagattgtcttcacttttttttttttta

SEQ ID NO: 12372 - DNA, 2300 bp, Homo sapien
tttgcccagaggaaaggaattgttaacacacaaatacaagagtactgacagctcatgtcatgctcaactttatatgtcttagagtgtcctgaacagtaagaattcaaaaatgagataaatcaatgtcttttcctaggtcaaaggctggtgtaagaactacacttttccagtagatggcagtattttcattcaccagcttaagttttgttttttttttttgttgttttgtttttagttttactatacctttagtaagctgcaggtgaaaatacatgttaatgaaatttctggttttttcactttcttttaaaaaaaattcactcttgggagcttccaaaagccctagaacgacatctgctttgcctacaatttatagcaaggtatataccgaagtagaccatactctctaatcctccctatttcctgatataagttattactaagaattagctaattcatagtaatctcttggagaaaatctatcaagcctttctgcctctacagtaacaaaacaaaacaaaaataaaacactgacttcaggtttcctgttttctaaatagggcaaaatattcattaaattaagcggatacctcacctgtctggttaataattaacttttaaaaaatccacatttttgcagctcgacctcgacaagacctttcaaaaaccctaacagatggttaggtgctatcacgtgtctgaaacgaactatacgctgcagaaactaaatttgaggaggaagggaagaaagcatttaaattccagggacatatgccggagttggaaaacaaaagtgttaattagtggaataatatctcagatactttctcttcaaaacagtggattagcaggagtaggaaaggctgggtctgaaacacgcgtttcactgccttctcagaattactcccgtataaacaaagcctcaagttgctggagggagcagtgtttcctctgaaatcacggagatagcccagatttagtcatccagtccttcttgcgaatattcaacccatatcaggaggtacagaggtttttagggtttagggtatttttaaccaaacctttactttcaagactagcagaggcactttcgcagcccaccctgcgccactcagcctctgcgctgcgccctcctcgcctctcgcgcggcaaggacctgaagccccggtgtggccgcggccctgcgcactctccagatccaggtgaaggttgcgaggcctggcgacgcctaagcgctgacaggtggcctcgccccgcctctttgtcgcccagggcggcgctcgcctccgctccaggccagaagccgcagcccgcgcgccaggcacagctcccccgaccggtctcaggagttcggccacctccccggggaagagtgggactcagccaggcgccgggccggcctctaggagcctgcgccagagcaaagggcatccggcacccgacccgggccaggcccttggactagggcggcacggaacctagcgcctgggcaggtccaaccctgcgcactgcccctcagcctcgtgaacccttcgcctccacgacccccggaacccatcccagcaagtgcggcagtgacctcgggtctcaccgcccgggggccaaacacctcggccaccccggggccccagaagggccgagggtcagccgagcggacgaaccacattcccaaggacaagcagcgggtggcagcaccgcccccgcccgagcgccctcgggtccctttctgccggggctccagtggcttgagtgtcccgacccctccagaacacgcaggcggccgcaggaagaaattcacccggacccgtcctcttccccgaacttcttcgttcctctcggaggttccttctacccgacccctctgcgccaccagctcctcccactccgctcccctcccctttttctggtccccacttaggaatccgtccccccgccctgcgccgggtccggggttcctccccccggctccccccgcgtgccgtcgccgccgcccgggttcctctccccccgctcgggcgctccctgccaagcccatgatgtaatggtgtatgttaatcagtagcatgtggggagctccggctcgggcggctcagtcctccgcgagccgacactggaggcagcagcagcggcggctgcagcggccccgactcgaagcaccgcactctccccgcgccgcccgccccgacggcatggcccgcggccggcgctccgggcgcccccaaccccgctgagagccgccgcggccccggacccgcgcaagggcccccgagccgccgggatgagccgcgccgaggtgagcg

SEQ ID NO: 12373 - DNA, 2300 bp, Homo sapien
ctcagcctcgtgaacccttcgcctccacgacccccggaacccatcccagcaagtgcggcagtgacctcgggtctcaccgcccgggggccaaacacctcggccaccccggggccccagaagggccgagggtcagccgagcggacgaaccacattcccaaggacaagcagcgggtggcagcaccgcccccgcccgagcgccctcgggtccctttctgccggggctccagtggcttgagtgtcccgacccctccagaacacgcaggcggccgcaggaagaaattcacccggacccgtcctcttccccgaacttcttcgttcctctcggaggttccttctacccgacccctctgcgccaccagctcctcccactccgctcccctcccctttttctggtccccacttaggaatccgtccccccgccctgcgccgggtccggggttcctccccccggctccccccgcgtgccgtcgccgccgcccgggttcctctccccccgctcgggcgctccctgccaagcccatgatgtaatggtgtatgttaatcagtagcatgtggggagctccggctcgggcggctcagtcctccgcgagccgacactggaggcagcagcagcggcggctgcagcggccccgactcgaagcaccgcactctccccgcgccgcccgccccgacggcatggcccgcggccggcgctccgggcgcccccaaccccgctgagagccgccgcggccccggacccgcgcaagggcccccgagccgccgggatgagccgcgccgaggtgagcgctccctccctacggccctcggcgggggacccgcgggtcactgggggtcccctccccgggggcttccccctccgcccgagaagttctgggagccggaagcagcgtgttgttggaagctagcggctccttgaaggctgagtcgctgggttctcctccccgccggcggcggccacgagaaccgggatgggactgggggaacccccgcagccgaactttctttgctgtcgttggggggcgtgtgcctgcggcgccgatccgcattccccgcggggccgccccgctggccgaagggagcagcgctgcggaccccggccgtcccctcgcggggcgtgtgcccagcgctgtgccgccctcggcctgcgacgcgcgggcgaggctccgggccggacagaccagcccgtaggcggcggcggcaggatgcctgccacacacgcgcgcacacacacacgcacacgcgcgcgcacagtgaccgctccggccggagcaggcccagggagacctcccgggtgggctggtgcggcgcggcgcgggggagccggggctctgggttgcgccgccgcccgctgggcgcggagctttgggtggagagagtttatttttgtctcgagctgctgccgcggctgctcacggcctaaatccagaggggcgcctggcggtggagatgctggctgttgctgtagatggagctgcagccgctcggctgcttctctgggaggaggaggaggagtaagaggaggaggaaggaactcgggctgccgctgcctccgcctctgctttgcattagctcccacccccacccccgcgccccttcgcagccgcattgcaagttttctgcgcggggaagatctgttgctggtgctggcgttcttaagcacggcgcccgaggccaccccaggcgggccgtgaggggagcaccagccgttggcagcggcagcaacaggaagccgcggggtctcctcccgcacctgggaagcaggcttctcgctgttacccggtggggaatagcccatctcccacatcgggtgcggagggggcggagggggcggctggatttcggcgaacccaaccttccgcgggacgccccctcccctggccccagcaccctctgatgccctcgtccccccagggcgcgctcctccgctagccgaggtctcactgcagctctttctctccttccagtggtgatcgccgctcgggaatgcgggcgtgaagggtccgagttgccgcccagcggggaggagaccccaggacgccggaaatcaccatcccaaagctgcaagaaggggggagaaagcattcttcattcagttgtgtgccttgtgggggatttttaaaaagtcgtttttttttttaaagaaacatttccgtgctactgtctgtcatcgtctctggggaaatcagccagaaccaccggaacgtaactgaaaccagacaagagaggcaggagcccaggcagtacctgcagcgtccgggcaccagagccaccttggaacaggaacgcgtctccggccgcgg

SEQ ID NO: 12374 - DNA, 2300 bp, Homo sapien
tgggatgttaaattatctaccagtcaggagaggttacttgctaaactatctctggcctggacttgacaacagaaagtgatgctcctgtgaagctcatacaaaggtcctatgtagtctcagggagatctttctaagctccagcgaaagctttcttgtactctagcttcctgggggatagggtggtgagtccagctttctcagcacaaatccctcatgtctgcctagaaagaagggatgcctttagaggacctgagccctgtctccatgcaggttattctgaatgtgggtgagggagtgggtgaggatggggagtgctgggttgggaagtttcaggagtgaatatcagctgaggtggggatgccctggctcccaacacaattagcttcattctgctacagttgggggttttcttatcattagtcgggaaggcctagccagagaattccagtattccagagcaagtttaattgtgggtgatttcattctgccctttttatgtcgcagccaggggcttgcgtcatataacagtgaattcagggagatttttatttgcatgtgaatcatagcttttccagctgaatgtcacttacttggaatttttgtctgattttgtttttgtttttgtctcttggtgtttttccatcgggctctttggctaaccagaaaaaaaaaaaatagaggaagggctcaatctgactgaaacagggtttgagttggcaactcaaaaggagagtattatgaatgtgaaaaaaagaaaacggatgctttattttgctttgagggagggaccgaagccaagtcaaattgagagctctaatttgggaatagtgttattacaggtcattgggagttggttacgcgctaaattgggaggccagtcacatgaggaggcagcagaggcagatcacatgggggacagttggggcccttttataatgaaattttgttttatttactacacagttgaaatgtacttatgtcattttgagaaaccaagtcaccttattggctgggagttgctccctgccctggcccatcagttgtttgataaataagccagttcttccaatctttgtgctttccggggcttgattttggcagtgggatctgtgcagtgattcatggagctgaccctgtgataggggttatacatctgcccttcccctgactgactccaaggggcttgatctcttctcctccaaaggctctacccattttagacctcaaggtcaagacatacagaaaacttctaacattatataaagaagtgatgacctttgttttttagattatcttccattttctcagcactgttcctcttaatgtcatcttgcaaaataagaaagagaaaagatggatcctgcccctccatgggcagttatgaaccaagtatttcttcttacctcaaaactgcagactttggatgttcttggcatctcggggaggaccaggaagggtggtgtgtggtcagctgctgattttccttgaagaatcaaagttggcattcttggtgtccacagccctgattagttagctgtgtttgaaataaaaacaaacaaaaaaaggcagccaaaaaacaatatctagaattcagttaattcattcccactgcaaacaagttgtgctcatgctcctaaatggggtatgttactaagccggtgacacagagcatctgggccggcgatgcttgtgatcgaggttaggaatagaaggtgtgtggaaactttctataaaaggcagccaggtcccctggacaaggggtcaggaagcttcagcactgttcacggtggcaccagggcattactgcatgatttggggcaagtgtctctgcgccttggtgtcccctaagtgccgtattgatttgggggaatgggagggtaagggcctcaagaaatgtttgagatgtaaaatgttaaatgtttgagatgtgacatgtaagataagtggagggagcgtgatgtcacaggagctcaaatcagggccacgtgtccctgaatggggctgggctgctgtcccttctcaggcatcaccctctgtggctgatgcctctgacatcataatacccagccagacactcaataatgatgagctgtgcccagtggacacctgaggagggaagaaaaggagaaggacaaagtggagagggaggagatggagcaatctcttatgtgatcattccatcaactcacaaatttttcacctaacacctggttcaactgtaatgtgctcagctccgtataacctggacagcagctgtgccctcacccctaaactcagcaaaatattatggtcctctaatc

SEQ ID NO: 12375 - DNA, 2300 bp, Homo sapien
aggtattcactcttaagaactgtaggagtatcaggtgctctaagtgacttggggaaaacagaatgataatatggcgtggggaatgagagcacagatgctagccatgttgtctgagcttccattgaatgagctgtgtgaacttgggcaattcacttaaccactctgtgcttcagttcctccatctggaaaatgggctacctcctaagattggtgatgtttgagttacttaatctttgtaaagcatgggaccatcatctggcccatggtgagtactatgtggttgttagctgctcaccaccaatctaagggaccaggatcatgctccatggggctctctcctacaggatggggacaggaggagacccaaagccctaaggcactggttcacaaagtatggaggaggggcatgcctggaaaattgttagaaatacaacctctgggccgggcgcggtggctcatgcctgtaatcccagcactttgggaggctgaggtgggtggatcacctgtaggtcaggagtttgagaccagcctggccaacgtggtgaaatcctgtctctactaaaaatacaaaaattagccaggcatggtggcgggcgcctttaatcccagctactcgggaagttgaggcagaagaatcgcttgaactcgggagaaggagtttgcagtgagccaagattgtgccattggactctaacctggaaaacaggagcaaaactccgcctcaaaaaaaaaaaaaaaaagaattacgacttctgggaccctctctatagatctactgaatcaaaaactgtgtttaaccagccccctgatgattttgatccaggttcacatttgagaacccaagaaaatcatggcctccaattgatagcatttggaggatcgagtaaggctgatgtgaaaccaggtgggaaccatgatttcttaccaggagaaaggctaggaggaagcagttgaaagagtggcaaggacctatttttagaggaagttgttggatttttttttaagtcaacaataaataagcaaaatgtcataatatttctaagacagggctgatctctcaagttttctattcatagcaacctacccagttaaaagcagcaatcgctgcatctaaggatagacagggaagccacgatttggcccgtttgggtttgaagagtgccataagaataaacaaagtctggccaagcctgtgctggctcatgaatcaaacgaaggtgagaatttcagttttaaagcatctttaccacaggctcacaccctcacaaaccacccccacacaatccccagttatgtgctgctccaaggaggagagttgagatgagtctgcagaagcccagagaagcctgggcgtgagagccagtacgttacctctaaacggttgctccggagaaccgtttggtgaagtttggtatcaactcactggtctgacgatgaacccacaagacatgcagtaacaggagcaaaattctcttgattagaggaccataatattttgctgagtttaggggtgagggcacagctgctgtccaggttatacggagctgagcacattacagttgaaccaggtgttaggtgaaaaatttgtgagttgatggaatgatcacataagagattgctccatctcctccctctccactttgtccttctccttttcttccctcctcaggtgtccactgggcacagctcatcattattgagtgtctggctgggtattatgatgtcagaggcatcagccacagagggtgatgcctgagaagggacagcagcccagccccattcagggacacgtggccctgatttgagctcctgtgacatcacgctccctccacttatcttacatgtcacatctcaaacatttaacattttacatctcaaacatttcttgaggcccttaccctcccattcccccaaatcaatacggcacttaggggacaccaaggcgcagagacacttgccccaaatcatgcagtaatgccctggtgccaccgtgaacagtgctgaagcttcctgaccccttgtccaggggacctggctgccttttatagaaagtttccacacaccttctattcctaacctcgatcacaagcatcgccggcccagatgctctgtgtcaccggcttagtaacataccccatttaggagcatgagcacaacttgtttgcagtgggaatgaattaactgaattctagatattgttttttggctgcctttttttgtttgtttttatttcaaacacagctaactaatcagggctgtggacaccaagaatgccaactttgattcttcaaggaaaatca

SEQ ID NO: 12376 - DNA, 2300 bp, Homo sapien
caaggttctaccacaaattaaatggcatgtctgggatttgtgtccagctttgcctgactccaaagctcatgctctttcattatataccatgcctctttttttgctggtatttttcttgaaatattctttcccatagtcttgagaagcattgcagcacaggctgatgcatttgtagcttatggtcaacagtgataactgggcttgttttgttatgtttgcacctagctggaattgctaagcccttctgctaaattccagaaaccccttccaaccttctagatatggcataaaaaccagcaggactgtccagccctagcccttgtagggtcatcagtgggccagtgttgagatctccaggtgtcaggaatgacttccctgaaaatgagctttctttcctctggcccagagcctgtgaataactgtcaatcccaagacaggctatttctcaaaggctaatcagtgagaggggatggaaaggatccttctgagtgtgttaaaaacagatcttcccagagcttgaaacttgaggacattatgctcagtgaagtaaggcagtcacaaaaggacaaacactgtatgattctacttctctgtggtacctagagtagttagagtttcagtttgagaagatgaaagggttctagagatggatggtagtgatagttgcacaccactgtgaaacggtgaattttttttttttttttttttttgagaccaggtctcctctgtcacccaagccccagggtacagtggtgcaatcacagctcactgcagcctcgacctctgaagctcaagcaatcctcccacctcagcgtctggagtagctggatctacaggcatataccatcacacatggctatttcttttttaattatctgtagagatgaggtctcattatgttgcctaagttggtctctaactcctgggctcaagccatcctcctggctcagcctcccaaagtgctgggattataggcataagccaccacccccagcctgtgaatgttcctaatgccactgaacatccacttaaatatgattaaaatgatcaatgttatgtgtattttaccacaataaaaacaagctgatctctacataaagcaaaacagcaattagaggtgtctcaggagccaagtcttcggtccattgcatattctagctttgagcccatagtcactctgagttagcttctcatgagaaaggtgcagtcttactgcacagagatgaggggagctctttttttccctgacaaatttctccatctaggaagtttttccaatttcacacaaatgcctttaccaggatttaaatcactttcaacagatgtctgggggaggtgaagcagcctcacccccaggactctggaatgggacctttgttcatactcacttttctatggagagcttcttagtcttagccccctgtctatcagggggtaggctagacctttctcagaaagaaaacagagctgcacattgtatttgattgtaccaaagtagttgtagcttttttggaaacacgaatgagaatttgattgagtactcaatatctaagaatgtttgatctgtgtttcattggagcctctggcccttgaaaacctggggtcagttaaccaatctgattcacaggctcttttgagaaaatatagccagactatgtagattgggaccctaatccataaaaattctctttagagtatctgtttagagtcactgtgggtgtatttgcttatttgccgtgtatatttcccttttcaggaatcattaaccaatggcaacaggaatccaaggataaagtgatttccctcctgttaactcatctgcctttgctgaagccaggaaacctcgacgcgaaagtagaatatatgaaactgctgcccaaaatcctggctcactctattgaacacaaccagcacattgaggagagcaggcagctgctgtcctatgctttgatacatccagccacttcgttagaagaccgtagtgctttagccatgtggctgaatcacttggaggaccgcacgtcgaccagctttggtggccagaaccgaggccgctcagactctgtggattatggacagacacactactatcaccaaagacagaactctgatgacaagctcaatgggtggcagaactctcgggattctgggatttgcatcaatgcctccaactggcaggacaaaagcatggggtgtgagaatggccatgtgcccctctactcctcctcatctgtccccaccacaatcaatacgattggaaccagcacaagtacaagtaagttccccggaatccctttaac

SEQ ID NO: 12377 - DNA, 2300 bp, Homo sapien
gatgcaccaggtcatgcctcagacccgccccaacatttttaaaaagtcatgttcaggccagtctttgttgagattggagtaaattatacaaaatatttttttcttctaacatgagacaatcattgagaatgagatttccataggtctcagatttcatttcccttctgcatgccataaaaatacaaaggttccccttccttctaaggcatctttccccgatgtggatgccaaaggccagtcaacagaacccctgaaactaagcatgtttcctaccacgctgtgctcgggtaaatggatctgaccaatgtctttgtttcccttgtttaaaatgctatttgcatgtttcacattggcctcagtttcctttcagcaatgatttaaaagaatcgatggtctgaataggctaagaatatttcctttgcaggaaaaggagattgtaccatttgggcatggctggtctggacgcatacctccccgcagatcaccagttccccagtacttattcggtaccctcatttaaccctgcaggcctggcggactcccaatatggagacacaacacaaagcccaaagtcactgcacattctcagagaatgaaaggcactcatttcaacttcctaacatttctcccacctctttttggatcttgattgctccttgaaatcccaggggttgatgagagcttttctaagagcatttttgtgtttgggtcagagttgaggaaaaaaatctaagtcatcagttgttcgacttgaggaaaaaaaacaagaaataattgagggcaaagccagaggccagcacaaccttttcagagtaatttaattcactagaacccaaagttaagggtaaacagaaatatacccccagtgtttcatcttagagactgggttcacgtgtcatttgagtcttaatttttctagtaaagatgttgttgatattcctatcttttccttctttaagaagaattctatggaatagttgcaagatgtttgagttagagaccttatttgagagacggctgtctatcaggaaatttgcagtatctattatcaacaactatttaagtaaatccttaggctcaccattgctacccagttaagaagataaaatccacaactcttactgtgaatcctaatcatttacctgaagagatgactgaattatgaatttaagtaattttctattctagttttccttagagaaacaaaagacaagctgcaaactaacaaattccccatgttttatgacactccatgtggactctactgggctgctcatcttttcaagatgggtaaaaacacagggagggtttgagaaagccatgaatatctatatggggttgggacctttagggaaactgagaggggctgaaattataaagcctggagaaaaggaagagtgcatgacttaaaaattatcttctaaggctgtgaagaaatttcatgctgggtataataattggctgttccacatctctctctaagatacaggaagatacgaatacagataaaaagcacagtcaaaagacacgggcaaatatgtagccagacggagttagaattaagaagatggctgggtgcggtggctcacgcctagaattccagcactttgggaggctgaggtgggaagattgcttgagcccaggagtttgagaccagcctgggcaacatggcaaaaccccatctctactaaaaatacaaaaattagccaggtttggtggcctgtagtcccagctacttgggagactgaggtgagagaatcacgtgagcccaggaggtcaaggctgcagtgagctaagatggcgccactgtactctagcctgagcaactacagtgagaccctgtctcaaaaaataataataatatttagtaagaagaggtttatgatgatgggtactaatgcaagagataagtggatattgatcagcccgtgaacatataggagcaaagaagacagtaaaagcctccaagaatctgtaagctgattcttaaaaatatgtttttaaatatacatttaaatgtaacttgttatttaattacagaatgttaccaaaggtgcaagacacaaaattgtcatcagtattcagaagctcaaagaaagacaaaatctcctgaagtctttggaaagggtaagttatcggatgagggaacatttccactttcattatgggaaaatggaccaaggaaaattctccactggaagtgtcatcgacagaccttctagagcgtaccatgtggtttccttaccaaagtcagagaaaacggaatgattttgaagtgaaacttcctggttgcacgtgct

SEQ ID NO: 12378 - DNA, 2300 bp, Homo sapien
agcatacgaaggacctgcaccggcaccggtctctgagttccctgtttttattggttactatcttcgttatttcagcaaaaaggaatgtagtaggagggcagggtgatgataaggagaaaaacatgtgagcaatagaatctacatcataattaagttcaagggaaggtactatgactggacgtacacgtaagccagatttatgtttctctccacccaaacatctcagtggagtaaagaataacaaggcagcattgctgcaaacctgtcttgcctcccatcacagggcggtttttctcctatatcagaattgaacaaatgtacaatcgggttttataacgagacattcagttcccaggggcaggcaggagacagtggccttcctctatctcaactgcaagaggctttcctcttttactaatgcacctcagcacagaccctttacgggtgttgggctgggggacggtcaggtctttctcatcccatgaggccatatttcagactatcacctgggaagaaaccttggacaataccccgctttcaaggacagaggtccctgcggctttccgcagtgcattgtgcccctggtttattgagactagagaatggcgatgacttttaccaagtatactgcttgtaaacattttgttaacaaggcacgtcctgcacagccctagatcccttaaaccttgatttcatacaacacatgtttttgtgagctccaggttgggtcaaagtggctggggaaaagtggctgcagcaaaactacaaattaacaacatctcagcaaagcaattgtttcaagtacaggtctttttcaaaatggagtctcttatgtctttcctttctacatagacacagtaacagtctgatctctctttcttttccctacacatatagactatataaagttatttttaatgcatatatgttatatatatatttatagaatatacatatataactttgtaagaaacgtttctttttaaacctctggccagatagacagaggcttctcacgtgcacatccgtgattaaagacctcttcttacttaaagtgaattacaaattacaagtgagctatccagttgaacctgaggtttatttgttgttgtttttaattttatactactttagaaagcagcttgtctaagtgactattgccatttttaaattgagaaaccattctctttgggggaacattcaaaaggccaatttactctttctttgttagaaagtacggaaaacattttgcataaggatttcattgctaagtgttatggtaaaagagtgatttcttcccttctttctggagcagccttgaggattcattcatatcctccatcactgaggaagcgcacccacctgggagacaaattaccgttagctttattccctgcagcctggcagaagtcagcatggggaacactctggcaaccaggtagcaagggtgaccctgacatgccatcgactttccatctagcctttgataagtcagtgatgttttccgtgtcccagattttgcacctagaataatagtgactcccctgttcactggaatgggaaagttaaaaagatgccacatgcagagcaaagtgtgatggcagccagtggtcaagtggaaagaaattgtgagtttatcgagtctgacttctttgagagagaagagagcttatgtgtgtcagatgactggttgagcttgcatcagaataccccaatgtttggacatcctgtatattgtccctgcgtgagctgatgagatggggtgggaggcagtctctctcaggcatccactgaggacgcatcccctggccctcctctgtcttctctggaacccctacctctcctgctttgcaagggagtgagttgtttgtaacctgttaccactgacggcaccggtggcagactcaaatcagccatttctcaggcattcacagacaccgctgggctgatgatgctgttggaaaaaaagtcatctgcccttgcctgcctcccatattcttacctcacatagatttctaaggagatagctggggccccgcccatagttagttcataatcagtggtggctgtctgagttctgtgtgcagagctcttttgttcagttactgaacccttatcaagcagctgcctgggactcaatttgccccatccattggagattaaccgtgagtcatacatggttcctgcaatggggagctggggacgtgcattgggacagttagatatggcaccatatgatctcacaacccagtctgatcgatgtcatcaccatagcaggtgggggaagcttcctgaggtga

SEQ ID NO: 12379 - DNA, 2300 bp, Homo sapien
ttatataaactttgaatatcataagccaaaaaacaaacccaaggcttagagacataagtaacttgtctaagatcacacagctagagaatgcttgagccagaattcaaaaccaggtgcatctctccactcatatgcttaactgacacaatatttagaatgtatatcgtacaggaattagaaatattagaatgagattcaagccatggataggtaagctccaaagaggctgtttcttgatgccatgattaaggtgtgaaatatttcaaagacaatgaggggaacaagctataaacaacaatgtctgtaaagttagagtttgtatttagaaacatgcccctaagtctggtgacaaatttattggctgttttgggcacagatcaaactgcaaacatttctaaaaccctctctccatatttttgttaaaaagcagctcatagctaaagatgtggcatgtgcagaatggccaggtgggaatagttaacagagatcccattctggtttttccttgagggggctatttgactcagttcttcttttcttcttcttgtcgtctttttttttttttttttgagacagaatttccctctgttgcccaggctggagtacagtggtgcgatcttggctcactgcaacctctgccttctaggttcaagtgattctcctgcctcagcctcccaagcagctgagattacaggcatgcaccaccatgcctggcttattttttttttttttttttgtattttagtagagacagggtttcaccatgttggccaagctggtctcgaactctagacctcaagtgaccaacctgcctcagcctcccaaaatgttgggattacaggtataagccaccacgccaggcctcagttcttattttctattcaatcatgtatgttgaaaaaaagaaaaagacacaccagtgttacaaaaccttgtattaatcatttcccttcactttcaatataacgttgatatgaaatatagccatgattcttagttacatgggaggaaatgaataataaatacattgtagcaagtttaaaccacaagggtgtttcactggtaacaacatttgaaaactgtacacttgcaaagaacagcatcttcaaacattagtatatctgtatatcagtaaagcttttacatgtaacaaacatgctctttccatatatgacaaatttaaaaaatatgcattgcttggcaacatgaactaggcaaaaatatttctttgttcactaactttatacaggaaaacaggacgaaaggcatgcatgtacaatacagatgcctgcacagggcatgcaacaaaagaaagctttttaaaagtcagcttacattaggcataaatacatgaggattatatattaataagggaggaagttttctgttcgacattattaacattcctgttttcttcctattcctcccagaggaatacacattcacctttaagtaaagataaaggaattacaaaaaaataaaactcactttgcaaacatctctgatgacttgtaaaaaaaaaaaaaatcaacattagtgttatcacagctccatgtgcaaattatccttctgcaggttcttcttgtaacaggcacacctgagcgccttggtcaggctgcttccccaggcccaagctggagctgactgctacagacatctccaggggaccaatgaggccaggcctgcttttcctccccttgcccgccttctggttgcatgcttttgcattcagcccagctcagcccccaagcccaggctcctggggaataacatctacaaccttgcaccggcagtagctacaagaggtgcagaagaacaaaagatccggagaaggctcccatcccgtaaaaggcagccaaggacacctcaaaagaaacccttgtttccctcagtgtctcttcaaacgaatgggagagaggggggcccagctgtagctccaatcctgagtaccaaaaaggaaccctcaatacacaggatttgagagctcggtgcaaagagccgcccggacaggcagacccagccacatctattttgcttgctggctctcgtttaaaaagtgaaaactcaaaagcatgtgaaaaaacaacatatcagcagcaatgtttcatgtcttgtacacagttcatgtgtttcttcctactgtttctggtaagaagccactatgaataaaaagcaccaataaaacatcatacatgataatattgtagaacaccactgtccctaggacaatgtagagatgccaagtacacactgcttaaatcagaacaaggggggaaaagcatgtagtgaaatagatttta

SEQ ID NO: 12380 - DNA, 2300 bp, Homo sapien
tattagttaatctttacacatgtttttaaaggaagacgaaagattgccactaaaaataaattcgtactgaaagcatctctatctactctctccatttttaaagtacctcacttagtatctttgttttcatttgttaaatgcaaggtcatcctttgaatgttgtcttcaactatgcttgaaatagcttgagacccagcagataattctgaccaggaggtatcagcagacagtgggcagcacagttagaggaaaaaaatgttgcagggccccactcccaataaaaacctacaataaaaaatttaaaaattttaataaagaggaaaatgacaaagaggttttccaaaggatgttcatattctctatttaaaaaccccactgggccgggtacggtggctcaggcctataatcctgagccctggagttcgagaccagctttggcaacatggtgaaaccttatctctaccaaaaatacaaaaattagccagtctcataacccgctcttaaataaatagattaaaatttaaaaataaataaataaataaataaataaataaataaataaccccactgatatgaacatttcttccattttggagtaaaggtgcctacaaggctaggcaatgtccatatttctttcctgaatgtttccaacggggctgcgcctagagcagatgtatcataaatactaattacttattataatgaccaagctacattgttagcatagaataattccacaggcttccctattggtttgtttgatcctaagcctattaatacctgcttctatgtcagaaaatctacattaggccaggcatggtggctcacacctgtaatcccagcactttgggaggccgaggcaggtggatcacctgaggtcaggagttcgagaccagcctggccaacatggcaaaaccccacctctcctaaaaatacaaaaatttagccgggcatggtggcaggtgcctgtaatcccagctactcaggaggctgaggcaggagaatcgtttgaacccaggaggcggaggatgaagtgagcctcaaaaaaaaaaaaagaaaaaaaatattattttgatacatgttttaaagctcaccttcggcattatgagataatccctcaagtgaggaaaaaggtccatttattaatctcaaagaaaacagttacagcagatgtcactggttaagagttcagttggtgaatagcatttcacaatttgtaccaacatctggggaaagacgctttgcatggaactgtaaaacaattgagcaccaaatctgcacaactgcgtttctagaaaatgcgatgggttttatagagatgaggtcttgctatgttttccaggctggtctcgaactcttggcctcaagcgatcctcccgcctcggtctccccaagcgccgggagtacaggcgtgagccaccgacggaaatggattttaagtgaaagtcctatcttcgtttgcaaatcaatttttccaggatcaaagttctagcaaccataaatcctatccttctagacatagggacccacataagggccacttgatgtgacacttgccccgacagcggtgccacctggcccctaggtggcaggtgcgtttttaactaaacccaagagtctgaagtcacattattctcttgccttgaaagcttaagagttggttcctaatcggtggcttaactcggtctctctccaggcaaggccacctgtttgctgatctttcacagggcgaggggaccggagcccttcaatgcagcgccctcttggcctgaagagggggcgactgggcgcccagaccgcgtctttctcactgagatcccagctcctggacgactgcctcttttcgggttcggctcattccgcaataagtggaggggtcccgcctgatcctaggggccggcgcccttttccttccctccctgcgcttgcgaacccctccgggcgtctccggagccgcgacccctgctggggaccccgggggcgggaggccgaggggcgcggcgagggccgtgacgcgaggcggggccggccaatgggagcgctccgcggcgcaggctgagccgccgggccataaaaaggaggcgcggccgggctttccagcctgtggccgctcccggctcggagtgtgatctaagcaggttgcgtaccttcctcaggtgactccggccacagcccattgtccgcggccaccggcggagtttagccgcagacctcgaagcgccccggggtccttcccgaacggcagcggctgcggcgggtccatggagaagggccctgtgcgggcaccggcggagaagccg

SEQ ID NO: 12381 - DNA, 2300 bp, Homo sapien
ctgtggaatcagttgtagtgtcacctttgccattttctgattgtgcttatatggagcttccctcttcttttctttgttaatctagctaggagtttatcgatcttgtttatcctttcaaaaaatcaattttttttgttttattgatcctttgtatggattctttagtctcaattttgtttagttctgctgttattttagttatttcttttcttctgctagctttggggttagtgtgttctcgtttatctagtttccctagatgcaatgttagattgttaatttgagatctttctaacttgatataggtgtttagtgctataaacgttcctcttaacattgcttttgctgcatcccatatattttgatatgttgtgtctgttttcatttatttcaaagaatatttcaatttctgcttaatttcattgtttattcaaaagtcattctggagtatgttgtttactttccatgtaatttgtgtggttctgagagatcctcagtattgatttctatttttattttactatggtctcagaatatatgcttggtatgatttcaatttaaaaaaaatttttgagacttgctttacggccaagcatgtggttgaccttagagtatgttccatgtgcagcttcatcagcatttatcttggtgataacatggattccatgacaggtattaatggtacaatttttatgttttaaaagtggtagtttgctaaggaaaatatgaagagagctgatttcacttttagtggttgtcatttaataaagtgagatgtgaggttgggcagggtagctcacgcctgtaatcccaacactttgggaggcaaaggtgggaggcacactttagcccaggagttcgagtccagcctgggcaacatggcaaaaccccatcgctactgaaaatacaaaagttagccaggcatggtggcatatatctgtagtcccagctacttgggaggctgaggtgggaggattgcttgaacttgggaggttggggcttcagtgagccgtgatcacaccaccgtgctttagcctgggcaacacagtgagaccctgtctcaaaaaaaataaatcaagtgagatgtgagaaggaatttttctattcttgaaatgcatgtagggatagtctttatgcctagtcaagcctaaaacacttttttaaaaagagatatttgttatatatgattaaggcagctattataatattactattctaagttactaacttttgaaaactttttaaattttgtagtttttatgacatgttagtaaatttttatgatggaacttttctttactaacaggtgcattccttgtaaaggttctcggtttcccccaacccttccacgccctgctgttgctatattatcctttaagcttccttactgtcagattgcaacagagaaaggacaaatggaggtatgtggaagtcttaccttgacactttgaatttgataatacagcacctgtgatacacacactttaaaattatcctgatggccagtattgaatattcattactgtataattacataaataggggtagcagggagggaagaggactgcttgggatcaccaggccacctgattgccatcactgcttccagggactttgtctacaaagtaaatgggtgtgactgtcagagacccactggggaaagacttactctcaggatggggcatgtccctgagaagaagtgcctccatacattttgtgccataacacctggcttgcctgaccctagtcctagccttgtgtcatcaaaagtcatttgaaatcttgcagttagttattctaaataagaaacaagttagcttttaaaaatcttgtttaccaaattctctgagcattaattatgatagctaggaaactgttttaaatgctgtattcctccccagctgccttttttaaggataggggaaaaagttaagctgtagtatcacactagaatttaaattgtaaaataaacttatagaaaggaagagttcagaacatattttattcaaaaactggtatcttaagataaatatttaacgcttgcctcatattaaggtgatagttggccttaagcaattttatttgcttttataggagcaattttggcgttcagttatatttcacaaccaccttgattatttagctaaaaatggttatgaatatgaagagagcactaaaaatcaagcaacaaaagagcaacaggaacttttaatgaaaatgcttgcggtgagtaaaataaatatactgaaaacgttaaagttaaatgcttttctataggttgaatttcttaaaggtctgtg

SEQ ID NO: 12382 - DNA, 2300 bp, Homo sapien
aaagtgtaatctgaaaacttcagtgaactcttacggctctgttatgttaagattcattggtctggctgggaatggtggctctcacctgtaatcccagcactttgggaggcccaggcaggaggattgcttgaggccaggagttcaagaccagccagggcaacatagtgagacctcctctctacaaaaaaactttaaaaattagccaggtgtggtgacgtgtgcctgtaatcccacctacttgggaggctgaggtaggaggatctcttgagcccgagaggtcgaggctgcagtgagccatgattgcaacagtgggctccaggcagggtaacagaacgagaccctgtctcagaaaaaaacaaaataaaatcaaaaaattcattggtctgacttgaatgttgaatggattttttaaaatcatgtttaattttgtaacatatgaattgataatattggttcactgaagtttatagatcctctttatactgacactttttattatctaatataaattatttgtttttgtttttaattaattatatgttgtttttaattaattaatttttgtttttagagatagcatcttgctctgtcacctaggctggagtgcagtggtatcatcacacctcactgtaaccttgaactcctgggcttaagcagttctcccactcagccttccgggtagctaggactacagatgcatgccaccatgcccatctaattttttattttttgtagagatggaatcttgctttgttgcccaggctggtcttgaaatcctggcctcaagtgatattccctccccagcctcccaaagtgctgcaattacaagcgtgagtcacagcacctggctgtaaattatatctgctagtgttgttaccaatctcatcagtagtttctaagtattagaaagttgtgaagctcataatggcaaatagaagctttccaatatcttaatttttaattgaaagctcaaatttcttgtttttattttttgagagggagtcttgctctgtcacccagcctagagtgcagtggcacgatctcggttcactgcaacctctgccctctgggtacaagtgattctcctgcctcagcctcctgagtagctgggattataggtgcccgccaccatgccaggctaatttttgtattttagtagagacggggtttcactatgtaggtcaatctggtctcggactcctgacctcaaatgatctacccaccttggcctcccaaagtgctgggattacaggcctgagccactgtgcccagctcttttttttttgagacggagtctcccgggttcaagcgattctcctgtctcagcctcccgagtagatgggattacaggcatgtgccaccatgcctggctaatttttgtattttcagtagagacagggtttcaccatgttggccaggctggtcaacgtggaactcccgaccttaagtgatctgcctgcctcggccttgcaaagtgctgggattacaggtgtgagccaccgtgcctggcctgaaagctcaaatgttatcattggcaacaaattctgccagttattttttcttaattgataggctcacttcattcatttacaagaaaatgtttgccaaagatccaattctgcataaccgtagtttatctggcatgtgttttttaagtaaaagtagtgttgtatgaaaaaaaatcacttagttcagcttacaactcaaacaattgcataagtgctttttttcaagacaaccatcacacttctcattttagcacacagaactttaaaaaaaaaatctgtgtaagcgtcaagatttaataaaattaatatttttactgcaagtgagtagtggttaacaatgcagtaacgactaatacagttaggtgccactgccttgattggtgccaaggcaccaggaattttacccaccattgcttttgcaccatcactgcatctctttaacacagtgaaagaggcaaatagcatgtcagtgtcattgaatatgaatgaaaaagttactagattccataatgctttcctttttccaaatcattggtattcgtgattcccttaattatgatcctttgtgttgtagatatttcaatgctaaaaactggttctagtcttctcaaagaggaggaggaagatggtcaagaaggcagcattcacaatctaccacttgtaacatcccaaaggccattttatgatggacccatgccaactccccggcaaaagccatttcagtcaggttctacaccgttgcatctcactcacagattcatggtaagacttggatctacacttaacttctta

SEQ ID NO: 12383 - DNA, 2300 bp, Homo sapien
cgcgatctcggctcactgcaacctctgcttcccgggttcaagtgattctcctgcctcagcctcctgagtagctgggattacaggcttgtgcccccacgcctggctaatttttgcatttttagtagagacggggtttcactgtgttagccaggatggtctcgatctcctgacctcgtgatctgcccacctcggcctcccaaagtgctgggattacaggcatgagacaccatgcccggcctccccattttttttaattagaaaatccaaaaacaattttttgtcagcttgagtacacaaacttttaggactataaatggaatggttgaatatcttcttatagcacttagttattaatttactcatatcaagtatttttcaatgtatggatttagaaacactttttcatctcattttattaaacatcagttttcagagcacagttatgtttacttccatttaaaaggtttatgagggtctgggtacggtggctaacgcctacaatcccagaacttttggaggccgaggtgggtttatcacctgaggtcaggagttcaagaatagcctggccaacatggggaaaccccgtctctactgaaaatacaaaaattagccaggtgtggttgtgtaggcctgtaaacccaggtactcaggaagctgaggcaggaaaatcacttgagcctgggagatgaagtttgcagtgagccaagatcacgccactgcactccagcctgggtgacagggtgagactctgtgtcaaaaaaaaaaaaaaaaaaaaaaaaggctgggcgctgtggctcacgcctgtaatcccagcactttgggagtctgaggcgggtggatcacgaggtcaagagatcaagaccatcctggccaacatggtgaaaccccatctctactaaaaatacaaaaattagctgggcatggtggcatgcgcctgtagtcccagctacttgggagactgaggcaggagaatcgcttgaacccgggaggcggaggttgcagtgagccgagatcacgccactgcactccagcctggcgacagagcgagactccactctgtcaaaaaataaataaatgaaaataaaaagtttatgatgtaatactttttaatctgttaatggtgttctcattagacttataccaaactataaatttccattggcttaacatttgtagtttttatgcatcctataggagtaacttgggatctttgcagtgtatctgcttaccatttcactttttgaaatgatctaaaaatttatttattttgagacagggtctcactctgtcacccaggctggagtgcagtggtgagatcatggctcactgcagccctgaccttccaggttcaggtgaccctcctacctcagcctcgcaggtagctgggactatagacacatgccaccatgcctggctaattttttgtggagatgaggtttcatcatgttgtccaggctggtctcgaactcctgagctcaaggcatccacctgcttcggcttcccaaagtgctgagattacaggtgtgagccaccatgctggggctttatgtagaatttctttgccttctttgtttttctattggttctatcactttatttttataagtatcaaaacactaactttaactgagataatataaagaaaatgtatcttatgcagtattttgttcaaaataaaagtaaatgagagactgtcttacaatatgacagactttatagggactttatcatattaatatcacttcttttctagggaatgacttctgaggaataaaatcttattttatattttggcatatacagtatttgtttacatgtcagtccctatactcccatcccatccccagactacaaggcatttgaaataaggactgggtcttattgtgtaaatataaatacaattctcataaatacatttactaattattcttatctgttcagtgagtttgctgcttggtagaatttataggtgcatattaaaagtttacctttttagtaattgagtttttctaaatcattcacttttactttataatttgtattaatttgttcaaggtatctagcagagtggaaaaggattataatgatctttttgatggagatgatatgagtaatgctggtgattttctaaatgacaatgcagttgagatcccttctttttcaaaagggattataaatgatgatgaggatgatgaagacctcatgatggcttcaggtcgtcctagacagcgaagtcacatcctagaagatgatgaaaactcagttggtaagaatttgactttgtgcatgtgattaccctg

SEQ ID NO: 12384 - DNA, 2300 bp, Homo sapien
atctgtctcctgcctgtccctgggcaatggaatgtctcggtataaaacccgattgtatgctccatctactgagatagggaaaaaccgccttagggctggaggtgggacctgcgggcagcaatactgctttgtaaagcattgagatgtttatgtgtatgcatatctaaaagcacagcgcttaatcctttacattgtctatgatgcaaagacctttgttcacgtgtttgtctgctgaccctctccccacaattgtcttgtgaccctgacacatccccctcttcgagaaacacccacaaatgatgaataaatactaagggaactcagaggctggcgggatcctccatatgctgaacgctggttccccgggtccccttatttctttctctatacttagtctctgtgtctttttctttcctaagtctctcgttccaccttacgagaaacacccacaagtgtggaggggcaacccgcccctacacaaactaatacaggtatcttctaacagtctttctgcatccatgagtgctccttttccaattcatcctccatgcattttctcaaaaacaaacctgatcacatctctctgcttcaagcctttaataccttctcagtgcttttaggataaaacgagattccttaataaagtccagaaggtcttggataggacatccattgcctaacttcacagattcatctctcactaaactctgcatcactctccacattttagtaaggctagttttccttcagttctttgagcataccatgatccctggccccattgggcctttacacacagtattgcctctgcttactatgccaacatcaccaccccaccgccaccaccactcatctctttatactgcttaatgcctgctccgtcttcagatggcgtctcaagaaacacttgtccaaagaagccttccctgactcctttaactagatgagcttctcctcatacatgtttatcactgcacatattacttgtttctaaatacacatttatttttgtgattaatttgtgttcaatgcctgtcaatccaaaaagaccttaagctcaaaggaggaaaagactgtgtctggttcgctctattctatctgtagtccccagcaaaagagacacacaagtattttttcaatgaatcaatcaacatagaagcgacagtggaagccgtgcaatcgagcagtagtgcgtaagaatgggacttggaaagataaaagggaccagaataaccgtaggaaaatattatagtttaggaatcagaggaaaaaattgttttaagccgtcaaaaagttaaaaaaaaataagcaaaaagggaaatagcatcactaaaggcatggaaggatatcattccaaacagaacaggccactgaatttgacaagtaggcagtaactagtgatctgacaaaattaataatgtaagatgcagggaaggggaaaatatatggagagaagctcgcatctttccaactcctctggaagtacgattataactttgtcgatatactacaactaccatgacggcccgaatcaaacaataatctaaagaaatatgtgtgccattttagatttcaacattattcctctatccgcatgagtcatttttagctgactgcacatataaagtttaaggataaatgttttaacatttgcacctaaaacgttgtttctcaaagaaccttacctcccagaatcatcaaaacagacctccgtgtgtccctctgtatgcccatatctcattggcttccgtgtggcaggcatgttttcctttacctatctgaaaatgttttataaaagccagtcttattatttcaaaagagaaaagcagcgaggctagggataggaagagagcttagtctcctctagggcccgttctccgcagcccggtttcccccacccgagtgacaccagcgggataaggcagagggtctgtcagacaataagccggaaagggaacacgcatctccttggtggacgcgggcagccggagtggggactcacccgggtgaccgagcctccgccactgaggatccacaagagctgcttcccgcgcttcggctcgctcaccacactgcgcctgcgccgacccgcccacgcccagcgcaggtcccgacagaggtcgccgggtggtggcgtcagctgcggcgccctccgcgtggaaattagccggttgcccgggcaaatcagggaggaagggagggagctgaacacggaagtggtggcggcgcccagggaaccggcggaggcgatgaccgtgacggctgggttgggaccggaacgccgaagcggggttgggggt

SEQ ID NO: 12385 - DNA, 2300 bp, Homo sapien
acagtctttctgcatccatgagtgctccttttccaattcatcctccatgcattttctcaaaaacaaacctgatcacatctctctgcttcaagcctttaataccttctcagtgcttttaggataaaacgagattccttaataaagtccagaaggtcttggataggacatccattgcctaacttcacagattcatctctcactaaactctgcatcactctccacattttagtaaggctagttttccttcagttctttgagcataccatgatccctggccccattgggcctttacacacagtattgcctctgcttactatgccaacatcaccaccccaccgccaccaccactcatctctttatactgcttaatgcctgctccgtcttcagatggcgtctcaagaaacacttgtccaaagaagccttccctgactcctttaactagatgagcttctcctcatacatgtttatcactgcacatattacttgtttctaaatacacatttatttttgtgattaatttgtgttcaatgcctgtcaatccaaaaagaccttaagctcaaaggaggaaaagactgtgtctggttcgctctattctatctgtagtccccagcaaaagagacacacaagtattttttcaatgaatcaatcaacatagaagcgacagtggaagccgtgcaatcgagcagtagtgcgtaagaatgggacttggaaagataaaagggaccagaataaccgtaggaaaatattatagtttaggaatcagaggaaaaaattgttttaagccgtcaaaaagttaaaaaaaaataagcaaaaagggaaatagcatcactaaaggcatggaaggatatcattccaaacagaacaggccactgaatttgacaagtaggcagtaactagtgatctgacaaaattaataatgtaagatgcagggaaggggaaaatatatggagagaagctcgcatctttccaactcctctggaagtacgattataactttgtcgatatactacaactaccatgacggcccgaatcaaacaataatctaaagaaatatgtgtgccattttagatttcaacattattcctctatccgcatgagtcatttttagctgactgcacatataaagtttaaggataaatgttttaacatttgcacctaaaacgttgtttctcaaagaaccttacctcccagaatcatcaaaacagacctccgtgtgtccctctgtatgcccatatctcattggcttccgtgtggcaggcatgttttcctttacctatctgaaaatgttttataaaagccagtcttattatttcaaaagagaaaagcagcgaggctagggataggaagagagcttagtctcctctagggcccgttctccgcagcccggtttcccccacccgagtgacaccagcgggataaggcagagggtctgtcagacaataagccggaaagggaacacgcatctccttggtggacgcgggcagccggagtggggactcacccgggtgaccgagcctccgccactgaggatccacaagagctgcttcccgcgcttcggctcgctcaccacactgcgcctgcgccgacccgcccacgcccagcgcaggtcccgacagaggtcgccgggtggtggcgtcagctgcggcgccctccgcgtggaaattagccggttgcccgggcaaatcagggaggaagggagggagctgaacacggaagtggtggcggcgcccagggaaccggcggaggcgatgaccgtgacggctgggttgggaccggaacgccgaagcggggttgggggtggcagaaaagcatctgctttgtaagacctacacgaggtgcaggagtggttgggcctcccctctccacttaagcaagcgcccagactgatggcgatggtgatggcagcagttactcgcacaaccccagttaagctgcgctccgggaggtgagtgggggaagggtggccgctgcctggcctcgcaggccggggtcttgttcctgccctccaggctctcctcccaggaaacaatatccggatccctaaaaggatccggtctctttcttggggcccagttagcagacagatctttgagcatcttctctggaaaagaaggcgagatcttctagagcctctaatcttggcatccttcgtgccctcaccttgtcgcttctgtagagataaagaaggaatgacttaatttctgttccggttggttctcttggtacctgaaggtataattaattaatgctcaattaatgcttattctttgcgactctatatatccgttatgaagaaagta

SEQ ID NO: 12386 - DNA, 2300 bp, Homo sapien
tcatattgtttgaatgtctatttccctcagcaagaccataaactcactgaaggtattacaatttgtagccatttgactgaaacaaatggaattgtgaaaacatgatactagcaaaaacaagaatacattttttaatatttgaaaaatttactggataattatttaaacaaatcccactttaaacaaaaaacactaaatacccacccaaagcacccctttagtaacatgagatattaataacaattacttttatacatccatgagtatctcctatatactctaacaatgcgacggaggtaggtgtcatctccattttagagatgaggaattcgattttcagtaaaggaacatattcaaggtcacacaatgtgtcagttagaattaaaacccaggactgttaaactcggaggctcaagcttttaccatacatgcaaaatctgcaaagaaaattgttctttaacctatgaatcaaatggcttgattgataagagaaaatgacagatgtgtggacatcaatcatagtctcatgggtattacagatattatagtgaaggcattttgtagctataacttgttccaatttgcagattcttcttatgctgagctctgaatagtactaaccagaaatctcaccacgctttattcaacatagagacgaatattatgagagttcatcttgaactctatgtactctagccaatgatattgttacttgaacgaaaaaatttataagccagtctatccaaaaaacaaatgatctccaaaaaaaaaaaattaggtcactcagaaagcatcatctctggtaccactgctctttcgggagatcaacagtgggttatttttccacaaatcccaagttgtttttaagccaatcattcttcctcttcattcatatacaaacctcagcgtctagcaaggctatctggagctctagtactaaaaacaacgcctcacacaatgccacccacggtaagaacacgacggtttgcctgtgtgtttgcaacttttcacaatggaactagattgaaaaaaacaatagggaaacctcttcaacagaaaaacgtctcaggtaataaaataaatgtgattgatactggaaggtatcacaaaaacgcagaaaaattctcaaagataagtacaaatgaaagaatatcattctgaaggttttcatcacaggctgctgtaccaatatggagaatgaagatacaagaaaagcataaacttaaacttagtggccaagactttagcagatattgcatggatcaaatgtaagtgctcaaggctactaagttataactcttcttttggttataaatattcacttcagtaaactttaggtgggatctgaatagagaacacaagttactttcttcataacggatatatagagtcgcaaagaataagcattaattgagcattaattaattataccttcaggtaccaagagaaccaaccggaacagaaattaagtcattccttctttatctctacagaagcgacaaggtgagggcacgaaggatgccaagattagaggctctagaagatctcgccttcttttccagagaagatgctcaaagatctgtctgctaactgggccccaagaaagagaccggatccttttagggatccggatattgtttcctgggaggagagcctggagggcaggaacaagaccccggcctgcgaggccaggcagcggccacccttcccccactcacctcccggagcgcagcttaactggggttgtgcgagtaactgctgccatcaccatcgccatcagtctgggcgcttgcttaagtggagaggggaggcccaaccactcctgcacctcgtgtaggtcttacaaagcagatgcttttctgccacccccaaccccgcttcggcgttccggtcccaacccagccgtcacggtcatcgcctccgccggttccctgggcgccgccaccacttccgtgttcagctccctcccttcctccctgatttgcccgggcaaccggctaatttccacgcggagggcgccgcagctgacgccaccacccggcgacctctgtcgggacctgcgctgggcgtgggcgggtcggcgcaggcgcagtgtggtgagcgagccgaagcgcgggaagcagctcttgtggatcctcagtggcggaggctcggtcacccgggtgagtccccactccggctgcccgcgtccaccaaggagatgcgtgttccctttccggcttattgtctgacagaccctctgccttatcccgctggtgtcactcgggtgggggaaaccgggctgcggagaacgggcccta

SEQ ID NO: 12387 - DNA, 2300 bp, Homo sapien
cattcaacttagaatctgaaaaagatagagaaacccatattcttacatattttctaatttataatacactccttttagtttttttgtgtttgggacttccagaagcaggtgccaaaatgtgattagaggtgcaagagatttatttggagtgaaacacctagaaagatagagaagggagcagaaggtggggaattcttcataccacacagaaagtctgacacctagaaggaaggattgggtaggggagcttcggacttcagtgcatcttgagactgctagatgaggacttggttcccaagcaaaggttgcctgtagagaagcccacagggacaggaatggcctagatctagacccctccaacgtgctcagctactggctgattgcaggcaaggaaaagttggaggctatccattactggtacacagcgccaggactagggtatggtgaggcacttagggacaaatatttgactatacgactaaggaagacaatgttttggtacaatattgtaatatctgaattgatgcaaaaaagcctatgatgagcaagataccaaatttcaaatcaaacctgaccagattactgatttcttgttgcttcaggtttcagcatggctcaaggcactgctgattcactgtcaccagtgagaacaggctaggtccacaccagtcgtgtaattttccataggcctgtgtgcccttacccaaaaataagactctcggcttaggtatttgaagttcctctgttgcccctttttcagtgtgagaattgtgtgtgctgtggaaaacatccagggatgtcttcctttaaacaagttcatggttaaatggccacccactcactcactaatgccttacacaaagcaagatgcaagtgtaccacatacttttaggatatttttatatcttaaaaaatgtatattggccgggcacagtggctcacgcctgtaatcccagcactttgccgaggagggcggatcacaagatcaagagatcgagaccatcctggccaacgtggtgaaacctcgtctctaaatacaaaaattagctgggcaaggtagcgcgcgcctgtagttccggctacttgggaggctgaggcaggagaatcgcttgaacccgggaggcggaggttgcagtgagccgagatcgcaccgcgccactgcactccagcctggcgacagagcaagactccgtctcaaaaaaaaaaaaaaagtatattgcatatatgtatatattttgcacaccatataattatcacgacatctttattgctagttagtaggttccttgactggggtcatgtcatctgtgcctgacacaggaggtaatgtttattcagaaatgaagatggcggctgggcacggtggctcacacctgtaataccagctctttgggaggccgaagcgggcagatcgcttgaggctagcagggtgagaccccatctctatcaaaaacacaaaaataagccggatgtggtggcacatgcctgcagtctcagctactcggaggctaagatgggaggattgcttgagaccagcaggcagaggttgcagtgagccgagatcgcgccactgcactccagcgtgtgtgacagaggccctgtctcaaaaacaacaaaaaagaacatgggagaagaggcattgatgaggaaaaatctacaaagaaagcaaatatcaatttgtcaagctatttgcaaacgtcttccctttcctgtattaatattttccctctccccacttttggcccgaggatctgagtcctcgggtcaggccgaaatcagaccgcgtccatacccagcctccttcgaggcctagctgtaaaaaccgctgagcaaaaggaatccagaatcagccctcaagcaactcaagacaagttagcaatttccgccgggaagccgtgaacatcggcagccactggcgtttcctccgagtcctcggaactccggaaactctgggagcttttagcccgcccaccaggggaaagcggcccggagccggcgccaggtggagcccatccccctaggcctggcgggccgcagtaccgccaggggcctgcgggaggcgcacgcggcgcggcctgaggggagggggagaacgggcggaggcggtgcgctcggcgcttcctgttccggcgccaggaggagccgcgcgctgctggtgctgttgccgccgctgctctagctgccgtcagtcaggctgcgcccgcgtcttcagggcccagtccctcggacccatcgccgcttctagaccctactgcggtctcggatattgccgggtgaggctgcttcggtactagtgggag

SEQ ID NO: 12388 - DNA, 2300 bp, Homo sapien
aagatactaagcagactagctttcatatatgagattaaaattttttggccgggtgcagtggctcacgcctataatcccagcactttgggaggccgaggcaggcggatcacgaggtcaagagatcgagaccatcctggctaacacggtgaaaccccgtctctactaaaaatacaaaaaaacgattagcccagtgtggtggcgggtgcctgtagtcccagctacttgggaggctgaggcaggagaatggcatgaacctgggaggcggagcttgcagtgagccgagattgcgccactgcactccagcctgggcaacggagggctactccatatcaaaaaaaaaaaaaaaaaaaaaaaaaaaaaaaaaaatttctccaaaattccttttatctgtagatctcttaaagggcatattttggttatacaaaagttttaaatttcatgtcatcaaatctatcaatgttttcctatacgtggcttctggattttgtgatatatttacaaaggccttccctactctgccttgctttcatatagtatttttatggtttaacttcttgtttaaaacctttaaattcttccaaacaataattatcaactatctatcttttctcagctaattggacaagctacctttactacactatactgctgccatttataactagcatctatccaatatttaccatgaaacatggaacatggtggtgtactgtgcaccacctcacttggtagctccagaacccagatacaaattttattttcacccccagtttacagctggagaagaggaagcttggcaagttaacttgtttaaggtcccagagctaatgacaaggagagaagcagttcaaacccagtatgactccagaacttaggctcttaacaagcaggctatagagcctccttcatttcccacagatattgtggactttattcttttctttttgaaacagtcttgctttgttccctggccagagtgcagtggcaccatcataagctcactgcagactcgaccttctgggctcaatcgatcctgcccagctagtttttttgtagagatggagtttcaccatgttgcccaggctggtcttgaactccggagctcaagtgatctgcctgcctcggcctcccaaagtcttgggattacaggcgtgagatactgtgcccagctgactttattcttttctactggtctgcaactgtaccattccattttaattacagaagctttacaatatattttaaataaacattaatgtgagtcaccctactgtcttttttttttttttttttttcagattttcctatgtatttttattttttccagatcgttaaaaaaaaaaattaatgtgttagcattctggttggaaatgtattatatttacagattaatctaggggaacatctatttaaaatgtcaaatcatctcgttcaagaacaaggtatagtatagtccctcggtacctgagggagattggttctaggacccccatagatactcaaatcccaggatgctcaagtacctgatataaaatggtgtagtatttgcatataacctatgcacatcttcccgtataaatcatctctatattatttataatacttaaaagtgtgaatactatataattatattaacttatattttctatggttatttttattgtttcccccaagtatttttttttttttgagacagggtctcactctgttgcccaggctagagtgcaatagcatgatgtcagctcactgcaacctccatctcctgggttcaagagattctcctgcctcagcctcctgagtaactgggattataggcaagcgccgccatgcccggctaattttttgtatttttaatagagacagggtttcaccacgttggccaggctgctcttgaactcctggcctcacgtgatccgcccgcctcagcctcccaaagtgctgggattacaggcatgagccaccgcacccggctccctgaatattttctacccgcaaatgcagacacagaggactgtttagttcctgtccttttcatgtagtttattttcttgatcagatctcctatatacatttcttttaagggatttctgttaaacttttccctgtggttgtaaataggctcttttcttctactgtattttctaattgttcgttcatatatgggacagggttttaaaattttagtctatagcaggtcctcgaaagacgtttcattcaactttgttttgttataatgttgatgagaagaaaaaacaaaaagtctcagctgaggtcactgtctgtgtgaagctggctcattc

SEQ ID NO: 12389 - DNA, 2300 bp, Homo sapien
ggcttacaatctctgcatccgtagaaaccagacagcctttttgtttgagggctaacacttgccttgtccctatttcaaataacacagtgagctgtacatagaagttactcaatgatatcttaattgattttattgggttcctttttacgcttatcttagaaaagggatgtgactttggattgggtaataaagagccgtttattgcatgtgtacaaattataaattcccaggcacaccctgatcatagcaggatccttttgttagctttatggggcatgaagttggcaccaaagtattcatggggatgtacaagtaaggaagggaagccaaaagcatgtctgatcatacaatcaggtgtaagcaagccccctaagtagccagggcatgaactttgtctatctctgaaatgaccagaagaaaaggcaagagtgtgattcatcccttgcctccacagcaattcatttggctatctacttttcttattaccaatggctaaccctctaagggtaccactcctggccatgaggcctcatgactcaaagtcttaagatttatagcattttccctggagaccaagggcattcctttgggtgatacctttttactacccagaggttagtcatttactatgggtgatccattcaaataaattggttgccaggctacctcttcagataagagttcaaacttgcataaataatccccagccacactgtgacttctatgtgcaagcctagaggggacgatgttgcaggaaccgtgccaaccactaagacactttcaagtttatcctagagaatgccaagacagcttctcaattccatcaagtgagtccttcacaggaacatttccctaagttgaaaaactgcaggaaataatttatctttatgttattaattggttactataagggctacaggaattatttaggaaccagatgatacctggttttctccatagtttacataagccagtccctgcaaagattcttcccctaccccccttaatttttttttttttcctcagagatccttgttccaacctgcaaggattctttggcctggtgcttttccaggtaaagtgtaagagccaggatttctggattttgttcctagacatgagtgagcttggataagtaaatcattttctcttttagtctgtttgggcttctgtaacaaaatatcataaactgggtagcttataggcaatatacatttatttcccacagttctgaaggtcgggaaatccaagatccaggccagcagatttgatgtctggtgagggcctgctttctggttcacagagggagccttctggctgtgtcttcacaaggtggaagtggcaaggggtctctctccggcctcttttattagggcaccaatctcattcataaggaccctgcccctatgacctaatcacttcccaaggcctccacttcctaatacatcaccgtgagggttaggatttcaacatatgaactttggcgggatataaacattcagactatagcaccctgacagtaaaaatgagataataatacttatctctttcttccaacaaaaagataaggtgaagttaaaaggagggtatatatatatataatgtgaatttcctgtgtaaaatgtgttaaagagttgtctgattaattgctttataagggaattgctttgagactaggcctattgatctagaataagtagtcaatttgtagtcagttccctagggaatagacattgaaaagatttttggttttgtattctacaaataaagcaacctattaattgaattcctctcagcgaattcttcactcaggtgattctggagagggcgggggacagacgcggccgcagcccaggtcccgggagcgccacggaacctaacggtggcagcggaggtcgcgcccctcagtgcccgcgctctccccgtcgggagcttcctggtcgcccctgcggcggcggctcggggtgtctggccggcgcggggctcgcccagcctggtccggggagaggactggctgggcaggggcgccgccccgcctcgggagaggcgggccgggcggggctgggagtatttgaggctcggagccaccgccccgccggcgcccgcagcacctcctcgccagcagccgtccggagccagccaacgagcggtgagctgcgcggggcgcgggggacgcggctccggccgggcaggggagagggcgcccgggcgctgcttggggcgcggtccggagagggttcggctccccgggaccgggccggggcgcgcgcggagagccccacagcctgtgctctgccctc

SEQ ID NO: 12390 - DNA, 2300 bp, Homo sapien
ggtggctcatgcctgtaatcccagcactttgggatgctgaggtgggaggatcacttgaacccaggagtttgagaccagcctgggcaacatagtgagaccccgtgtctaaaaaaaaaaataacttagctgggtgtggtgttgtgtggctgtagtcccagttccttgggaggctgaggtgggaggatcacatgagcctgggaggtggaggctgcagtgagccctgatatcatgtcactgcactccagcctgtgcaacagaacaagaccctgtctaaaaaaaaaaaagatgtgcaaaaatattttagtcaaaggtaatgtctgactatgatataaataatagcagtatagtaaaggatgagcatccccaatgcagaaatctgaaatgcttcaaaatcccaaacgttttgcatgcctgcatgatgttcagaggccatgctctacagaaatgctcactggagattttggattttggctcttcagattagggatgcttaactgggcataaggacatattccaaaataaaaaaaaatgtaaatcagaaacacttctggtcctatttcaaataagggatactcaacctgtataaaatatccagtgtgtataaatgaagcatatgttaagccctaggaggagctctgcctgtttgagttttaccaaaaataaggtaatattttatggttttttttttttttttttttttttgagatgaggtcgctctgtcacccaggctggagtgcagtggtgccatcacagctcactgcagccttgacctcctaggctcaaatgatcctcccacctcagcccctcgagtagctgggaacacaggcatgcgccaccacacccggctaatttttgtatttttcatagagacagggttttgccatattgcccaggctagtcttgaactcttgggctcaagcgatttgcccaccttggcctcccagtgtgctgggattacaggcatgagccaccacacccagccaatatcttgcatttgaatcaagtagtggacatttattggatcccttggggccgatgccatttctaaaagtgattgagtaaatatcacaggtgggcaaatcaaagagaaggatattctggttgtttcaaggtccaggtaattcaggccatggcacaggtgatcctgagcttaggaagaactcacccatgcctcaggggcccagctgccctcctcccctcactgctggagcacctacaacagctgtgaagcatcttgtgcttttggagccttgacatgggaaggaacaggagaaagcaggactgatgtctccagaccaccccttaggcaaaccctctttggtagcatcttagacccaaatatttttttccttcacgtcacgttgcctgaattttttcaccttagtttgttgtactgccaaatattttatttggaataacaagtacctttgaaaaaaaaaaagcacatacaaacttcagctcccctttgaggcttagctccaacagcacctttcctttccttcttagaagtaagctttctgggtttgaattcctacagcacacattctgactcatagcatctgtgacttgttatttcacatttccatggatgcatctcatctgccttgctgcactgtaggcccttcggcttttatttttttttaattcttaatctttatgggtacatagcaggtatatatatttatggcatacgttagatgttttgacacaggtatgcaatgcctaataatcacatcatggaaaatggggtatccctcttctcatttatttgtgttacaaacaatccagttatacttttagttattttcaaacgtacaatgaaattattgactatagtcaccctgctgtgctgtcaaatacccggccttattcattcattataactatttttgtcacccattaactatccccacctccctcccaccctccctcactacctttcccagcctctggtaaccatccttctattctatatctctgtgggctcaattgttttgagttttagatcctgtggcccctttgaccatgcagatcatggcctattcatcttcacacctagataggagcctgcgcagtgcctggccaggagcaggcataagtgtgtgcaaatagaggaataaatagcagggcagcaactatgtctggaggtcattgtctttcctgtctcagtagtaatcaatcactgcttatcttcaaaaacccagagtaggggatggggcagttagtggggacagagggcagatgggtaagattcagagcacaggctagtgtgacggaagtttaaacttgtgagttaaata

SEQ ID NO: 12391 - DNA, 2300 bp, Homo sapien
cctgacctctgtaatagtcagcgtttcaccaccggggcgtaattgacctttggggtgaaactgttcttcactagctccgacattaaattcccgtagctcttcccaggtcccatggcaactaaaaacgcccggttgagaacctctagtcaagcaagattaacgcattctggactttcaagctggaggaaacgccactcagccaaacaaaatttaggtgtgtgtggagccagggctgccttgcttgggatcccagcttcaccaccttttagatatgctaatgtgagcagttaattgacctcatctgtatgagagcgataatagttaactacctttcagggttattctgataattgtacctttaatgttgtcctcgctcgctctttctcttgctgtggatagtgctatcctgtatttaatacataagtcttaatttttcttcaatctttagcgaattaatattgcaggagataaatagtagaagacagttctttatgaaaagcacagtccattgtcactttccttgggtcttagaggagaatgttattagcatgcaggtcagacagattctcgttttttatattttgttgattgcttagaatcatgtaacaatgtattgcattacttgtgccaatttttctattatctggagttttctagtggatttagttaattcttgttgaagaatataccatagtgtgtctatcacagagcctcccccttacctttttttgtttttgttttttaactgccaagacttctgagaatcagtatcctttctccagtttggcttggtagttctctataccagctacacaggtgaccccctcaaactttctaattttctttgttctccctagttggatctactgacgtcgtctttattgtcctcttttgttttgcttgaatacattctcaaagatctttccaagaaaaaggcatgtgccaattaaactatatgattttgtgcgtgtgtgtgtgtgtgtgtgtgtgtgtatggcttttcttttttaaaatttatagagacggggtcgtgttatgttgcccaggctggtctcaaactcctgggctcaagcagtcctgcctcgacctcccaaagtggtaggattacaggcctaagccaccgtgccggcctaaactgtatgatttcttgtatggatgaaaataatggagcaaactgatagggttattgtgaactatatatttggtcttgttctgttttctggcaaacaactactaaaatccttggagtcttcaaagtggtacctttttgtatgctaatgattgactgatagctggatgcctctaaatagcttcaggattggggctggtcactagacagaccaaggcaggatttctcgagagttggcattttcagccccacctcacaacctctggggaggggagaggagctgaaggttgacttgatcaccagtggtcaatgatttaatcactcatgcttatgtaatgaagctgccataaaaaccaaaaaaaaacacctgtgtttggagagcttcttaggtgaatacatgaaggttcctaaacagtggtgctacctgagagagcatggaagctccttgttcctttccacatactttgccctgtgcctctctatccaactctatctgtatccggttgcctattgattatccctatatgactaataggtacctggtgtggggtttttgtttgtttttggttttcttttggctttagaagaaatgttagactacctgcattcctcatcatgggtaaggaaacccttgtgtacatggtccttcacttaacctattttcacctttatttcacgcttttctttttgcagtgttctctgtggtaagcccagagcctcttttattctggactatcacttactggctttctcttcactggtcaagcaagttcctatttaaaacccccaaataggtagcttcttattctctgataatcttcttctcacttttcagtgttacatatttatttcattgcacattttatatttttatttcagaaggccctgaagtgggacaggaaatgaactgtaatcttaattttttaaataatgaaaattcatgtaagttgggttttgtccttttccttgacaggatgtcttcatcacattttgccagtcgacacaggaaggatataagtactgaaatgattagaactaaaattgctcataggaaatcactgtctcagaaagaaaatagacataaggaatacgaacgaaatagacactttggtttgaaagatgtaaacattccaaccttggaaggtagaattcttgttgaattagatgagac

SEQ ID NO: 12392 - DNA, 2300 bp, Homo sapien
ttcagaattctatcagataaatttaacaaagaagctgaaataatttaaaagaagcagaaattctagggtcaaaaaatataattgacatgctgaagaatgcatcagagtttcttaatagcagaatagttttcttttctttttttttttttgagacaggttcctacttttttgtccaggctagggtacagtggtgcgatcatagctcactgtaacctcaaactcctgggctccagtgatgttcccacttcagcctcccaagtagtgggactagagatgtgcgccaccatgcccagctaatattgtattattattattattattatttggtagagatggggtcttgctatgttgccagtgctggacttgaactcctggcctcaactgattctcccatcttggcctcccaaagtgctgaaattacaggtatgagccaccattctcagtctctttttttttttttttttttttgagatggagtctcactctgtcacccaggccagagtggagtggtgcgatctcagctcactgcaacctccacctcctggattcaagcgattctcctgcctcagcctcctgagtagctgggactacaggcgcgcaccaccacacccggctaatttttgtatttttagcagagacggcatttcaccatattggccagggtgatcttgatctcttgacctcgtgatccccccgccttgacctcccaaagtgctgggattacaagcgcaagccacagtgcctggccagaagggtgaacattagagactgacaaccccacgtgctggaaagcatgtgaaacaagtggaactcttatatgtggctggtgggaattgtaaaatggtacaaccactttggaaaactgcttggcaattccttacaaagttagacatgggtgacggcacccgcctatagtcccagctattcaagaggccaaggctgcaatgagctatgattgtgccactgctctctagcctgggggacggagagaccctgcttctaaaaaaaaaaaaaaattttaagttaaacatacccagaatgacccagaaattccactcctgtatttcctcaagataaataaaatatgcccacaaggacttgtacgagaatggttatagcaactttgctcatcatcaccaaaaattgaaagcaatacaaatccatcaactggtgaatgcataaagtattcaatggaatgcctctcaataacaaacactactaacttctggttcacgcagacccaaaagagtacctatcaccttcatttttatagtgctagaaataagaggagtggttgctgatgtggtgggagatggacaggaaagaaacaggccactcttctgagtgatggaaatgctctacgtcctgattgggtggtagttacacagctgtttacatttaccaaactcatcaaattgtccactgggggggaaaaactattattttcactgtatacgaaaacttcgcctcaacaaaaaatgaactaaaaaagaaaaaaaaggggaggggggctggcgacgttgaaaagtaacgctaaactatgtaaggatttgataattggggtaagccttttctttaaaacgtctagtaaagaaaacattccaagaaggtctgctagattctgtgactaaacaaggacattaaaaagccctgaatccagcttggtcaacgtagtgaggccctgtctctacggaatttttttaaagttagccaggcgtagtggtgcgcgcctatagtcccagctactcgggaggctgaggtgggaggatggtttgaacacagcagctcaaggctgcagtgagcagtggtcggtgcccactatactccagcctaagggacagagaccttgtctcaaaaaaaagaaaaaagaaaaaaaaaaaaagccttgcgagctctgggggagatttcccgcagcccagctttgccagggacccagcctcacccctcgggctccaccgcccactcccgcccttcacctgacgtgagcgccccgactgctccactccttctcatcccgcgtcgcggtcccgcctattttccctctctcacccatcttttgaactggcccttcacctttcaatcaattcaaatatcgcacggagcaaaccaatcgcaagcctcgttgagtggaaggggtgggatcttccccggaagtgttggttaaagcccctccaatcagcggctcggtgcggcaagtttgaatttcgtggaggctcgggttgtgagggttcctgcttcggagtcggcggtggtcgtccagaccgagtgttctttactttttgtttggttgaggtttcacg

SEQ ID NO: 12393 - DNA, 2300 bp, Homo sapien
tcagattttagaaactttactagcaatttgacagaataattttatgtctgtggactttaataatcaataattcataggctaggcatggtggctcactcctgtaattccagctatttgggaggctgagaaaggaggattgcttgaggccatgagtttgagaccaccctgggcaacatagtgagaccctgcctcaagaaaaagatgaaaaaatataataattaatagttcgggcttttattatgtcttttaaaattaatttcatttttatatcaattttttgagtcctctaatcaacaggaatcaagttttgtttgttttttttttttttttagatggagtctcactcttgtcgcccagttaggagtgcagtggtgtggtctcagctcactgcaaactccacctcccaggttcaagcgattctcctgcttcagcctcccaagttgctgggactacaggcgtgccctgccacaccgggctaatttttgtatttttagtagagatagggtttcaccatgttggcaaggctggtcttgatctcctgacctcaaatgatctgcatgccttggcctcccaaagtgcttggattacaggcgtgagccaccatgcccagaaggaatcaagaggttttaagaaggacagtgtttgagatgaatctgaaaggataaactgaagttttacaattttgagctaactatgacataaagaagcttcaaatgatcatgatatattgagctaatattgctcacatattaaatcagacatacagtttgatgccacggtgtaccatataacacccttccttaattttttttttcctttttgagatgtgagccaccgtgcctggacttcccctctccaatttttattaaaaatatgtatatagataaaggtctagatggagatactgagtggttatttcttggtgatgagattatgggaaatatttttattttgtttttacgttttaatatttaagattttacacatatattttacaacagtagttttataattggacaaaattatttttgttaaggactggctaaaatcaaagttgctggtttaagtgtaacttggtacaaccttttaaaaatcatttggcagtttgtattagtaactgtgaaagtgttgatagtctttttcacctagtaatttcacttttgggtatctttaaaaatctacattcatgaagatgttctatgatttctttataatggcaaaaagtgaatgaaggaaacaagttatgtccaaaaatagagaattactgcagtaaattttatgtccacttaatgtaattttatgcagctgttaaactggttatgaagcttatgtggaaatatgaggaatgcttataaaagtgaaaagaggatgcaaaatcgcgtacaactactattacagtgtagtaaaatatatgtgatggggcaaaaggtctagaagaaaatacattgtcctcatgtttttcaatgtggttaatattattttcacaatgaaaacaataataagcttaaagattgggaatcaaaagttcctcactggccctctgatttgaatataaagtgttaaaaatttatatccatcattaaccagcccttaagcttctacagactttaacagtttcgtgtcagcctcaacgtttatctactttctgaccggtatccctgccatgattttcataggaaagagagtcagaagggacctttccaattttgtcattttacaaattgaaactctgaaccccagccttccaagctagcagcagaaccagtatgaggatccaggtctactaggttatctaatagtatctgagaccatttacagcttcaggtccacccacgaatattcataaacttgacatgtctgctgattgaaccctggcgtcactacccttcttggctggcctgggaggtttgattcctttccctacagtcgtgctcaaactttcattctctaccacttgggggccgcagacgcgtcatccaggtctcccttttcacttcccccttcccgcccccagtgtccggcagggggcgccgtgaaactctggatccgtggcccctcccccggccaaccgtcgattgggccggcgcgtgacgtcactccgttttagccaaacaaatgggtttcggggcgagcgttgggcgccgccgcgccgcgctgggtgctcggtccgactcagcggtggggagtgagccaggcctcccgccaccgctgctgccgccaccactgcgtcgggctggtgcagccccgggccaggccgcggccggggcaggagcgcaggtgggtccgggccgaggtggggc

SEQ ID NO: 12394 - DNA, 2300 bp, Homo sapien
gatcgtgcctgtgaataaccactgccgtccagcattggcaacatagtgagactctgtctctttaaaaaaaaaaaaattcctttatgaacacttcatgggatttcctccatccccttttaggggacataactagaaggagaacatgcctccttaaaaggtattagttttagcaattaaaatctccctgccagctcatttgttggtctacttaaatattcaagttttatttcattaaaggtcttttcaggtgtttcaagtgttcctttaaccgaacacttgttgaactgaacacttgttcatgtttctcatgtttaatggctatgatttaaatacatgttggtgttactgaagtcataatccagtgagaattcctgttaaaagtgttaagattttggactcttgcataagtcccttaaggagtggtctgacagttactaatctttgtttcccatagaatcaggaataccctctatctttagatgttcagtcaaaattcgttagaattgaatttgagtaacccacatgcttgtatttatactgcttatttagtattcatggagaatgctgtatgaaaatttgattagttcttttttttccttccaaattccttccaatcaataacttagaagagaaaattaatctctacctctttcccttcccaatttgtaaaaaatgagtgtaacttcccatctttctacttttaaaggatgttagacttcttggtttattaaagtaagagtgatattcttgaagattcgacgtgaattcaatttaatgttcttggcagacacaaacttagtttttttcccttttagaagaaaaccatatcaagccttcattaatgaacctcggtgtaacttttggctttctcaagacatttgtcatttgcgttgtacggctgtggtgtagatatcttgaaataatgctaaattttaattttatttccttgtgcattgtatttgtttttaaactcctgctcagtttacttaccaaatattaatagtgtgcctactttcagtcttctatgtttgaatgtccctttagtctatgttgctgaaattctactttatggaataatacagataactgtattggaaagtgtagtgtttgccctcaggagcatttactctgatagggttaatgattgtaagcccctaacgaaatttccacactagttactaagaatttttaaaggataagtgattttgtttgtaaccctacaaccctgttcaaaacaatttgatgtttgtactacaggttgagtatctcttatcttacatgcttgggaccagaagtggtttggattttggatttttttttttgaatttgtaatattcacatatacgtaatgagatatcttggagatgggacccacattgaaacacggaattcatttatgtttcatttacttttttttttttttttttttgagacagagtctcgctttttcgcccaggctggagtgcagtggcttgatctcagctcactgcaacctccacctcccaggttcaagcgattctcgtgccttggcctccccagtatctgggattacaggtgtgccatcacacctggctagtttttgtattttagtagagatggggtttcaccttgttggccaggctggtcttgaactcctgacctcaggtgatccatctgccttggcctcccaaagtgctgggattacaggcatgagccactgtacccggtatcatttacatcttatacacatagcctgaaggtagttttatacaatattttaaataattttgttcaggaaacaaagtttgtgtacattgaagtgttagcaaaggtgtcacaatcttagtcactcatgtgcacagtctgtagttatttagcatcaccatcacactcaactgaatttatatgatactgataagcagtcattttcttatacttattcacacataagtataagaaaaaagtaaaaaataacagtaaaaagtatgacataccattaatatagtggaataataatgtgttcagggtaactaagcacaatagcatcaccagaatatgtgtatctgctgttaagcaacatcatcaacaaataaggttaggctttcagtccccacctatgatgttattttttgattaaaaggtttctagactttttgtttgtttgtttgttttattaaggccggaagaaacatcagaatcgattgagggaccaggaaatggggcctctagggaagagaaggcattctgctagatggcttttaaaaatatttccgccagagtcacttgtctcattaacaacagtttttgtcttagaagtctct

SEQ ID NO: 12395 - DNA, 2300 bp, Homo sapien
cgaaaaaggtgatattgtagacatcaagggaatggctgcttttcaaaaaggagtgctccgcaaatgttaccacagcaaagctggaagagtctacagtgttacccagcatgctgttggcattgtaaacaagggcaagatttttgccaagagaatgaatgtgcttactgagccaggctggtcttgaactcctgacctcagttgatccatctgcctgggccttggcactctaagagccaagtaagtttcctgaaacgcgtgaaggtaaataatcagaaaaagacgtcaaagggagaggtgtctgagttcaactgaagcgccagcctgctccacccagacaagcacttagaaccaatggagggagcctgggctgctggaacctattccctatgagttcatggcataataggtgtcaaaaaaaattctgaactgtacaaatgtttctcttcattgagaagtgtggcgccgccccctccccttaaagaaatatttaaactacattttgtatccaaaaacctcagtgctctgctgttaagtaatacattaatatgcgttctctgaaaatatatagcaacatataggagtttcaaataactgcataagctagatactatctgtgatatcatctagcacgataggaattaatgtgtattttttgccttttaaaatattgaacagttgatcctgatcattaggtattaagcactgtgaaggatcctgtctgaatacaaatgaaacataagcccgagaccttaaaaaataatccttttgtttgaaatgatcagagagaaagacttctcacttaaaaataaatcttaaactttcaggaaccattcaagtttagtgtaaactgtattctgaatatagagaatttttgcttttgcttgtttttgtaatcctacgtgatttgtatttaaaaagactgggtaagattaagaagacggaggagcaaagggctcagattcaagacctaattagcttgtagaatcaccagttttcgatggtgatgtggagattaacagggagggacgggctaatatgaatcatggctcttggctgtaaatcatcagtgattacgtcctttaccaaagtaagaaaacaggtttgtagggaggcagaagtcagtttccaacactttgagtttgtggtgtcctggaatgtcacctgatacctagtaagtagttctggatctttgggtatggaacttgagaaaggaatcctggctagagagagaattcagggcagtttatcagtagatagcctagtaaaatcatccttgagaatcactggtctatttaatctcacctataaactcacttttctctgtagtttagaggcatattcaaacactaattactctgatatgatcctcccaacacatcaccttatatatcccctatccaccaaaagaaacttgaagggaagtcctaaccatctacctagttcaaattctcttagagcatggcccagggtagggaaggtacgttagccacgtgattaacttttcagaaggatacaattctgattttgcacgttcactttggttgttttcactattggtaaagtataatactattaaccatattaatcctcacggcattagatgggtactataattctatccatttaacacgagagaacaggcgcagagagattaaggaacttgccccaagtcacacagctattaagcaggtgagtgagccaaaattcaacctagttccaagacccagccccttcaccctactttgtttgctgtagtttagccagattttaaagcatccacagcaagttaaattcccttattccgctcccattccgttttcccagaatccttagggtatggtattacaattttctgcacaagtttgaggctttaactcgtagtcttggcctgagccagcagatgacattttgtttggccgactagcccctctaatataactctccccctgcttcgggacctgttgcccctcagcagaccggaaaaacaacagtgcccgggacaggaacacgcggcggcggaggggtccgggggctcgccggcatcccagccccccttccccaggcccctcctcctggcccagaatgcacccggttgaaaacaaaatcccacgtgactggctctcctctcaggccatcatggcgtctcccagtgggaagggagcccgggcgctggaggctcctggctgcgggccccggccgctcgcccgggacctggtggactccgtggacgatgcggaggggctgtacgtggctgtggagcgctgcccgctgtgcaacactacccgccggcggctgacctg

SEQ ID NO: 12396 - DNA, 2300 bp, Homo sapien
aatgtttcctttattcttaattagaaattctgtaagacttgttgtgatttgattcttagaatgagctgtctctactataatgtgcttcctatgctacgttctaaggtcagtttccttcatccatccagttttactgagcagataagcttggtacagagacattaaaattagttatcaaaattcttgctctcagagagcaaaatctagtaaaaaagatgtattttatgtctgcctctgtacattttttttttttttttgagacagagtctcattctgttgcccagggtggagtgcagtgacatgatctgggctcattgcaacctcggcctcccaggttcaagaaattctcctgcctcggcctcctgagtagctgggattacaggcgcacactaccatgcccagctaatttttgtattttaggtatagatggggtttcaccatgttggccaggctggtcttgaactcctgacctcaggtgatccacctgcctcagcctcccaaagttctgggattacagacatgacccaccacacccgggaatctgtacatttttacgtatcttacataaaaagtgtcaattataggccagacacggtggctcgtgcctgtcattccagcactttgggaggccaaggcaggtggatcacctgaggccaggagattgagaccagcctggccaacaaggtgaaaactcgtctctactaaaaatacaaaaattagctgggcatggtggcaggcacctgtaatcccagctactcgggagactgaggcacaagaattgctggaacctgggaggcggaggttgcagtgagccaagatctgcactccagcctgggtgacagagcagactctgtctcaaaaaaagaaaagaaaagaaaaaaggtatcaattatgtttataaagttgttctacacagttaagctcttatgcaggcactgaaaattaaaataatgatttcaggaaagagaaaccctctctgaatgttttgcgttattttcgtgagatttcctcaaccctaactgtgcagcaacacactgttttgtatgtggctttagacggaacgctcagtgactggagaaaaaccacgtgggatttgatggtgagaagtaatgataatgtaaaaatactacacctgactaggtaaggtgactcattccactcactctgctcaagagaaaaaaaacatccctggcggaatgcagtggctcatgcctgtaatcccagcattttgggagtctgaggcaggaggatggcttgagaccaagagtccaggaccagcctaggtaacataccgagaccttgtcactactaaaaataaaaattataaaaataaaattagccaggcgtggtggcacccgcctgtaattccaactgctagggaggctgaggcaggagcttgagtccaggaggtcgaggctgcagtgagctatggtcgcctgtcaccgcactccagccttggcgacagggtggaaacctagtatttaagtttcttagaaaaacggctgggtgcagtggctcacgcctgtaatcccagcactttgggaggccgaggcgggtggatcacctgaggtcaggagtttcagaccagcctgaccaacaaggtgaaaccagtctctactaaaaatacaaaaattagcaggtcatggtggtgcgtacctgtaatcacagctacttgggaggctgaggcaggagaatagcttgaacccgggaggcggaggttgcagtgagccaagatggcactgggcgaaagagtgggattccatctcaacaacaacaacaaaaaatccctttttttttctcactttccatgcacttgcaccgagaatttctctcctgggagcaaagaccacattgcgagtatcgaaggaaatcaaatctgcaggcccaggcccttcccagctgcgggcagagtggggtgactgcccccaggcgagacgcccctctccggcccacccctagcccatctccgcttcccagcgcccatgggccggtagctgggttccgcatcccgctccaagcccatcgcccaacgcttctctcgcgccctctgcaggaacctgggccgagggccgccccgcctcgctgcccccaggctcataaatggcctctgcgccctggccggagcgggttccgaggctgctcgctccgcgcttaccctcttacccgcccccacccccaacagtgggattacggtccatggagcaggaggagacctacctggagctctacctggaccagtgcgccgctcaggtgaggctgccgccactgtcccagagtcaggacccaagtcccgcccggtc

SEQ ID NO: 12397 - DNA, 2300 bp, Homo sapien
ttttagtagagctggggtttcaccatgttggccatggtggtctcgaactcccgacctcaggtgatccacccagctcggcctcccaaagtgctgggattacaggtgtcagccactgcgcccggcctctagtaaatctttttgttttgatgtgaataaatagaaagcttataaaaaataaagcattcaaccacttccctttctatagtcaaagttcaaacgccagaaaagccgaaataggtgatacaaagtcatcctttagtataagcagtagtatgttttgagaaaatcctaaactccactcattgtcttacttacaagtgcaccgaaatattattgcctgtaaatgacattgcggttttactggtcaggaaaatgaatgatataaatttttaattctaacctaaaacctgcgttagtactaacctgaggaaataacatggttgtttgtaagctaatcaagagcccttaaactccattacataaatgatacacttaccctttgtattaagggactaacggcttcgcttttcaacaaagctggatcttctggcacacgctcagaagatagccagtacttcagagacagattgctttgagggcactggaaccgctgaggggcagagtaatcctaatgagaaagaaaaaagaggacgcctctggagttaaaataagacaatgcatctgtggagaacacggtgactgaagactggcagaattctcaatatctcaggccactatacactgcgcagttttcatttgtattttggaggtgctctagaaaacttagaaatgattagaataaaaagtatggatacttttaaccagcccatgtacaggaaattctgttggtgtagaaacggttctgctgttcattccttaactgcttctgttcccactttgtcagatgtagggcgaggtggtggtggtgagtcctaattttttctatctctatccacagtctggaatcgttaggattattttaagccttcataacatttgcggacagcttggagtgttttgtacatgtagtggggcagtgcctggcctcctgtgagagattgatcatcggtaaacaatccacacgaaactcacttgccagtggacggggaggatcgctgccatcctttcagcaaagagcaaacgaataaggagagatccgggcccatccctcctcgcgcagcagtttctagatttttaccccggcttcataaatggctaccagctggcagtcacaacactttcataatgtttgcacacaactcatttgggtcgctttcttttctttcctttttttttttttttttttgagagaaacggagagtcttactctctcgcccaggctggagtgcagtggcgagatctcggctcactgcaacctccgcctcctagattcctgcgattctcctgtctcagcttcccaagtagctggggctacaggcgtgcgccactatgcccagctaattttttgtactttttttggcagagacgggttttactatatgttggccaggctggtctcgaactcctgacctcaggtgatccgcctgccttggcctcccaaagtactggggttacaggcgtgaaccaccgcgcccgaccattatttgggtcgctttctaatttctttctccgtttgtagctagcgttgcccgaaggagatttcagagagatcccctggagaaagggacgggggatgtcgttttccagtaatttctgggggaaatctgggatagtcagggggtaaatctagtgccgtttgctgaagttaaaaggcgtggggagccaggtggtgccctggagggagggccgcgcgagacgagaccaaccttcgggacaggggagagcggggctactgaacgcaggggattccgctgagcctccagcccctgagcgtccaccttcggcccagctgggggacgcggtctcgggaagaaagcccggaatcccgagccggccagccgcgagcagcgagtaccggagcgcgtgggcaggcgcgcggaggcagaggcgggccggcggctgtccctttaaggggccggtctcccggcgccgccggcccagacgccaggacgtgccgggtccgccccgccccgccccgaagccgcccgtttcctgccgagcggcgcgacggcacctgagcgactgcggcggcggcggcggcggcggcggcgcctcggagcgggcggcccgggctgtagtgccggcgccgccgcgtcttcccggtctcctttcccggccgcacagggtgagggagagcaggccgcaccgggacgggcgccggcggcggggagcgcgggggg

SEQ ID NO: 12398 - DNA, 2300 bp, Homo sapien
aaatgtctcttcataatgctgacgctgaatcattaagagttaaatacttgatattctttataattttcaagtattaagaaaatttttcaatagatcttgttatattttcaaattcattatcagcctcaagtaaatcaagtagaacaccttattctctaagctcacttgataaggtattgttatgtctgatgaaggctacaaaattagaagagacatttgaaactcaatgttggggtgggagggaaactcatgaacagacccagctatttcaggttagatccttaaactaaaaaaaaaggaaaaaggaaaaaaaaaaagagccttttttatcaggcagcacatcaaatatgaaagtctactgcaaggcatgtctacccaaaatactcaagagtaatttagtgttattcttgggatcattatcccaagtctcaccagcttgggatcattatcccaagtctcaccagcaattgcttcggaccaaactggagacactgttgccattagcctgctaggtaagctaaggaaaacaaatgcaacctaatttagcaaaaattctaactttaagtcaactcctatacaattcagaacctttagttcaccgaagatgcttatctttagctgggctggccatgagtgtctacatttctcaaggctttccacaaagtcatcacacacacacacaccttaacagttaacttcaaccgtagctctttactcaaggctttccacaaagtcatcacacacacacactcacacacacacacacaccttaacagttaacttcaaccgtagctctttaagcactactaacttaaatagcggctaaggaatccgtttgccaacacagttctgaatttagattcctccttcctcccacaggaaagaagggccaacactgaacagcttactttcaacctaacctagtcaaggtgcaactggggccggctgggacgccgctgcccgcgtccggggctgcccacatctagtgcacccagcgccttcaccgccagcatgcggggctgcacatcccacaccagacgtatggctgagagccagacgacttctctagacttcccgcgtagttttccggcgaggtccccaaggccaaaaatctcacttttggaaactgaaggggtcaggccgaatcgctaggacacacccctcggggacaggaagggataacttcgccggtgtcgagagtggtccatggatttttccaaagtcccccctcatgctgctttccgtgcccaaccgcctcccgccctgacctggggactcgcaaagggcagcgggaggggcgccggggaagggggcgagcgcccagaccgccggaggcagcggcgaggactggaactccagcatggcgtaagtgtggcccagctccggcccggggacgccgccggagacgcgctgcctccgtccaccggccgaggaggcggtaatccgccttccctcccgggggccctcaggcttggctaaaaataggtgcctcggtcaccccagggcccgctcgggtcgacctcgccttcgggagagtcgtccttggggagggtggggggtgtccctcggccgcgccccgggtgccgcgacagagccggggtcgggcccagagcggccccgcgaggccgaggaggtccctccgagcccgccccctgcggcgtcccggccccaacaagagccccgcggcggcaaccggatgcccgaggcctacccagcgggcggcgtccgggccccgcggccgcgcccccccgcccggcgcggccctcccgcctgccccaggaccccgcggccggcgccgcctccccccgcgctccccgccgccggcgcccgtcccggtgcggcctgctctccctcaccctgtgcggccgggaaaggagaccgggaagacgcggcggcgccggcactacagcccgggccgcccgctccgaggcgccgccgccgccgccgccgccgccgcagtcgctcaggtgccgtcgcgccgctcggcaggaaacgggcggcttcggggcggggcggggcggacccggcacgtcctggcgtctgggccggcggcgccgggagaccggccccttaaagggacagccgccggcccgcctctgcctccgcgcgcctgcccacgcgctccggtactcgctgctcgcggctggccggctcgggattccgggctttcttcccgagaccgcgtcccccagctgggccgaaggtggacgctcaggggctggaggctcagcggaatcccctgcgttcagtagccccgctctcccctgtcccgaaggttggtctcgtctcgcgcggccctc

SEQ ID NO: 12399 - DNA, 2300 bp, Homo sapien
agttcatatcttcataatatgtttcttaggggatgagatttctctttagcacaagcctgagcataccatattaggcataaaaacttatattagaaatcatttctgaaattcataggatgggctttgtatggtcaacagtaggtagactctttaatgtacttttcaaggtgctatctcttgatatttttattttgtaatagcaaatgttgataggtagggatctaagttgtattactgtttacctaaaatcttgctacatgtattcatgttctggtttagaatttcagaaagagagaaagaaataagtggtctctggaatgagttagattctttgaaggatgcagttgaacaccagaggaagaaaaacaatgtaagtagatctttatcagaatgaagcttttctttttattactttaacactgaaatatggttcaggaattttttttaaatctacttttactttagatttcttaatctttgtaagaaagtactattttctgtgtgtagttttttcggggggcggggcattattggagaacagttttttttaaataagtgaaaagatgaattcttattcttataaatatttaaatgttgaagctataattattatacctttagttattttaaaaagctaaaaatgcaattgactttttgttgaacttttatttggaaaaacatgtttttcagcttggtattttaaaatcaaagatatttcctcttagattgggctggcctttttgtaaactaaaagtaatgccagtattcaaacccagtatactcagtaatggggtcttttgaaagccttctggaacctcctcctgccctttttttttttttttttttaagacagggtctcgctctgttgcccaggctggaggtggcttgaacttggctcactgcaaactcggcctcctgggttcaggcgattctcctgcctcaccctcctgagtagctggaactacaggcgtgcaccaccatactcagctaatgttttttgtatttttagtagaggtggggttttaccatgtaggccaggctggtctcgaactcctgatctcaagtgatccacctgcctcggcctcgcaaagtgctgggattataggtgtgagccacggcacctggccagaacctcccatttttaactgagaggtggttcaaattttggtaattaagtgtgttagaggctttagaacctgactacatttatactagaaagggaagggatagtgctttcagaaatatgaaccctaataacttactgaatagacaaacaatttagtggaatttcttaacttttctcataccagagggcaacacctgtaagtagagtccaagcattcttgctagagaagaaatttttgtacactgtagtgtgattgctaagacttgagcaaggataaaatgttactgaaatctaagggagtattgctagtaaatggatgtgtgttttctgtttttcaaagtttgtgttaaattgttaatttaacaagttgacattttcttgtacccctgagtttgtcaaaattaggtacatgaattgccacttctgtgttggtataacagtactaacagcattgcttagccacaaaacttgaggtgaacttgccgatatactgctaacatcttaactgtgttttattattggacttctgagataaggagggcatggtaatgcagcagcagcagcagcgctggagacattgaacccgtgtgaaaagagccaggacactggaggccagcagatagcagtgtcagtctttccttctagttttgccacttcgttttctgtgtatacttggctcagtttcctaacttacttgagctgtggtttccctatctatagaatgggaataaatacctcatggggttgttgtaacggtgagaatttgtgaactgccaagtacagtggttggcatatattaagtaataaatggtgattattggctttttatttttcgttgttggtttttatctgtttagatttctcattctgaaaaaaaagactgaaatatagcagattatatttgtgaatgaaatgctgttaaaatccagatctctcaatttttaataacctctttcgcctccaagagaatctattttatagccttccagccttcccctttgctttgatcaactagctcatacaattcatgtaaggttgttttgtggcatgaatgtttggccatgccaagaaagacataggacacagtgggttactatgggattcctaggtagatttgaaacatgttaattgtattaaaccatagagaaaaaacgttacactgcagtggaaagtc

SEQ ID NO: 12400 - DNA, 2300 bp, Homo sapien
gtgatgaaaaggaactatgtgaaacacttttagtattttaactagaaataagttacggtcagcttacctaaaatgtaaagaggatgatatatgctgtctttacaggattatttttaaaggctaaatactcttgaggagctactgaaagaaactcttatacatttcacttaaagatggtatgcaaattatagttcagttttcaatattagatctttcccagatgttaaagtggaatggaaattgctgtctataaccaaactactgtgtcagatgaaaactacttagctaaaattgttaataccaaataaaagtaacttcccatgtttgtggctcttggttatgttagatactttgttcttttagttagtctttttttttccttggaaagttttcaaaaagctgttcctcagtgtctcttttcctaaccggttttctttaaagattagtactttggtcaaatgataagaattacctcttaatgtccttgaaatagcattaattattttccttattttatgcagttaggtgtattcctgaaaattagtggacttcattgaattattgaaaatatcctattaaaacacctattgtaaaaatactgctgctgatctttaacagctttttgtgtgtatggaaaatggcaaaatctgtagctgttgtgtaaattttcatgtgattagattttctaaaattgaagtgtgtagaccttgaatcagtgatagatttcaaatttcacatataaatgttgggggaaagatatggttgagatgtttctagcttgcttgccttcttgtcacctgttgaactttgtgactgttgtttttagatgattttcttggcttggtttagatgtgcatttttataggggtcttttttttcaagtcttgtggaggtagttgaaatgttacatttttgtttttggtgcgtgataagtcattaccctaattttgacaaaccatggttttgagtttataattgatatccattagacttggatttaatatcagcacatttagacttagacatttgtaatatttgtaaatttatagcagagtccatatacaagtgtcagaactagtttttatgatgtgtggcattagtgaagtaatatgccatcagttgctccttgttctttctttttcccatttatgtcatccatcagattttgatggtcctccttgtttagcataaatacttcacatgaccttgaagttggaaataagagagttaccattttaatgccatgatgttatatagtccatcagtgatgcattttttaatagagatataccagccaataaagctcagttgtgttcctccaatgtgtattttctactataggtagtttataaagttttagctataagaaatgctttttgtgtgtctgattttgaattgttcctggacaggcaaatcacttgatttctaaatgccagggaaaatgtccatattgtcagatattgctaaggcattatttgatatttaggatgctttagagattttgcagattttttcttatgggagcattttaatatcttaaagtgggaaattttaatatttgttagtattaaaaattttttttaaactttttcttcccgtagaattataaaacactatagtttttttcttttctttttttaaaaacattctgtgatcttgtaagtttgatttggctcatcttctgctttaggaaaggcagcaacaggtggaagctgttgagttggaggctaaagaagttctcaaaaaattatttccaaaggtgtctgtcccttctaatttggtaagactaatttattatttttttaacatgatgacattattcaagaaaggtgtgaataagcaacatcatttgcactccacttggtttcagtagagtgctgatttcttgatctttcctattgttaagctggtgcttttcagtaaagattaataacttggttcaaaactcatttctatttacctgatactattgtttctataaaattttatatatgagacattagaggattaaaaacatcatatttgggaaagaaatgttttttaatgctaataaaaccaatatggtaacattcttaatggctttatttaaaacttaattttaagtgattgcttcttagttttagcaacacttccttaatgtacttgatactatgaactaggctctttacattttaaaactcaagatttttggtcatctattaccttcttcaagcagaaatcttacagataatatagaacaacttggtttacttgaggtagtacatgttctcctttgttcagagaattaataattatttgag

SEQ ID NO: 12401 - DNA, 2300 bp, Homo sapien
tgactaaagggtaatcatatagaatgtagaatgctagttacagaactattgtgtgataaggtaaagaatactgggttcaaaatcagttttaaagtatttaacccataatatagaattcaagaaaaagtcattcttctattcctgggacctgaatgttattttgcaaccttaatttttctcccttttacttcagcgtgataaagagtaccattactcacttattttttggggccaatgtgcagaatttacagttgctgatggtactctaatgcacttgcagaataaatacagctgaatatcagttaatactaataaaaaattaatcacttttagccgagcctaatatacaaatggagtaggtttggaccacaatttaaatcaagttcaatgtgactcatttttaaggtcttttaaaattcatctcttttaaatgagatgcatttcaaaaccttggaagtgtcttttaattgatcagaattctacaggatagaaactgctatatccttggtggttttacttggccatgtaattgtttcacatttcagatgcagtcatcatttacatcttcagaacaagagctagagcgattaagaagcgaaaataaggatattgaaaatgtatgttatttgattgttttacttgtaacctatggatttgtttttagcattaacggttgtctgaagatctatagtttaagattactttatagttatgctcttaatatcttgggtagtgtttgagttgatatagttttatattcataagtgtcataattttgtcttgtggggaaatattatgaaaggaaattttaagtgtgttaacttttcctttgttgcattgctagctgagaagagaacgagaacatttggaaatggaactagaaaaggcagagatggaacgatctacctatgttacagaagtcagagaggtacttacaacagaatcttttcaaacttgcttctcaattcagattaagtttataacagtgatatttcagtataagttgtttgtggcagagcttccgagtagcatacaaaacatgggctatcataaggagatcaatcttaaactctaaacttcattgcagctgaaagatctgttgactgaattgcagaaaaaacttgatgattcatattctgaagcagtaagacagaatgaagagctaaatttggtaagaagcttgtcctccactgggtatcaagtaggcactgaaaacactttattgacatgtggagaaaccatccaggcttttttttctttgctaacatctttagcttggcctttttgtaagtctaagataatcttcatattccgatgattcctaagattatctttcttttcttgactcctaaaatgatccttcttttcttagctcctaacaatggcatgtttggcttccaactctttttcaaaattttccatgttttataaatcctattttctcaaacagcagtcttttctgtgaataaagaaatgaaataaagattggctgagttacgaagattttcttctcagactatcatagttaatggggccttttattttctaacctgggagaagattatattgaaagtcaaagacacatattcttcattcaagggcagtaatctaatccagtttctaattttaacctagtctctctatatattacaaatattaaaaagcgtataagagtctttattatcaacatattatttagagtatagtaatcctaaaagcataggctttgagataaagttagctaaatgtcttaaaacatataataccctgtattcctattctcaagttttctaaaaactgtactgattgtgacagacttagctattagacaaatatggctgtcttgctctctgtttcaaacagcaattgttatgtcttccttgtgagttaaaaattgttacagcacagggattagattttttttttttaagtaccttaataaactctcagaagattacagtagtaagttttttccttacccaaagttcaccctgcccagtttggaattttcttgttagcattactccatgtaccaagaaaactttaactcattcatttgtggttggtatcctatgttatggcaaacatttatgggaatcaatttttagagtagagcggtatgaaatacaggttgcgtattctttatctggaatgcttggaaccagcaattttggggggggattttggattatttgtattatatgcttgctctgtatgtgtcccttatctgaaaatccgaaatctgaaatgctccagtgaacatttcctttgagtgtcatgtcagtgcttaaaaagtttag

SEQ ID NO: 12402 - DNA, 2300 bp, Homo sapien
agagtgattcacagagctgatctagccttgagctgcctaggataaaaagcctccattgacacaaaaactcattcacaacaacacttcctgtaagtcagtctgataaagacagacctgattaagtactataaacattctcaaagacatgttgggagagtagagagacatgtccctctggaagtcaggggtgccacaggcagatagctagacgggggggccttggaagattgggatatcctatgggaaactctcagcctagtgctgggaacttagtaggaggttaatacatatttctttctatcttcctaagagcagatgcgaagcacagcaaggaggaaatgcagccagaacagtataatgcaatgcaacgcacacaggcacagcaggccaagagagaaggaaggaggtaatggtagcctagagagcagaagcagcaacagaggaggcctagagaagctagggtgacagaggcaggcatcatcgtaatcgtgacggcgcaactgcagaatgattctgacagatctttgatagtcatacaatctatgtggtaagtagatgcacagagtacatgaagacaacattaatccagcagaaatttgaaagaaatttacatcaacactggggaggagacatgatttatccctttagtgaaggagtgctggttaaaactgtaacagattttttattacatataaaaaatatagagaatacgtaatatatgcagaataactaatattcatttgaaatacagaatttctatagttagctgaaataagttaactgtttaataaagtttatttttggcttaccagtggtgtggctttagttactttggaataatttatttctaaaacctcaattaaaaaaatcagttcctaactgaagtaaaattatcagaaacatcatgtcactaccgtaataacctgtcagagaatgttacacaaggggtgcagcacagcggaatggaaggttacagatgcaattattattttttctagccctttgcttcgggtcatagccaaccagtcactatacacagggtagcttctgcagtatttatttctttaaatatttaacagtgttgagaggcaatgactcgcaataatatgtagagtttctagcacattatgagtgcttaataaatgttagaacaataaaatcctgtatgatgaaaaacagcagtcagtaaaactatacagtctacgatattttaaagccatagcaataactagtttaaaaagaatagaaagcaaacagtgcattgattaaatcacggtcataaaggaacatttacgttcactaaaaagtccacccaggtaatttccccttgtatgtattaggggatggaaagaaggcacaggaaaagtggataaagtatggattaaaaaacaactcttcccccatccccccgccaccccccaaaagccaggtggagctctattgaccacaagccggggtagctacatccagtgcaacggtggggtgctccaagcgccttcgaaacgtcctctacgccagcaccaactggcaaaaccttctaattttctagacgcctttctgcttggttttggaaggggaggcacccaagtgggtgtgtgcgacacctctagttgtaagccgggacacagtgacgtcgagagagcgctattctactcggagaggaagttaatcccatcgaactccagccaggaaaacgtgggcttgggaaccgcggccgctcgtttccaggatctcccgcgggccttcgcggctgaagaaccaggcggcgagggctgaggaccccgcgctctaagtttggggaaggaagtgaggaaaaaaaacagagctgctcctttaagaacttcctttcccttttactctatgtttacataacacaggggccgagcctccgccgggccgaggggggcggggagtgggcgcggacggccccacgcgccgggggagggggcgccccgcgggccgggggcgggcgcctggctctgcgtggggcggggcggctcccacctgcccgcgcgctggcccccgcctcccccgcgcggccccagcctctcgtgcgcccgctccctcctccttccctccctcccgcggggcttcggcggcggcgctcagcgcaggcaggtccccctgctgccgggtcccatttgttgccggctctgactcggggcggccgcggcgcgcggagctccggggagtcaggcggagcagccgcgcagccacgacggagcagcagcgggactggccgccccgcgcccccttcgccgccgtgcccttccccggcgcgctcaccccgttctcgggat

SEQ ID NO: 12403 - DNA, 2300 bp, Homo sapien
agtcttctattagttcagtccatgcaattaactcctgttctgcttattcagcaaacctcatgaatatatcagtactccatgagaatcctggaagtttttctattttaatagcacaatctctaaatttatcagaaacttatataatcttagagttgattataatccactatataaaaggatcaaagtaaaataacaattgtgggtgacaaaaggcttagaccagccatgattaaagacgcaactaatgagggtacaagggatcatggtggacaggaggcaggactagattgcagctctggacagagcagcatgcggaggcttgcattatgaatttttagctccagatcaagtgcaagaacaaaccagcaatgcggagaggacccacagaccctctgaaggaagtgcattgctcatgcatgacccaggagacaccccaaatactgagtgccccagctgcggaagtgggaaagggagacactcctctcccgaatacacacccccactggagaaggtgaaggtctgtttgcaggagaagtttctgactttacctggagctgagtcaagttagagagctgagtgaaatacaggggtagaggaagcagcagaaaggccctgggagctcactgggtccctgagcagcccattccttccaggcaccacagggatccatcaggagggtggccagaggagcagggggtaaaactccacagggagaaggaattctctagctgaactttgtagcaatttgaatgaggcaagaagcctcctgggtagaacttgggggtcgaatcaggcatgcacacttcagaggcagaggaagaactaaagcacttttctctcacagctgggaggcagagagcctcaggcaagttttcgagcctattgcccactgcctggaaacagacttggggctactgggggaggcatggtgggagtaagaccggcccttcagtttgcatgggagctgggtgaggcctgtgactgctggctttcctctactttcctgacaacctgcatgacttagaagaggcagccataatcctcctaggtacacaactccagtgacctgggaatcttacttccatcccctatagcagccacagcaagacccgcccagggagagtctgagctcagacatgcctagccccacccccacctgatgatccttccatatctgcacttgtagtggaagacaaagggcatataatcttgggggttctagggccccaccctctgccaatccctcaccacactactacagctgatgctttctggaaagtgccacctcctggcagaaggccaaccagcacaaaaatagagcattaaaccaccaaagctaaggaccctcatggagtccattgcaccctccaccacttccagcagaacaggcgctggtatccatgactgagagacccacagatggttcacatcataggactctgtgcagtcaacccccagtaccagcctggagctgggcagacttgctgggttggctggaccaagaagcgagacaacaatcattgcagtttggctcacaggaagccacatccatagagaaagggggagagtactacatcaagggaacaccccgtgggacaaaagaatctgaacaacagccctcagccctagaccttccctctgacagagcctacccaaatgagaaggaacaagaaaagcaaccctgataatatgacaaaacaaggctcttcaacatcccccaaaaatcacactagttcaccagcaatggatccaaacaagaagaaatccctgacttatctgaaaaagaattcaggaggttagttattaagctcatcagggagggaccagagaaaggcaaagcccaatgcaaggaaatccaaaaattgatataaaaagtgaagggaaaaatattcatggaaatagatagcttaaagaaaaaacaataaaaaattcaggaaactttggacacacttttagaaatgtgaaatgctctggaaagtctcagcaatagaattgaacaagtagaagaaagaaatttagagctcgaagacaaggtcttcaaattaacccaatccaacaaagacaaagaaaaaagaataacaaaataggaacggagctccggtctacagctcccagcgtgagcgacgcagaagacgggtgatttctgcatttccatctgaggtaccgggttcatctcactagggagtgccagacagtgggcgcaggccagtgggtgtgcgcaccgtgcgcgagccgaagcagggcgaggcattgcctcacctgggaagcgcaaggggtcagggagttccctttccgagtca

SEQ ID NO: 12404 - DNA, 2300 bp, Homo sapien
ctcaaatccagcggtatctgcagctgcccatgtggcctgtggataaggctcggctcgctaaagcaagccttaagtgtttctaaaaaaggaaaaccaaaatgaacccaaacagagaggaacaacctaacaggtttcttccctgagtgacggggaggaggtagcaggcttcatctttcctcctctgagaggcactaatgctttagggcctcaaagaatgccccaatttatacaattcatttctacagcattaagcctgaatggcatttggtggcagataaagtcgctctgtgtcacacagtggaaggctgtgtggccagatcttgtttagaattacatttaaaacctggaaatcaaatgatatgtccagataacttctgtggtaagccccaaaccagttatgcttcaggttaagcctctgcatttttaaacaacatgccttttattctctctaggccaatactcggaccttcctgccagcaatatcaaatagcaagaggctgaatgtaccctctgtgtgtgcattaaaggataaacagccgaaggaggcagtgcctctctgctgagaaaatctccatctttgatatctctcctctacaaacacatcaatcaaaatagctcatttcctcttgatttctggagttattttctaattcttaaaattttacaaacaaacaaaaactaaacaaacctaaaacatcccatcaccctgagcaaacagagctcttagttttctgaatttctttttcttatgtctcactcttgaacagaccttttttttttgtatttttagtagagacagggtttcaccgcattagccaggatggtctcgatctcctgacctcgtgatccatccgcttcggcctcccaaagtgctgggattacgggcgtgagccacatcacccggccggatgtcctcttataacatcttgcttctcagggtctcagagagtttgagtgcactaggaaaatggacagaccttcctggtggctttccggggcaagagaataatcccatcttggcagcaaagacagaaaagtaacacgatttgtttatgttattgaatgttcgtgttattgccaaggaaaccagggcgtatgagacaatgcaatgtcttgagcaaacttggagacataaggctgagggggcttgtgatgatgtatatcccctgtgtataagtcctatttccttgggaaaaagtctggccctcccttctgcctcccattaaggcacctcctgttaggcacatgtgctcatggtcataccaggcaccaggagaagcctttaagcatctaccgtggtttcctgtgggcagtgggatcagcttccatttaaggtcatggctcatgaaggagtagctaagatttccttctgcacatgcttccctaaagcaatacttgattcagagaagaaaaggtataagctgggacactgagcacatttcagtccactggggacagggacacaccatttgtagaactccactatgcatcattttattactttagaagtaaaagaagaatttttttcttcatgcaaaaaaatgttgcagtagattctcttgctaaaagagtcatttaaatattactggtcacgtcacattgtagttgtttggaaataattatatccatatcacagacagtaaataatagatgtgcgttcactaacattttattcatgttctgttttaatatggcaaacttagaagtaatttaatctcccagtaaattgaagtggtggggggttcttcacacagaagactgcaagttattaattccgggcagtcttcatcttgtacaattagtcactgtttgcagctggaaatgttttattaattttccatagcagttgattttccacagttttctcagtttaaattaagcagtaagagctgctgtttcttcttaaataaattttctttccacaaaaatacatgcctctggctatgtcaattttcccatttgattaaagtgccagcaggcaattaataacttaatgcattttaaagtacttttggaaaaagtaatttgaatagccaaacttgtgtatttgaatggattgttacagaagatttaataggcattggaaaatcctggaaccttgggaaggacgaaatgaggcccgcaaactgtgtctggggacctgtggggtggtcttcatgaaacgcccgccatggaaggctttcagctccaagaaaggcaccggcactcacacttggggggctgatgattgccactgtccaggaggctaaaggaagaaaggcaaccacgtgagtatatggcagactcagggctatgatggt

SEQ ID NO: 12405 - DNA, 2300 bp, Homo sapien
agaactggaagttcttaatcttcaaaggaaaacaaccatgaagctaatgaagcttaggcctcacagttcctctctagcccaggtgtcttccaatatcttgtgcctaattctgtatctgcagttttatatcagtttacttacatataattctccaagttttatacacttgagcttcacaaaatctagacgtgcctctcttcattgtcctttacctctctgtaacatcctgaccacatgtacttcatcgacttttcttctttagcttctggtgatgcctcattctcttacactgttctctccccttctccagccattccctaaatgagaatatgggctgacattagacctcaaccttgttctctctacactatccccttatcaagttagtcatttatatcatccttacacgagcaactcctaaatttgtacttccagcactgatctctacctcccaaacatggacaaagaattattcccctccaaaataaaaaaattttaaataaaactcatgagcaaaagtgaaatgcataaaaagggaaagaagtatatgcttgacccagtcaaggttactcattggcatgttctttcagcaaagaaatagaagacagcctatcttaactatctattgctgataactaacaaattagcctgcatttatcaacttaaaacaacatttattatctcgcggtttctataggacagcagtctggatgaggcttagttaggtcctctgcttcagggtcatccacaggctgcaatccaagtcttgacaggagttatagttatctcaaggcttatgtgggggaaggatccacttcctagctccctcacatggtgttgcctagattcagttcctctaaggttgttggactgaaggtctcagtttcttgccagctgttggctagaggcggctctcagtttcttcccatgtggacctttccacagggcagcctacaccatggtaggtggcttcatcagagagaacaagtgagaggacaagagggagtgccagcaagatgaaagttagtctttcataacctaatcttgaaagtgacatccatcacttttgccttattgtattgatagaagccaatccttaggttaagctcacacataaggcgagcagcttatacaggaagtgagtgaggaggcagggttatctgggaatccattttagaagcactctaccacacagcccctctcctccaggaactcacagtacagctgagaaattacctggaaaaggctggaaattgtataagtacctggaaaagactaaggtgtgctggccccatgaccgtcaaggtaggtatatgttactctatagtttagtcactgtgtctctatcaaattgcgcgtaacacgtttgagattgtcactggttttcagtgtgtctttgagatacattttatgcgggttgctctcctccccgcccactccaggataattgctttaataataaaacataagcttaaaaagcttaactgcgctgttatgtagttgtccttattaacggctccgattctttttttttgcgttacagctcattgtaaaatatggtgattcaatttcattttccactttgctgtgttgaaagctccagcaaaacactcctcttcattaaactaggagacacctttatcatggtttgagttatctgcatgaatacaggaactcaaatttcccgactcatctacagagttttcattatgctatggaatgaaaaaaaaaaaaaaagacgcactagcatattctaatctctctaaaaattactcagtgatttaataagtagcacacagacttattgtaattagtcatagtaacgtagtaaatcgtaataaatacataattgtgattaatgtatttattggcttactttgcacatacggtaaatacaccaccctttttttttttttagcacaggtaggggctcctggctgatcgtggcccttttgtgcagttccaccccgcaccgtagggggcaggagcagcccttcctcgctcgcggttttcgacgctgctttggtctctgtcagacccaaccaagtcagtataaaaggggggaatagccatggagaaggtaggcctgtggccgggcttgctttttaaagggaatgctctcctggtgattaggaaccttaaatcacattataagtaggtgaacgccaatgcgtggtgcactgcgggaaaactcgcagggcctggctcaagggaggcctggcattttctcctccccgcgctcaggcggagaaaggtgcggtccaacccgcggaggctcgacccggaagccgccgtggccg

SEQ ID NO: 12406 - DNA, 2300 bp, Homo sapien
tcacaaaatctagacgtgcctctcttcattgtcctttacctctctgtaacatcctgaccacatgtacttcatcgacttttcttctttagcttctggtgatgcctcattctcttacactgttctctccccttctccagccattccctaaatgagaatatgggctgacattagacctcaaccttgttctctctacactatccccttatcaagttagtcatttatatcatccttacacgagcaactcctaaatttgtacttccagcactgatctctacctcccaaacatggacaaagaattattcccctccaaaataaaaaaattttaaataaaactcatgagcaaaagtgaaatgcataaaaagggaaagaagtatatgcttgacccagtcaaggttactcattggcatgttctttcagcaaagaaatagaagacagcctatcttaactatctattgctgataactaacaaattagcctgcatttatcaacttaaaacaacatttattatctcgcggtttctataggacagcagtctggatgaggcttagttaggtcctctgcttcagggtcatccacaggctgcaatccaagtcttgacaggagttatagttatctcaaggcttatgtgggggaaggatccacttcctagctccctcacatggtgttgcctagattcagttcctctaaggttgttggactgaaggtctcagtttcttgccagctgttggctagaggcggctctcagtttcttcccatgtggacctttccacagggcagcctacaccatggtaggtggcttcatcagagagaacaagtgagaggacaagagggagtgccagcaagatgaaagttagtctttcataacctaatcttgaaagtgacatccatcacttttgccttattgtattgatagaagccaatccttaggttaagctcacacataaggcgagcagcttatacaggaagtgagtgaggaggcagggttatctgggaatccattttagaagcactctaccacacagcccctctcctccaggaactcacagtacagctgagaaattacctggaaaaggctggaaattgtataagtacctggaaaagactaaggtgtgctggccccatgaccgtcaaggtaggtatatgttactctatagtttagtcactgtgtctctatcaaattgcgcgtaacacgtttgagattgtcactggttttcagtgtgtctttgagatacattttatgcgggttgctctcctccccgcccactccaggataattgctttaataataaaacataagcttaaaaagcttaactgcgctgttatgtagttgtccttattaacggctccgattctttttttttgcgttacagctcattgtaaaatatggtgattcaatttcattttccactttgctgtgttgaaagctccagcaaaacactcctcttcattaaactaggagacacctttatcatggtttgagttatctgcatgaatacaggaactcaaatttcccgactcatctacagagttttcattatgctatggaatgaaaaaaaaaaaaaaagacgcactagcatattctaatctctctaaaaattactcagtgatttaataagtagcacacagacttattgtaattagtcatagtaacgtagtaaatcgtaataaatacataattgtgattaatgtatttattggcttactttgcacatacggtaaatacaccaccctttttttttttttagcacaggtaggggctcctggctgatcgtggcccttttgtgcagttccaccccgcaccgtagggggcaggagcagcccttcctcgctcgcggttttcgacgctgctttggtctctgtcagacccaaccaagtcagtataaaaggggggaatagccatggagaaggtaggcctgtggccgggcttgctttttaaagggaatgctctcctggtgattaggaaccttaaatcacattataagtaggtgaacgccaatgcgtggtgcactgcgggaaaactcgcagggcctggctcaagggaggcctggcattttctcctccccgcgctcaggcggagaaaggtgcggtccaacccgcggaggctcgacccggaagccgccgtggccgccgcacaagctgcgctcgtctctcggctggggagctccgtgtcgcaccgggttcttgggctggccgtgtccttctccctcggtcgccactggcccatgagtccccatggcgacggcaggggccaggcccaggggcgggcagtccgagtggggctgcggcgctccgggggcatc

SEQ ID NO: 12407 - DNA, 2300 bp, Homo sapien
catcattctttgagcacttacttactttctggcacaagatgtttcagactaattttgtgctagagctaccctggctctagaatcagccatttctccaaggatgctaatttcggttttaaatagaggaaggaatattgtatcttatgctgactttcctgaataatattgatatatgaaacatagaagttcctttataaatgttagaaatactttaatttgttctttcattcagtaagtttcctttgtgtgtttggggctagatacttccaatataaatgaaatttaactccaattcacatttcaaaaacaatggtaaagtaattgttacagacaattaaatactatagatgtacagaatgggctaaaaacctaggaattgaagaaacatttgagaaagaagtaggatttaaataaatagaaaggagcagggaggactttagattcaggggtacagaatgagcaaaggtatagtgctaggcataggcatgtcttattaggaaattttgatgagcctgactaattggtggagagaataatgttgatcattagtgaatgagtgggatccagtttattggaagcctggattctaggctgactgatttagaacttatccctcaagcagcggagagtccttaagtttttgggctgggtagtcataaaggatatgttttaggaaacttgatgtgatgttatattgcagaatagattgaaaaacagaagacaaattagggaactcttaaaataattaagtgtaaggcagtaaaaatacaaataggaatgagtagacaggaaagtaatttggaaggaagaaataataatgtgttgaatcaggatcgctggaagaacgggaagctgaaagaaatgggaaactgctgattttttaagagaaagaaaacaaataaattgcaaacagaaaatcaaagtaaaaacaggtttactgatattgagatttttatttaatcatttaaaaataatgattgactaaagccatagaactaccctgtaactttttatacaaaaggatacagttgaaaatcaatggtttggagctatagaatatgataattgttggacgcagtaatgcttgctgaattttctaacactattagaaataggcatttcataatagctttcattttcatagttttagattaataaggaaatagaaagttgttttggtttgatatgcactagtaaattcatccacactaccagtctcaaaacaaatctctgaaccgagatccagattcctgattgttttaaatggtatgggttttgttggcatttgtgggtgagaaatttgtttctgagtgtagcatctgattcttctggtgttattgaaattcacattcccatcttcttctttagaaaaaaaattagttttaacttcaccgttgtctaaagaaaaaaaacccttgcaaagtaagaaatgcactgtataagatattgaaatcatcagatattgtgatcaagacattctttgccatatgctgagagatgaaaatagaaggtacctaggtccaaacattctacctgaagtgagaatgcatttttctgaataaatattttttcatttcattaatttttacaatcaaacatttaggtcttaactaggccatccttcttcatggatggagcaagaaaatgacacaggtttgttctctctgtagctactgtgtcttcaggttttctgaactggcgtgaatcctagcagttaacatctgaggactgaacctcattctagccataggttagtttatttgttcattaataggttaacatatgaacttcctaattaaaatctgttgaaggaaattattatatgagttaatgtattaaccatataatgtgttggagtagtgctgggtgactatcataatttctgctggtacagtttaccaaaaggaaaataaagttagttctttttgttggaaaagaagatttcatgttatctgtgtttgcaggctttctggctcatctgctggaggaatccttgctgcgggggtgttttcattttctcgtctaacatggcagtggtccattgcagcagaggtttttagcttaaacaatctctttgtggggctgcttatggctcttactgtacattttgaggaagcagcaactgctaaggagagatcaaaggtaacctattttgatcaaagtgaaatcagtttttgttttaatttttagacagatgtatttctttttaactttggcttaaataccttttatctattctgattacagtcgggataatctagcatgctgagagagaaaatgatctcagtcttttttattat

SEQ ID NO: 12408 - DNA, 2300 bp, Homo sapien
ttccttgctttctttttaaacaacttcttttttctacttcaaaaaaggtacataagctttatagaaaacttagaaaatacaggtaagcaaaaataagaaaattaaaactacctataaatccaacatgcagagataaccactgttattaatctgttaatgactatatttttctaatatttttaagatttttatttctttttaaaagtaggatcatagtaaacatactgttttattagcctgctgtttttcactttacattatatcttggaaatacctccttgccatcagttactttcacgtaaccttttgatggttctcaccattgattgtaaatatttctttttatgtgtgagacttttgtggctttctcattttcgctgggggaatgtaacaagaagctcagttttcttttcaaaaataaaaatggcactgagtgcggtggctaatgcctgtaatcccagcactttgggaagccaaagtgggaggatcgcttgagcccaggagtttgagaccagcctgggcaacatagtgagacccgtctctgcaaaaaaaaaaaaaaattttttttttgagatggcgtcttgccctgtcacccaggctggagtgcagtggtgagatctctgctcactgcaacctccgcctccgcctcccgggttcaagtgatccttccacctcagcctcctgagtagctgggattacaggtgtgtgctaccacgcccagctgatttttgtatttttagtagagacagggtctcaccatgttggccaggctggtctcaaactcttgacctcaggtgatccacctgcctcggcctcccaaagtgctgggattaccagagtgagctaacacaaccggcctacaaaacattaaaaaaaaaaaaaaaaaaggcatggtggcatgcacctgtagttgcagctactcaggaggctgaggtgagaggatcgcttgagcccaggaggtcgaggctgcagtgagccaccttcatgccactccagcctaggcaacagagtgagactctgtctcaaaaaataaaaaaataaagataaagacagtcaaatgtcatatcaatgtctctgagctttcattttattctgctttgctccatgcagaaggactcactgcctgctcttttctatctaccttccagagattgttacagcattaaggataactggtatattttgtcttagcaaaccctacatgaactccaaagaactcttgagagtaatcctagaccatatgtctaacttttattagttgcacataaaagtcatctattgggacccttaaaggcctcctttacattaaaataatagcaggctgtatacccagaaaaaagacttgacaaaagtgatgaccactcacacccacacttctgtgttctgtgtggaccaagtcatcatgtagaatgaaggcataatcttagcactccctgaatgagaatgtctagtctttaatagtttcaggtgggcaggaacattgaaaaaggcaactcataattaacttatgagaaaatccttcaaaatgatagaagctaatcatctacccttttccagtcaagcaaattaaattttttccccatgcatatctctaaattgcaatcctgtacaaggaaattattgaatctaaccttaggcagtgaccatcttttagcgcttacacttaagcaatagatctccaagaataattttgagactgacttcattccttttgaagaatggtttgaaatgggcctcatgctggaatcaattttttcaagtgtatttgaaaatgagtaaggatatcttctcatagtagatgagtcttcattagtaaaatacacattgtatggtttctataattatggtatcacattttctccagtaaaattgccggtagggagaagaaagttctttgagatgatgtatagagtcatttcttttttaacaattggagacagctagagcagaagctattttagaactcaaattttaacacctgaaaatgcatatgagttaatggaagaatttagtttatttgtaggaaaaaaacataatacatttctctgagattgcttaaatgttttttgaaccaaaacaaataatatagaaaacaaggaaaccaattaaggaaaaaaataacccacaaaagaatggctgggaattatctctcatggcctttattttcttcatattagatctccagaaatctatttgaattaattttgttatcatttgctaaatcactggaggccatgtctacactgccaagagaaaaaagttcaaaaactcatttcaaacagcttcctaccaaaccagtc

SEQ ID NO: 12409 - DNA, 2300 bp, Homo sapien
aatatggtgagacttcatctctacaaaagatttcttaaaaattagccaggcatggtgtcgcatgcctgtagttccaggaacttaggaggctgaggtgggaggattgcttgagccccaaaggtcaaagctgcagtgagcaatgattgtgccactgcataagcctgggttacagaacaagactctgtcttgaaaaaaataaataaataaaatctaattgaattaaataggaaactaaatttaaaataaacttccagtccaggcacagtggctcatgcctgtaatcccagcactttgggaggccgaagcgggaggatcacttgaggtcaggagtttgagaccagcctggccaatatggcaaaacaccctctctattaaaaatacaaaaattagccaggcgtggtggcaggcacctgtaatcccagctactccagaggctgaggcaggagaattgcttgaacccagtgagaggcggaggttgcagtgagcagagatcacaccactgcactccagccagggcaacagagtgaggctccatctcaaaaataaaaataaaaaacaaacttccaattgttctaactgctttatagtatttatctccttaagaccccacagaagccagtgagagaatctggctcccaactgcggggacaacactgaggtgtggcaccttcttggctctggagggagctcggtccctggacctgcattctcccacaggccctgcctcctgcccacttgtctcagcatctggttgtggaaaaaaaaattgccatgtgatactgcagttgcatgtgatgattcagagggtaagggaacctgaacagagcttctcagcatcccaggacaacttataagtctcttctggtgccagcttcccaagatgattttggtctcctattatggggagctcaggtgaaatatgggcactgtgtgcctactcactctgcatctgaatagtcctaaagcctcatagaaaggttatatcctttctatcttcatatccttgatacaagactcccagctgggcatgatggctcatgcctgtaatcccagcactctgggaggctgaggtgggtggatcacttgagttcaggagttccagaccagcctggccaacagggtgaaactcgtgtctctaccaaaaaacagaaaaaaagccaggcgtggtggcgtgcgcctgtactcccagctacttgggaggctgaggtgggaaaatcgcttgaacccgggaggtataggttgcagtgagccaagataatgccactgcactccagcctgagtgacaagagtgaaactctgtctcaaaaaaaaagacacccttacacttcccctagaggaatctctgagggaaaatctatgcagatctctaaagggtcactgggaaagcaggagaaagggaccaaggcgagtgcaactactcagtagccgccgtgaggggctcaaccatgatgatactggagggtgtcattgatgtggatatgcagtgacaaaactgagtgttctttgtgtgtgttgggggaaatatccaggagacagtgtgtctcttctttcttcccttgaaatttaacttaattctgttacaatcacttctcggccttttggctaagatcaagtgtaattctgttatattatttttatgttgtattatgtttaaattatttggggatgtaggtggggtttaagtagagtaaatagttaactgtgatatcctacatggggacagtcatggttcgcttgcattcacctcattcattcatccatcaaaaatatttttaaggatctaccgcttgccagacagtgtactaggcacagggatacagaaagaagagacactgtcacggggtcaggagttcgagaccagcctggctcacatggtgaaactccgtctctactaaaaatacaaaaattagccagacgtggtggcgggcgtctgtaatcccagctactcgggaggctgaggcaggagaattgcttgaacccaggaggcagaggttgcagtaagctgagatcacgtcattgcactccagcctgggcagacagagcaagactccatctcggaaaaataaaaaacaaagacactgttcttgaattcagtataaagtgggagataaacaaataagcaggccctgacaatctagcagaacgaaagccatgtgagatcgtgccttggtagctttgggggcttcggggaagtgcactatgccaacatgtatcctgcagtatggaaattccacccgtggagacaggaagccctcttaagaagtcttccgtttaaaataaggtcttaccttggcttctcc

SEQ ID NO: 12410 - DNA, 2300 bp, Homo sapien
catacctaggccggttgtggagagaatctcttagttttgggttttggttttcctcttttccttttaaaggtggatccaggagcaaaagtgaaaatagtctattttgagaattttagccattttgcaatggtaagggcaaaggagcccctggaaggatctcggccctggtgctttctgtgtgttactggctttttatgttggaatgtgctactttattgtatgatgtgtcaggcatttctaattgggtgagagctctacatgtaagaacatttccatatttctcaagggtacatctgatatgattttacgattctctatagcactgtagttcagaattttgcaaggtagtacgattaaacaaaaaatctccaatctccagtttagaggctgtttaaacacatatacaactgtattttaaagctgtcgcatatgtgtttaaacagcctctaagctggagatttttgtttattttcgcagcctccaaagaacagcattttgaaaagaaaagacaatacaaaaacataaagtctgtattgtaggggcaactaaattagttgtactgaggataatacaaactcctccaagaaagacatttataaaattatattaagttagatcttagggtagaaaagcatgacttttgtgctctgaatttaaatcagaaagaagttgcagttactaagtttcatttatggacttttgtgccttgctgtcttaagcaacgtaaatatgaaaacccggagtcctttaaagtcagtgagacctttatcttgtatccgccattttgaagcaatctctcatggtgtcaaagtttcaaagtagagatccttgcatataagtgccacattttaggaaaataaaggccagacttgcaaactgccagtctatattaacatctactttgaatctctttgctggggtggaggcggggagctcagctgaagaaagtaaataacttttctttttcttcctttcttttcccccttgagctctttttcttataggattgtaggaaacttgaaaggtagggagaaattctactagtttcacaactttgggtgtttgtgtatctactttcttcaaaactaaaatgtgcaaaaggcagttagagttaacaggaaactctgctgcagctgccgaggacccaaatgtctgaaaatttgcctcccgcaggatctgcagcctccacacatcaaaatcaacatggaagcagcttgcactacaaatgtggggtcccgtcattatctgattggtgggattctaactttacttcacaatttctggcaagccctgtgccaatcttgaagacttttttggaatatgcttaaatatttgatgggtgtctattaaaagttaaatacttgtttgtttagctttcgttccttagacacatataatcaagattctccaaaaccctaataaatctgttacttacctcgaaatctaattacccagactactaattaggtgaaaatgattaccggaaatgacttcaaatgtggaataatagtggttgagcggtttttccaagtttgtggtttagtgagttggtattttagatgttaaacgcactgacattttaggttcgcagcagttgaaagtggtaaaaagctaagataattaaaatctctgccatggaaaggcaacagtctggggagaggtagatttcttgaattgtttctttgtttctcaccaatgggctttgttatcagcattatttatttagccaaagagttctttgtctctgcaaatggccccaatcaagttttgtttgagacaattagctagtgccagccaatgagtcctatgcaaatgtagggataggaatgcaatgtgtgcatttgaaggcacgggtttttgttcttggggaaggcagattgtaattgctttcttcgggtactttttttttttttttaagtttagggtgggggtggggaagacaggtttatctggtctccttccatcccctctagttccagagcagctgggggtgggggtggggatgggggtggggggagtgtctgcaagtcctttaaaagcctctgcctcgcctagtccgtgctctttttaagttagtgctggaacgtggaagagctgctgcctccgaagcagtaaaccagcccctctgtttgtttgtttgctttgcccttagttccactgctccaaacccacccaccaaggactctgaacctgtccaccccgggcgcatcaagatcttccagctgggtacccccgatttgggccgactttgcacctccaaacaaccttagcatgatgtcttatcttaagcaaccgcctta

SEQ ID NO: 12411 - DNA, 2300 bp, Homo sapien
ttctttttcggctcttttatgctttaaacatcattgtgatcaaactgggggaaacgttgtcttttctaggggtaggaaggagactctgcttcaggtgatcgaggtggatttgcctttccttcatcgaaagcatcatgactctgaccaagcgcacccaaccagtgcctccgacagccagcgccacgagggtcataacgcccggggcatttgttaccccctcctcaccaccatccccattaaaggcttcgggggcggccgccaggtgtttcagtacagtgggggtggggtgagaaaaaaggtcggtactcaccctcccccccgcccgggcccctagaaactcttgactcctgggaacgcgacagccagcgggtctccggactggagctgctgcagagggccgggaaggagctgggcgggctccgggcccctcgggggctcgaggggccgccagggcccaaagctctagggacacctgtgacaggggccgctgccgcggagtccccagccccaggccgagcccgagccggagcccggctgccgagagcttgctgcctcgtgcgcactcccgtaattcgttaattgctgtaaatcccaaggacggccacatttgagtacacatacagtataagaaccgacaacaaagcgacgaattaattaccaacttcattaacataggtccccaaattaaaggcagcgagctgtttctttgggcccactggccgtggtggtgatggtagttggtggtgggtgggtggcggggggtggggtatttaggaagagattttatttttcttttcctgcactgggtgttgtgaagcaagagctgtcttctgctcccacccccacccagcttattcacacacactcaccagttccactagccaccccccaccccacactccgcccagtctgtttttgcttttctagggactcggatccgtttgaaacctgtccggtccctgctttctatgccaggcaaaaaagttgggctgggggtcgcactctccggctcgggcccccaggtcccatcacttcccagcctctgggctcgcagcccggggctcgggcggcgccagcccaggtagctccaggcctcgcagtgtcggtcgtttggtggcgtttgttctaacacagaaactgtttccaacgggggcctccctcgttcgctctcttccacgatatcttgtcgacctcacactcgcatcctcgaggcccgatgtggtcccagctacttctcctaaatgggccctgagattagattccggggttcgtgttccctgcagtctgtcgtgggcttctcaattccaaaaaaccccaggaacctaccagaagccggggtctctcactcggggatcatttatttatatgtgtaaggatatttataagggcgtagggaatagagaagacactgagttttagaaaatagtttgttcttggacttgtgtatctttctctctctgttttccctacatgcccacatcgcactcccaggcctccctcctttaccctttctggccgtcagcgtgctctggccctgtctgagacggcatagtggtgtttttgagtttcagtctgacttgctttctgcctgtcatccacacacttattgctggggttgaatgtgataacccagtcactccctaacccgccattctccagcatttacttaaatatttttatcttccatcttacattgcatgggtttcctttcttcccttccctaaaaacaacaacaacaaaaaaaaaaaaaaaaaaaagagaggaaaggaaatttcggagtaaaggaagcaggggaaaagagggtaagagaagaactccctgtccatcattttaattatacaattagttcacatgctccggcccataatgtatattttaagcaaagcccagtgtctttaaagaacattctggtaatgtcggaggcctggatttgttgcctgctcgtccccccgtgcagcagcggcctgttttcctccccctgttgtgtgtttttattattttccctctggcttagatgtgtcaatcattctctccctgccattggttggagagtttgcgtcaaaaagttgccagagaggcgctttctcagcaaatctccctgagagcgggaccggcctcagctccaacacagcctccactgtgattaaaaataaaaattgctagagcagccctcactcgccacatctactttgtatgtattgcagaggggcccacgcgtgtttagaactctagccgccttcctcattttcgttctttaaaaaaaattttttttggttgtgtttgacttttcatggaagggt

SEQ ID NO: 12412 - DNA, 2300 bp, Homo sapien
tgcgatgtgggcatgtagggaaaacagagagagaaagatacacaagtccaagaacaaactattttctaaaactcagtgtcttctctattccctacgcccttataaatatccttacacatataaataaatgatccccgagtgagagaccccggcttctggtaggttcctggggttttttggaattgagaagcccacgacagactgcagggaacacgaaccccggaatctaatctcagggcccatttaggagaagtagctgggaccacatcgggcctcgaggatgcgagtgtgaggtcgacaagatatcgtggaagagagcgaacgagggaggcccccgttggaaacagtttctgtgttagaacaaacgccaccaaacgaccgacactgcgaggcctggagctacctgggctggcgccgcccgagccccgggctgcgagcccagaggctgggaagtgatgggacctgggggcccgagccggagagtgcgacccccagcccaacttttttgcctggcatagaaagcagggaccggacaggtttcaaacggatccgagtccctagaaaagcaaaaacagactgggcggagtgtggggtggggggtggctagtggaactggtgagtgtgtgtgaataagctgggtgggggtgggagcagaagacagctcttgcttcacaacacccagtgcaggaaaagaaaaataaaatctcttcctaaataccccaccccccgccacccacccaccaccaactaccatcaccaccacggccagtgggcccaaagaaacagctcgctgcctttaatttggggacctatgttaatgaagttggtaattaattcgtcgctttgttgtcggttcttatactgtatgtgtactcaaatgtggccgtccttgggatttacagcaattaacgaattacgggagtgcgcacgaggcagcaagctctcggcagccgggctccggctcgggctcggcctggggctggggactccgcggcagcggcccctgtcacaggtgtccctagagctttgggccctggcggcccctcgagcccccgaggggcccggagcccgcccagctccttcccggccctctgcagcagctccagtccggagacccgctggctgtcgcgttcccaggagtcaagagtttctaggggcccgggcgggggggagggtgagtaccgaccttttttctcaccccacccccactgtactgaaacacctggcggccgcccccgaagcctttaatggggatggtggtgaggagggggtaacaaatgccccgggcgttatgaccctcgtggcgctggctgtcggaggcactggttgggtgcgcttggtcagagtcatgatgctttcgatgaaggaaaggcaaatccacctcgatcacctgaagcagagtctccttcctacccctagaaaagacaacgtttcccccagtttgatcacaatgatgtttaaagcataaaagagccgaaaaagaaaaatggacgttgtgaatctggcagaggggaaggccggaggaaggccttggggacagtgggcatggggtgggatggagaatgatcagaacatgcgcttgtgagctaaaccaagtaaaccattttggactgggagatccatctgccgtagggtccagtgtccagggtaacctttcaagcccgatgtagaggtttgcgatgtcctcccagatggcgggggcagctgaatctccctaaaaatccccctgttctattcgacaggggcagatttatgcatggtggggcgtgagagggttttgcccttccagcggccggcagcagacagctcccgcttctcctttgccctctagtctaataacttcgcagaaatacagggccaataaactacgagttggaaatggacagtgttaaataaacaagggtctctttaaaattctcatccacttcagatgtctaaagtaagattgtgatgattttgtcacggtttggtaaatttacccctttaagaggctttcataaatcccagaacacaccttcagccagatttgaatatagatttaggttttaaaacccagaagctggaaacaccgctttatcaaagagaatttccctttagcttagcaatgtgctgaagctcttaaaagattggatctgagagagagagacagagaggagaaagagaactagagacagagagaggcagacaaggaaggggggggggggtgaaagactttctttttctttctagaggaattctgcccagactctgcagcagttggtagcaggcaagctttctcctgggtgtcgccttgaaaagtt

SEQ ID NO: 12413 - DNA, 2300 bp, Homo sapien
tatttccccacctcctccccttccccgctagggagaggggaaaaaaaaaaatcaaacatatttccaaataagttactgaaatcatgtggtcaaacatttaaataaaaatatacataagatggtccaaggtacaactggaactgtcaagcaggattaactcaaaggataatgtcttatgaactgtatgacaacatatataacagttttcagttaagagctggcttgccggcaaataccttaattaaagatctcatacaacttcatcgttttctccctttttaagatgtgaaaaataaaacaaggaaccacagcactacttagtacctagggacacagtaaaagttcctagcaggaaaaatgtctccccgttcttgtgtcaataaacagatggcacaattttggaattacagaaattaatgtagcatatctcccaacacttaagtgagaaaatacaatatctctgaagtctttcttgtaattacaatccttcattcacaaattactgtcttattacaacttattataacaataacatatattactcctctcaaaaaaagcattatctatccaaaagctgactgatatgcaaaatatagtaacaataacaaatgtaaatttccatttgttattaaaactgtggcattcaaattgtaagccacaaaaactgctgaatcttacgcagaaaaaggataccattttcacttatggagaagttccctattgtggattacagtcttctcaattattacacttttgttactcaatgtgaaacacaagcacacacacaaaaaaggggtctttctttcctttttcttatccgttttcatttctttcacacaaggagatgctttatacgtgtcattgttttgtagcctaattagagttttcctattctattatctcaaacttttatcacagcttcttacaacggacttcacgaaattaaattttaaggtttagatactgtaaacgctcgaggaaagacattagtattctcactattacatattaaggattctctagcttgcagttaggtgattttataatacatgtaaatgcatataatacacttaaggtgcattatatacatgaaacgaagtgttcgttttattttataaactttttttattttataatacacgtaaatgcctcgagtgtattattatgtattacatgaaataaagtgttcacttgaattttgcctcccttcagtctatctctcttcagtcgaaagagataagtaggcctttattgtccaaaaaaaaaaaaattgtcccagccttttcaaatgtcaggttaaactggcagtcctatgaatgccacctgcaaccttactaatggaataattactcaaaacgagaagcccccaagagtcccgatctcaagtggcttcctcctattattcccgcgaggaccccagcgacaagactcgcccaacctgaggctcctggctctctttcctcgtcctgagtcagcccttcccactactcatccggagtagacatcttccaacacccgaaccttccagactttccctcttgcccccacaaacaaaagcaaccctcctcccttgggacacccggcttcccctctctgccgaccggccgcccagcccacctcggccccaagcacccctcccccatttcacgctccgcccgcgctgacacggagctgccaccccaacccttctgtttcgcacctctctcccgagggctcctcctgggcagccagcaaacgcccgctcctcggcccgcccacccagctgcctgcaaaccccgggcctgccactccctgtagagccgccggggcccacctcgaagagctcggccgtggtagccatcccggccggctgagaggctcgccccccactggatgccgtctccgcttcacatgctgcgcctcagaggcgcggcgcacaggtctccgctcggctcgccagctccggctccgggccgctgcgggctccccagctccccacagatcccaggaggggcgggagagcggccatgaagcgaagccgcaaacgcttgtcagctgcctcccggcgccgcccgcgctgctcccattgtcaccgcctcatacgccggaagtggaactgcgcgcgccagggaggttgtcgggaggggccggcgaataaaacgagcggcgaaagaaccgaaaaaaggctcgacgctaccgtgtatgaggaactttgatccttgcgggccaccattccggaagtagaatttagaggaagaaaataccggagttgcagggtataggtaaatttctcaaggttataggttggggttcttagaact

SEQ ID NO: 12414 - DNA, 2300 bp, Homo sapien
aataggtacttgtggctagtggctacagtattagccagtacagattaagaacatttctcctttccatcatcatagagaattctattggacatgctgccttagatgaacacaaagtatcatggatgtttctttaaaatagtgttgagaaatgtgacaaatgtaacattaggaagtgaagtctaaagcacacttaattatgtaatttgaaaaatgcatacaatgaaaaagagtaacatcgaagatgttaagagttatctgtcagtgggaagggaacggcagttagaaataggtaaccaaagggaatataagtaaaatgagagatactttgtacggactgatgcgcctggtaaaaccacgtactaaagaatattattaatctcctgtatttgaggtccaacaacaaatgttggggttagtgtcagccagaaatcctggggggaaatggtaaactccaactctgatgccctcaggaacaaaaactgttaaggttgcaaagaaggaatttttcatatccccattgccaaccaattttcatttaaaattaaaatcttttttttctgcctcaatctcaattctactatggtactacttcactataagctttcttcagggaagaacgaattgtgacaaaaaagaactatcaatggccagagaataaaaggtgaaatagacccactcgattgccaccaacattttacaatgagttactgtacaattcccttaacagagctattttgattacacagggcaaattctaatagtgggaccagatcaacttaacacaatatatgaaatagtgaatacatttttttgtgtttctattttcttcaacaattaggaactgtaaactgatgatttctaccattgacacatattaacaagataaaaataaaagcctgggcggggcgcggtggctcctgcctgtaatcccagcactttgagagccaaggcgggcggatcacgaggtcaggagatcaagactatcctggctaacacggtgaaaccccctctctaccaaaaatacaaaaaattagccgggcgtggtggcgggtgcctgtagtcccagctactcgggaggctgaggcaggagaacggcatgaacccgggaggcggagcttgcagtgagcggagatcgcaccactgcactctagcctggggaacagagcgagactccgtctcaaaaaaataaaaacaaaaaaataaaagtctgatataacttagcatggatttttcagtagaataagttaaaatgttctggaacgattttgtcaatgcatgttgaaaaatctgaaaatgtttagtgctcagtaaattttctaccgttcccttagtcatctccattttaattctaagcagacggaggtcattttaaaacacaatactaatagaaaacatataccgtaaataatatgtaccagtcatcaactcaattctcacaacactgtaaggtaggactattaaaatctccatttaacagacgaaacagaggtctgttaactggctagcccaaggtcacgcagctattcgtggcaaacctgggccacgaagcaccacaaaactatgctacttcatcgatcttctgatccatcatccctgaggattcagatttgcatttacctggagaatctcacggtgccacaaagtggagttcccggttcgtggcttatgagccacactgcccgctgcgccatggttaagtcagtaaagcattagctcatctcataattaaggtcgccaccgaggaacagcgcagaccggctttctcagacagactcttaacagaagccctgaggctcatcctgcgccgcataccggtcgcgctcagcagagaggttagcttttttaggtgaagtcactaacgcttctgagtcgctctaggccaacacacaccacaaaaagttctaagaaccccaacctataaccttgagaaatttacctataccctgcaactccggtattttcttcctctaaattctacttccggaatggtggcccgcaaggatcaaagttcctcatacacggtagcgtcgagccttttttcggttctttcgccgctcgttttattcgccggcccctcccgacaacctccctggcgcgcgcagttccacttccggcgtatgaggcggtgacaatgggagcagcgcgggcggcgccgggaggcagctgacaagcgtttgcggcttcgcttcatggccgctctcccgcccctcctgggatctgtggggagctggggagcccgcagcggcccggagccggagctggcgagccgagcggagacctgtgcgccgcgcctctgaggc

SEQ ID NO: 12415 - DNA, 2300 bp, Homo sapien
ttgaacacatattggggtgttgtgtaagttcccagattaacttatcttcacagtcaattgtgaaatttttatacttaagaactttaattaccctctggaaaactagataataagagattggactagagtttagtccagagatctctactattcatatacagagatttagagaaataaatggcatttacctgctatgccatgccattactggtgtgctacctgattcttcccctttcttaatcaagaaaatgcatcagaatgtaggtgatatttacctacacatgggtaactgcttttgggttttttgtttgtttgtttgcttgcttgcttgcttggtgtttttctttttgtttgtttgttttttgagatggagtctcactctgttgcccagggtggagtgcagtgtcacaatctcggctcggctcggctcggctcattgcaacctccacctcccgggttcaagattctcctgcctcagcctcccgagtagccaggatcacaggcgtgcaccaccacaaccagctaatttgtgtatttttagtaaagtcagggtttcaccgtgttggccaggctggtctcaaactcctgccctcaagtgatctgcccacctcagctttctgaagtgctggattagccattgcacctaatctacatatggataactttgaatacattcttacttatatttttttaaaatattagtaaacatcaatattttttaataaaaaactgttttagccaggtatgtttttgactgttggtaaaaactgctgatttgttgccacccctttatttacaaacgagaaaataggcaaagggaagttaagtgatttactcaaaagttaacagctgataaatgacattgttctggactttggagtggaggcagaaggaatgaggaaaagtacatattttggaattgagaaactgtgatctaacagatttctgtaaataagcaaaagcatcttctgtttccaagcaaagaaaagataaattagtaactgcttacagttcaactcagaatatgcaaaaacattctgattttattcttttttattatctaaaagtatcttccagggccatagagataaaccattattactaaaatgatcttccatgtttttgtagggattggcaagaagactcagggtacctgtcattcactataagttaagtagaatagaacattccttttaaaattgtaccatctcaactaatgaatccaaaattatggagggttaaattgaaccactttgttagccctactctagctactaagatagaatcagaagaaaaaaaattcttatagatgcctaaaacggttcaagtatatactccttgctgaccaagatggtatctgagtggctgagagacacggattttgaattacaatcatgtactctacctaaactagataactaaattgaattaagcattttgaataacagattatataccagatatgaaacagtcactctaatagtaacttaatggtcattataattttttggttgttggcttttgtggatgtgtgtatatatttgtttctcgtgtattttattgttattactgtttgccttatatttgagagttttaaaaaaattctttcatcttgattttacttggaagaatcatttataatgtttctgtttccgtaatgcagacggtatccaactgttgaaaaacgagccagagtcttcaatggagcaagttatgtgcctgttcctgaagatggtccctttcttaaagcactgctctttgaacttagattattggatgatgataaagacttcgttgagagtcgtgatagctgttcacgcatcaataaaacatccatttatggactcctgataggaggtgaagaactctggccagttgttgcttttctgaagaatgacatgatatatgcttgtgttccactagttgaacaaactctgtcccctcgtccgccactaattagtgtcagtggagtttcacaaggctttgaatttctttttgggatacaggattttctttattcaggtcaaaaaaatgactctgagctgaatacaaaattgagccagttgcctgacttgcttctgcaggcttgtccatttggtactttattagatgccaacttacagaattcattagataataccaattttgcatctgtgactcagccacagaaacagccagcttggaaaactgggacgtacaaaggaaaaccacaagtttctatttctatcactgaaaaggtaaaatccatgcaatatgataaacagggtatagcagatacatggcaagttgttggaacagtg

SEQ ID NO: 12416 - DNA, 2300 bp, Homo sapien
ctcttgggccagtttttccaccatgatttgaacagatcattgtttcattggctgactacccaggttacacttagaaactttgaaaaacatgtatctttaaacaatgtatgcacatttggaaacatggttttgttttgtgctttttaaaagacagaaaagggatcacgctgtacttatacatctcatttatatcccccacacatcaaggtgtttaggaggttttcaatgtatctgtagcaagttatacattctgaaaatggccacagcaatatttctggtcccatatgctctttgagaaccttgcctctctccaccaagagtagagtctatttcccctcctgtcaaaactggatataattttgtgtctgcctagatacaatgcagcagaactgacactacataacttgttttttgtttctttttgatgagagggagtctccctgtgttgcccaggctggagtgcagtggcgcaatctcggcttactgcaacctccgcctcccgggttcaagtgattctcctcagcctcctgagtagctgggactacaggcatgagctaccacgcccggctaatttttgtatttttcggcagagatgaggtttcactgtgttggccaggctggtctcgaactcctggcctcaagagatcctcccgcctgggcctcccaaaatgccaggattacaggcgtgaggcaccgcacctggctagagactacatgacttctaaggctaggttataatgggtaatatgcttctgattgactttctcgcacgatacttgccgtggaacccagccaccaggctgtgacaaagcccaaaccaatcaatgctaaaagaccaccgggagaggtctacatggactagaactgaggcctccagcctttatcctgcatcaaccatcagcggtgaaagtgaagttttcaaataattctactcctcagccttagagtcttccaactgaagctctacgcataatggagtagagaaaagccatcccagttgtgctctgtctggatttcagaggcacagaatctgcgagcataataaatactttatacatagagtttagattacggcaaaaagttgcaaacgtgttccgtcatagaattatatattgaaaacgtccatctgcggcacaccagaccagctctataaatcaggtttttaacaaaaccgaatttgttcagtgagcgggtgagttacactacctgtctcagctcagacctgccgggagtcaattgtggactagagcagaaggcgcccagccacaagctcaagttctatcccctttgcactcgataggcagatcccctgggaggatcaggccacctgtttaccagtgcttcctaacctatttgtgtcacaagtttaggagtgtgcttcttagccctggtcactctctttcaccacctctctctaacccttccccaggtgtgctagcaattgcccaacacctgtcagtcacttttgcctccaattttactgggtgcgaggagcagagtaaggagggagaggaagagggctgactcccttgcctcaaagtggcaagggccagctgaacttaattcacactgcaaaccaccacgtttcgacagccatccccatattttcacagctcaaatcttcctttctttttcggtcggcttctctgatttgctccatttttaatcgctcctcccccatcctccttgcccctggtcagggcaaacattaaacgctgtgcagctttaaaagggcatttttaggtgacttgtaaacggcttgttccacaggccccgaattggcgagattcgctacagctcggagtgcgcggtagactttaagcagggagcgcctgcccggtccatccctccccggccccgcgtggcaagcaccgcaggttgaggcgcccccaaaccgaggaagagggtttgggagcctgtgactccaaagccctctgcaacttcccggccccacagccccacccactagcacgcggccttccccgcagcccgcaggagacacctttgtccccgcccctccacaggtcacctccctccacgcccctctctcttggcccgggcagccggcaggcagggaagtgtcgtaaagccaggcccaggaaactttacccggcctaacagctgaggcgctttacggcgacggcggctgagtgagaaccttggcggctgtggaggctgccgcggctgcgaaggaggcggcggcggtggcggaggaagaggagtggcggcagcggcggcggggacccgtgcggggtgagccgtgaggaggggccgcgagtgacagggctggcgggtgggcc

SEQ ID NO: 12417 - DNA, 2300 bp, Homo sapien
gaaattacatcttatatctaactctatcagtgaaattaaactctttttctcttttaataaaattaaaatgtttcactatcaaattttaataaaatcctttcagtgtatgaatattttctaatgataatccttagacatggtggttttcccagttaaattggccagatgaatttacgcttccctcgttggtcttttctatacctaggggcaaactcctttagacaggaatatgtctattttaatttctgaccaactggcaataaagactatcctatgtacatgtagatatgtagcaatacttcctcagaggaggaggatactggctaatgattactgtgagcttactacatgccaggtattagtctaagagctataaatggaatcaggttcatttcccacaaagtattgttattaaccccatttcacagatcaggaaagtcacaaagcttgatagtcactagtaatgaaaagagaaagaagcacagaaatgcatctttatttctttaattattccttcaacaactaaccaatttcctcaacaaaggctcatgttctccacaaatattgtctgaaaattaaataataataaaacaaaacataagagctgaatccctcttactggtccagatccatgaagtccacagttttcagtacaatgtctagttcatttgttagttcgcaatacattcccctgcccttagaaatacttaaactgattgtactaaaaaataaatcttactagaccttactcaagtattattatccttgtaattaagctagtctgtttaccagaggctgttgtgtttgcagatactgttaatatattagtctttacttataaacctctctgctgcagagaaaatgatgtggaaaatgcaaagagagtaaggaaaaaactaaattcaggcatctttttagataaacgtgattgtctaccaagactttccaaacatcaccttagtcccttaggaaatggattctgcaaagatgaaaaataaattttcttttaatttctttatggagatgtgatgaaaacacaagtaatctgtgctcatgaacaattagagcttgaaagttagtcccacttctaagtataaagaataaaataaaaatcacccataatcccaccattcaaaaatcactactcaatatttcggcacatttccttccagtctttttttctactttaaaaatcataatagaccaggcactgtggctcatgcgtgtaatcccagccctttgggaggccaagacaggtggatctcttgaggtcaggagttcgagaccagcctggccaacatggtgaaaccccttctgtactaaaaaatacaaaaattagacaggtgtggtggtagtaggtgcctgtaatcccagctacttgggtggctgactcaggagaatcacttgaactggtgaggcggaggttgtggtgagccaagatcgctgggcttgggtgactccagcttgggtgacagagtgagactctgtctcaaaaataaataaattaatttaatttagtttaaaaacatagtaaataggttatcttcaaaaactcaaggtttacttagaccatttattcaagaattttttccccttatccccaggaaaaaaatttctattatcctcctgtcctgcaatgtattcacccccttcaaaggcaactcaagtcatcgacagaaaaatcaaatgacgctttagccgctccgctgctttctttcctatttgggggataaattctttaattaaattaaagattaacaaagccttggcaatcagcatgcatcctcttaattgcaaagatggcttagctattctcagcagttagtttttttacaaaggtacttgcaatgaaagggtcaagtttaagacttctctaaacctctgctctacatctctctctgttaataaccttcctggtgttcgatatttgtttaatgatcaacagtggcttctattcctatcactgagtatttcagaaagtagcataaccaagtcaatgtttaactggattctttgggtctgaaacggcaaagttgaagggaagtctccatggaaaccagcctcccaggaagtggccaaaagggttagtgtgcagtgaaacagagctagaaggatgccatgaaggaaatgactgctttgtaaagcgagggtaaacttctgaaatgctttgattaaaataagctatattaaagaccccaaaaccacttccctcgcagctttcctctgaatgtctttcacatgaaatgggcctgagtcactctaagactcaccttagggtgatcaaagtagcacctttgcaa

SEQ ID NO: 12418 - DNA, 2300 bp, Homo sapien
tggggtctctcttttttttttttgagatggagttttgctcttgttgcctaggctgtagtgcaatggcacgatctcagctcactgcatcctctgccttccgggttcaagcgattctctcgcctcagtctcctgagtagctgagattacaggtgcctacgcccactcccactcccagctaatttttgtatttttagtagagatggggtttcaccatgttggccaggctggtctctaactcctgacctcaggtgatccacccatgtcagcctccaaagtgctgggattacaggtgtgagccactgtgcctggctctggggtctcttttataagggcataaatcccattcacgagggttctgtcctcatgaagtcatcacttctcaaaggccttacttcctaatactaccatgttgctgattaggtttcaacacatgaattctgggggccacaaacattcagactgtggcaacacttaaaaagttatttgaatgaatgtgtaagacttactttttatttcttggacatgttgctatttctacagtcatttgactacatggttaatagaggaatttggagagaatattgcaaatgtgacttcaagggtaaattatttcaagtaggtatttaagaaacaacgaacttaatacttgaactatgtgtacctttttctagggaacctcaagttaaatcagcaaaattcagcagggagaaatgaactgggttatccatgtctcaaaggtacaaagaaatagaacagtcctctcctacctaccatctctgtgtattataaagtcaaggagattattttacttatggtttaatttaaagagacttatttacaacatgtatttatatgacagtttgatatgctttatttttctgcaggattcaattactggacttgtcaactctgccagtgtacgtgccatttctcttccactatgagaggaccgattgtattgcacatttgtctggctttctgtagccttctgcttttcagcgttgccacacaatgtctggccttccccaaaatagaaaggaggagggagatagcacatgttcatgcggaaaaagggcagtccgataagatgaacaccgatgacctagaaaatagctctgttacctcaaagcagactccccaactggtggtctctgaagatccaatgatgatgtcagcagtaccatcggcaacatcattaaataaagcattctcgattaacaaagaaacccagcctggacaagctgggctcatgcaaacagaacgccctggtgtttccacacctactgagtcaggtgtcccctcagctgaagaagtatttggttccagccagccagagagaatatctcctgaaagtggacttgccaaggccatgttaaccattgctatcactgcgactccttctctgactgttgatgaaaaggaggaactccttacaagcactaactttcagcccattgtagaagagatcacagaaaccacaaaaggttttctgaagtatatggataatcaatcatttgcaactgaaagtcaggaaggagttggtttgggacattcaccttcatcctatgtgaatactaaggaaatgctaaccaccaatccaaagactgagaaatttgaagcagacacagaccacaggacaacttcttttcctggtgctgagtccacagcaggcagtgagcctggaagcctcacccctgataaggagaagccttcgcagatgacagctgataacacccaggctgctgccaccaagcaaccactcgaaacttccgagtacaccctgagtgttgagccagaaactgatagtctgctgggagccccagaagtcacagtgagtgtcagcacagctgttccagctgcctctgccttaagtgatgagtgggatgacaccaaattagagagtgtaagccggataaggacccccaagcttggagacaatgaagagactcaggtgagaacggagatgtctcagacagcacaagtaagccatgagggtatggaaggaggccagccttggacagaggctgcacaggtggctctggggctgcctgaaggggaaacacacacgggcacagccctgctaatagcgcatgggaatgagagatcacctgctttcactgatcaaagttcctttacccccacaagtctgatggaagacatgaaagtttccattgtgaacttgctccaaagtacgggagacttcacggaatccaccaaggaaaacgatgccctgtttttcttagaaaccactgtttctgtctctgtatatgagtctgaggcagaccaactgttgggaaata

SEQ ID NO: 12419 - DNA, 2300 bp, Homo sapien
aaggcacctttttgctgtgtcctacatggtggaaggggccagggagctcttgggggtctctttattttattttgagatggagtttcactcttgtcgcccaggctggactgtgatggcgcgatcttggctcattgcaacctccgcctcccgggttcaagcgattctccttcctcagcctcccaaggagctgggattacagatgcccgccaccacacccagctaatttttttgtatttttagtcaagacggggtttcaccatgttggccaggctggtcttgaactcctgacctcaggtgatccgcccgccttggtatcccaaagtgctgggatttcaggtgtgagccactgcacccggccctcttttatattttatttatttatttatttatttatttatttttgagacggattctcctgtccaggctggagtgcagtggcatgatctcagctcactgcaacctctgcctcccaggtttaggcaactctcttgcctcagcctcccgagcagctgggattacagatgtgtgccaccatgcctggctaatttttgtatttttatcagagatggggtttcaccatgttggccaggcttgtctcaaactcctgacctcaagtgatctgctggcctcggcctcctaaagtgctgggattacaggtgtgagacactgtgcctggcctggggtctctcttttttttttttgagatggagttttgctcttgttgcctaggctgtagtgcaatggcacgatctcagctcactgcatcctctgccttccgggttcaagcgattctctcgcctcagtctcctgagtagctgagattacaggtgcctacgcccactcccactcccagctaatttttgtatttttagtagagatggggtttcaccatgttggccaggctggtctctaactcctgacctcaggtgatccacccatgtcagcctccaaagtgctgggattacaggtgtgagccactgtgcctggctctggggtctcttttataagggcataaatcccattcacgagggttctgtcctcatgaagtcatcacttctcaaaggccttacttcctaatactaccatgttgctgattaggtttcaacacatgaattctgggggccacaaacattcagactgtggcaacacttaaaaagttatttgaatgaatgtgtaagacttactttttatttcttggacatgttgctatttctacagtcatttgactacatggttaatagaggaatttggagagaatattgcaaatgtgacttcaagggtaaattatttcaagtaggtatttaagaaacaacgaacttaatacttgaactatgtgtacctttttctagggaacctcaagttaaatcagcaaaattcagcagggagaaatgaactgggttatccatgtctcaaaggtacaaagaaatagaacagtcctctcctacctaccatctctgtgtattataaagtcaaggagattattttacttatggtttaatttaaagagacttatttacaacatgtatttatatgacagtttgatatgctttatttttctgcaggattcaattactggacttgtcaactctgccagtgtacgtgccatttctcttccactatgagaggaccgattgtattgcacatttgtctggctttctgtagccttctgcttttcagcgttgccacacaatgtctggccttccccaaaatagaaaggaggagggagatagcacatgttcatgcggaaaaagggcagtccgataagatgaacaccgatgacctagaaaatagctctgttacctcaaagcagactccccaactggtggtctctgaagatccaatgatgatgtcagcagtaccatcggcaacatcattaaataaagcattctcgattaacaaagaaacccagcctggacaagctgggctcatgcaaacagaacgccctggtgtttccacacctactgagtcaggtgtcccctcagctgaagaagtatttggttccagccagccagagagaatatctcctgaaagtggacttgccaaggccatgttaaccattgctatcactgcgactccttctctgactgttgatgaaaaggaggaactccttacaagcactaactttcagcccattgtagaagagatcacagaaaccacaaaaggttttctgaagtatatggataatcaatcatttgcaactgaaagtcaggaaggagttggtttgggacattcaccttcatcctatgtgaatactaaggaaatgctaaccaccaatccaaagactgagaaatttgaagcag

SEQ ID NO: 12420 - DNA, 2300 bp, Homo sapien
ctgaggcaggaggattgcttgaggttaggaggtccaggctgcagtgaactgtgattgtaccactggactccagcctgggtgacagagtgagaccctgtctcaaagaaaaaaagagtcaaaagttaaaaaaaatttataaagtaaaaaattcaggtaagctatggttaatttattattgaagaaaaaatgtttatgtctacagtacagcctaagtgtacattgtttacactacagtagtagtgtagcatacagttatagcctacataactacagtagtgtagttatgtacaatagtatacagttatgtcagtagtgtaaggttacgtacattacagtagtgtacagttatgtcctaggtcttcatattctcactcatcattcgttgactcacccagagcaacttccagtcctataagctccatttatggtaagtgctctatacagatgcaccattttttatcttttatactgtatttttactgtattgtttcaatgtttagatatagaaataccattgtgttacaattgcctacagtactgagtacagtaacatgctgtacaggcttgtagcctaggagcaataggctataccatatagccttggtacgtagtaggctatgccatctaggtttgtgtaagtatactattatgctcgcataacaacaaaattgcctaaggatacatttcttagaatgtattcccctaattaatcaatgcatgattatacatagataataatttctaaagggagggggaatgggtaacagtgcatacctgctgggcaccgtggcacatgtctataattcaaacacttcggtagaccgaggcaggaggatcgcttgagtccaggagtttgaaactagccagggcaagataggaagaccccatctttaccaataataataataataataataataataataataataataataataaaaaattagccagtcgtggtgccgcatgcctgtggtcccagctacttaggaggctgaggtgggtgatggcttgaggtcccaggaggaggtcgaggctgcagtgagccatgatggcgccactgcactccagcctgggggaaagagtgagatcctgtctcaaaaacaaacaaacaaacaaacagaaaccagtacatacctgtgcattgtgttaggtgtgggggtcaaaggtgagccagcttttgctctgacttcaaggtgtttataattaactacaaaaggggactaaggtattatgaagaagggagctaataagcacaataagggacaaatgtgaagagtgctctgcaaatgtaaaatgctgcgttgtggaggttgttccaaaacgggcctttagattccgacacctctttccacaccattagaagtaacagaaaaagaaaacagtccttgagaggctcaagaatggaggacacaaattcccggtggccacgcgagccggatgaccttggagaagttacacagcccttagccttaacctcctaccctggtaaatgagaactacaatatctacccttctatcgtgcagattaagcaggtaaagtaatgggcaaagcatctactcttgtgcctggcaggagtaagggctcaataaaccttacttgtgactagcactagtttgcaacttctccgacggactgagaagggacattctgtgtagagttactttaagggtcctacttaagggcaccgccaagccgtccatagtttccacaaggaacactgcagtctcagatttgcgctccttgcctgaaccaaagacagcaaaattgaggtttttctcgtgtaaacggtgccctggtctcttccgcgtagatagggaggcgagctgccgcagaagctcccgcttaaagaggggaagcggagcacgggatctccgaggggtcccaggtgccgggactccagcagaagccgcccccgcgggagagcggaggcggggaagtgggcgcaggggggcgtgggcgacggcgtcggctgtcagtgccagcagagccagggcgggcacacctactcaccgcccaatccccggccgtagccgcggccttatgaataagcaacaaagcgaagcgccctccccctagcgtcccagacagcggagggagtcgccgccgctaccgccgccgccgccgcagggcccgccgctgggatgccgagcgcccgcgccgccgctgcctctgtcctccgcgcgctgctcagctgaaggcgcacaggtgaggacgggcccggctccggccacttgggcggccgcggctgcagacgtggcgccggggcagggacggaaccggagcctcagtggcgtgg

SEQ ID NO: 12421 - DNA, 2300 bp, Homo sapien
ttcgagaccagcctggccaacatggtgaaaccctatctttactaaaaatccaaaacaaacaaaaaaaaatagttgggcgtggtggcaggtgcctgtaatcccggctgctccagaggctgaggcagaagaatcacttgaacctggtggggcggaggctgcagtgagctgagatcgaacctgggtgacagagcgagactccatctcaaaaaaagaaaaaaaaaaaaagacaagaaaggatcctcctcaagagccttcaaagagggcatgaccttgctcttgctgacaccttgatttctgacttctcacctccagaagtgtgaaagaataaattttttgtttccttgaaccaccgtttgtggtactttgttacggcagtccctagctaacaaatacagctggtgagctgtcatggaaaacatagaataggtaataacaaacttcatcatttcaatagtttcagaaacataatttcaaattgatccttacaaataccttgtgaagcagcagaacagtttacagataaggaagtggacgatcagaggtattagggacttgacagaaagtggcagaaacagaatctgaactcaagtaaggggtcctattcaaataatctgactctattaagcaaaaaatttaatctcttcccacgtttcttaaagttttcttccccgtcacaactccaacttcattctcctgtctccaggaatttgctttcaaggaggatcattgatcagtaatttggacttaaacatgaattttactaatatcacattccaaatttctgcattgttacagccttagtttttgttatggaaatagcttatccccaactaccccgctaactctagttaccaaccattagagtagggccttttttttttttttttttttttttgagagacaggctctcactcttgttgttgcccaggctggagtgcagcggcacaatcccgactcactgccgctttagacttcttgggctcaagggatcctcccgcttcggcctcccaaagtgctgggattacaggtgtgatcctgcgctcggacagttgggacatcttaatacagtataacctcatcttaacttgattacatctgccaagactctatttccaaatagggtcacattctgaggttcccagtggacaagaattttgggggggggggcatcattcaacccagtacaccagctaaatgttgctagtcctcaccgatttacccttgaacctcttttcttattgcacagcctctcctttgacagtcttttccactcctatgcatagatacagttagagctaatatttgcaggaaaaaaatattttcacagaaagctgtgaagtgacaaagatgtaaacagtaatgtaaatgttaaaagtagtggcaaaaacagcaattacttttgcaccaacctaataggggcctttgcttcaatgtttcttctattaaaccatcccgaccgctcctctatggacagattcaagattcacagacgctactctagctgcttaattctggagtaaaataaaaactttcagaaagactactaactaaagtattgtctgtacgtattattctctaaagcatcattagcataggctttgcaattaggaagtctgtgggtttgttcctggctctgccgtgggacattgggaaagttaatctctctgagcgtcggtccccacagataagaaaacacatattcttgttatttcttgagaagattaaatattaggcaaaacgcctagcacagaatagggtctcagcatcttctgccccccaagagcatgaatcaaaggttcggaattgcgtcgtctctcggctgccccttggcagccaggtcctcagtgacctcttcacagtgagctgagaccgaacctcttcacagccgcgcgtgggtgcggctttggggcgtggtgggagggaaggatagggaggccggctccgccccctcagggcgaccggcgcgcctgatcgccgcggcctccgcgcccccgcactcggattcgcgcccgccagcgcctcttttcccctagtcctggcgacggcagcacctgcaagggtgggtccaacgcggaatgaggcacagcctgggacagcccgggcccggcgcgccgcggccgcgcgaggcccccgccgtcgccgacgcccgagcgccggagccccggccccgccccgcgagcgccgagacttgttggccgcggagactgcgaccctcttctctcagtctgccttactaccatgccgctctacgagggcctggggagcggcggggagaagacggcggtcgtgatcgacctggg

SEQ ID NO: 12422 - DNA, 2300 bp, Homo sapien
catctctactaaaaatacaaatattagccaggtgtagtggcaggcacctgtggtcccagctactcgggaggctgaggcaggagaatcgcttgaatctgggaggcggaggtggcagtgagctgagatcatgccactgtgctgcagcctgggcaacagagggagactccatgtcaaaaaaaacgggggcgggggatggaagttcctgtttactaatttttcatgtcattttgctttataacaattggcattactgtgttaccagatagatttcttactggattagaccctgtacgtttttgttgccactttccttggtgctttgagcttttatcttttttttttttgagatggagtctcactccatcacccaggcaggagtgcagtatcatgatctctgctcactgccacctcctcctctcgggttcaagccattctcctctctcagcctcccaagtagctggaattacaggcgccctccaccacacccagctaattttttttttttgtatttttagtagagacggggtttcgccgtgttggccagcctggtctcaaactcctgacctcaggtgatccacccgccttgacctcccaaagtgttgggattacaggcatgagccactgcgcccgaacgagtttttatcttcatttgaaaagacagatacctaaaaaattatttatatttgattatatatggtttggaatcttctttaagccacataaaatcaagaaattaggctgatggtacttcttttgaaagagtaaatgaagagaggtctgccaatgatgcatcagagtactgagagctttctgaggatcataagtgaagccattgttatatattagcattgacttagcactcatggcttggtaatatgtgtgtaggctgcttttgtgctaatggtgtttgttgtcatttttatcacacatatttatgaacaaccacaactatgtacctggaactgtattatttgaagaaagatatatcataagcaagccagaaatagttcttgtgcatagagcttataatctagcagaaagggggacattttacaagtaattcagtgtggcgatgttgcaaaagagaagatatcagtgtttttggactaacagggactgaaccaagttgagtatttgaggaagcctttgatgctttttattcaatgctgaatttttttttttttttttttttgagacaggttctcactctgtcacccaggctggagtgcagtggcacgatcttggctcactgcaacctctgcctccctgcaacctccacctcctgggttcaagcagttctcccacttcagcctcctgagtagctgggactacaggtgcacgccaccacgcctagctaatttttgtatttttagtagagatagggtttcaccatgttggccaggctggtcttgaactcctagcttcaggtgatccacctgcctcggcctcccaaagtgctggaaatttgtttgtttgtttgtttgtttgttttttgagacggaatctggttctgttgcccaggctagagagcagtggagccatctcagctcactgcagcctcctccagggttttcaagtgattctcctgcctcagtctccagagtagctgggactataggcacacaccaccacgcctggctaatttttgtattttaagtagagacagcgtttcaccatgttggccagcctggtctcgaactcctgacctcaagtgatccatccacctcggcctcccaaagtgctgggattacaggcatgagccaccacacctggcctcaaagctgatttttatcattcaagccaaaatgataagtcagatggaggaaaaatgcatgtgagccatgctctttacttcctatgaacacacacttccattaccacagactaaaacattctgccatcttagacattccgattcttaaggattcctaatttaagagattactctgtatttaatttttatattctcaatacagattgcttttaatttattcccagaaaatgtattagtaaataattacattttaatcttaatttgaggttattttattaatataaattaataaatcattttaattttttacagcctgtcagagttgttcagtataatatcaatacagaagaattatattcctacctaaaggaattcatccacatactatatttcaggtaagatacattttgttttctagcttttatgattagatagattttcctaatgccatagtgataattggttgtgttacagctgaggccaaaaaaaaaaaaaatggacttctattgccatttttacatgctta

SEQ ID NO: 12423 - DNA, 2300 bp, Homo sapien
gagcaagcgaatatgtgagacagagaaagctgaaatccagtgaaactcacccctttattaggaacccacttccaagataactaacccattctgaaaatgtcattcatccatagtgccctcatgacctaatcacctcttaaaggccccacatcgcaataccattacattggcaattaaatttcaacacgtgttttgaaggggacattcaaaccatagctccctacacatctgaaatccatctacatatttccacctccactgccaccactttagtccaaatcactctccattactgctagctcacaaaagtgcaataactttccaactagtatccctgcctctcttctttcccttagctatcattcttcacacagaaacaagaggtcatttaatgatttaaatcaaatcatataattctcttgctttaaaaactcctgataacctcacagtagaaaaccaataataaatgtgaaaagaatgatggaattagaaaatcaccatttggcaaccattgtaataatcaattcaaataagaatcatcagatattagaattaatgagtgaaatgttgaggcgtaaacaggatgtgtacatattctcaaagtatttcctcacaagatactaattacaaagggaaaaatgaaacattatcagggataaatcttcagcaagtgatcaaagttaacattaccagcaataaaacaactaacatcatgtcccttctaatgtaatgctctgacatgaatgaatacaaggtcatttctgtagtattcctgccataaatgcatcacttgaatcaaataacaaaaaaatcaaacctaaattaaggaatattctacaaaataaatggtttgtattcttcaaaagtgttcatgccatgaaaactgaagaaatactaagcaactattttccagactaaagcagattggaaacatgacaactgaatgcaaggtgtgatcttggattttcttttgctatgaaggacattattgggccatttaccaaaaaaaaaaaaaaaatgcataaagttgatagatcatagtattggtaattttctgattttcacaataatactgtgtctctgtgaaataatgttcctgtgttgggggaaaatacacactgacgtattaatatttaggagtaaaaaaaatgctgatgccctatttacaatcggattaaaattcaaaccacttcaagatttggtctcctgtgcacttgttctcttcctgtcattcttccccacttaatcattatgagaggtcactctgacgtgacagttcccagcgcaagccaagttttttactgttccctaaaccactgtcttttgttaccctattttagtttaaatatcactcactcagaaagtcattccctgagcacactgcctaaagttagtacctccattgtctattaaagcactctttcttcttactattttgcttatttattgttacctatttattcccactgaatggaaattacattagaaatgggggtatgctctgttcacggctttttcttgaacacgtggaatatactagcgctcaaaaaatatctttaatcagacttatctttaactcttaccaaaaagcgttatactcatagaaagagcactaatacttccgtaaaattctaagctgaattcaaagacgataccctttaagtgaaacttcacgagagcctgagcacaaggaggtgaagtggatgccatcaagattctgggtcagggtcgggacgcggaggaagacaggttacttcgcgcctactgctttttctactttttgtgagagtataccagcatctctccctttggcttaaagaaagaataaagtgaggagagaataataatataaaagataaataataattccaaggaaaggaatagagcagcttctcagataccacgacgccaagcggctcaaagtacgcgaaccgaaggaggagcctttgctttccccaaccccgcctccattgcttctgcacatgcgcgccgccagcctctcgcggcccgcttttttcccacaatactcctcgtcctgggggccggagccgcggaacgagccacagagaaaaaggttattggttggcagttcagccaatgagcgggcctgttactagtttgcggcatcctgtggtataggggaagcgctccgggcctggaatccctacgcgtccctttgggtttagcacgatgagctcaatcggcactggggtgagttcgctgtctgtcggtgtaatagtttaacctaaggattggggttgaagggaactcggacagaccacatggggttcgcggacccg

SEQ ID NO: 12424 - DNA, 2300 bp, Homo sapien
ctgcttcactcctacgagattgcgccactgcactccagcctcgatgacagagagagactctgtctccaaaaaaaaaaaaaaaaaaaaaaaaaaagcctcactcctaaacactcccatttacaagatcttttctatataagaactttttaaataggcgggtgggggggaggaaatcacaaaaatacgcataatgttttataacaaaaacatgaggtatatcaaagtccagaaatgagaaccacgtaaatgggtaaacaagtccataaggatgtcctaattttgggatttcattctaaaatattacactagaaagctaattatacagactcatttgaatctgaccaaacaaaacatcttttaactacccttcctcccattctggtatttctttactaatccatagaaagtttttccaggtagtcccccgcaattctaaggatttttagactttatgactcacctcagtaatcactgagatgttctgttttcttcagcacaactgccaaaaaacccagtaattgttaagtcacacaatcattttctagttatgggcgccaccaatatagcagtagggtttaaaacagaggtattgagggtaactattaggatctatccagtgtgactaggtcactcactagaaatgccaacatgcatttcacgtttttatgaatacttttgagcaaaattactgttacgaataaaaaactgattctgctcggctgttttcttactgagaaaatttagtccacgtggattactgacgatatgtcacattttaaaaattactccattctataaaactagtcaattttatactccaattccgctatttaaaaatgtgtgtttcgtttaacagaatataagatgttaacagaaaaagatcaacgtctatcttatcggggacgtccttttgtctaagatgttttcagtccctgcaaaaccactgtttgctttcaaaaagtagcataagcctcgtgcagagtgacagacccttgtctaaggtcacagaagaagcgtctgcgctggcaagtaaattcctcagcatccagaaagccagcgctttctccagtttcctcatagctttatcccgtgaggagcacgcggaaacctctacccatgcaggatgtttctaagaaccacttcttccctgtcttaactaagaaggctcccacagctggtgccaatcaggtggagaacatggcaagtccccgaaatgcacttccaaagacaggaaagattgcagtgggacagaacccagaaaatctctcacattctcgaaaacccgaaagagaacctccaagaaagacgtttgcctctcctccacctctttatctcggcgggagaggaagcctcgcccccattcatcccgccccttctccccaccccgccgcagggagaagtttaccatggctgcctgcggccccttcacttccggtgccggtgccgctagggctgcgccatccccccagtcaatcggacaaccatagcctccaactgacctttctgacagctctgagactcctccggccacgactaggtgctgtcctggaggaaacggtggaggacggccgcacaaaaaccaatctacctgatgaaaactccgttcccttctcgccagaaacataaaatgcgatggagctacggccaccgctgccgagacaaaatggcgccgacaagctggtttagcgcaagcgccttggacagaccctgccccgcccccgtgcaagcccctggctgcaattctgggttccgtttccatgggacactccgccgccaatcctcgtgtcgaactgctcttcctgacccctcaattcaccaatcagtgcccagtcaagcacatccggagtcgtctctaccaatcatttctcaggacttgcttactcaataaccaactctccaataaagttggttttcggaaaaagccaatcataagtggaagatgtcctacctgctgtttttctcaccaatccatgaagtttcacagctacatccaatgaggacggcaggtagcgaggtcctatccgaagctcttcggcgtcatgagcagccaataggagttcgtgtagaagcgagtctgctcaacagcttgttatttggtggattgtggcagtaaatcggggcgagtggggaacccggcgcaggaactgcagccgcggctgggagtggtgctgcccggacgggggcccacggaggtcagaggggaggaggactctggagctgacagcgcgcacttcacccgcagttggtaggtggggagaggggaatccggggatactgaatggacgaagtggcagtagcag

SEQ ID NO: 12425 - DNA, 2300 bp, Homo sapien
gaaaatcgcattggcacacgggaagaaaaaaaatttacaaaaaatcccccaaagaaccaaagcaggacaaaagctttacttctgcaaaggttgctgccaacacaggaagtgtttaaaaatactatccgaatggacaacaattgaaaggctgcaccagcctttccaaagtactgctacagagagggcctaaactccgcatttagacacacagatcatttttcacccattcaacacatcctcctatgccgaaactgctgatcagtaggaacatcaattttgagtagcaaaacaaatgacattccacggcactagccttaggattggcagtgttcagggcgcgaggatcggggcagagttgactccacttaccttcatttttgttggtgatctgtggggttccagctcagcgagctatcttcgcagtcgctagaactatggggagggggaaagacaggcacagacataatcagtcaactgcggggagcgaccaagggaaagaaagtaaacaaacgccagcggggaggggcagaatcctcaccagccaagggacaagaccccttacgagggcagccaggacgcaggagctgagggggcagcgagaaccccacgagcgccaaagggcagcccgttccgccccggagctcgccagcggcccaccgcgcccccgcctcgctggccactttgacccggaatgctcaactcggagctccaggacagatagctccggaaaaggccagagctcccttcgggcttccccaggtcccccgcggagacgaccgccgagcctccgctccgcggtcccccggataccccgacttcggcccgcgccccgcctccgccgctcggccccctcggcccgccccgggcccgcggtggcggcagcggagtgtcacggcgccattgctctccttccttcgctctgcaccatgtcagaaaggagaagcgctccttcacccaaaggggcaggggccgcggccttcagccgggagccgccagagccccgggggacccgcgtgggggagggggcggggggcggaggggaggaggaggggaggtggcccggacagggtgtgggaggggaggggagccgcaccgcagcagccgctgcctcctcccagcgcccgcctcaactttttgtacagcccagagaggtatcagctcgtagcccctcgagtcctgccacggactccgcagaggtggacgcgccgcggagttgggggacggctcccccaagcagcccgctcttcaccgcgcggaagcaaacttagcggcgcggccagccccacagccattttcccgggaacccgaggaagcggacgaggaggcggctgcaactgcggcggcggttcctgcagttgctgccgctggtcaatggctggccccttcccttgcgctcgccgtgccacttgcctagcatccctctccccacctccaaagcttccaactgcaccgggacctcgggcagcagcagctgctgctactgccacttcgtccattcagtatccccggattcccctctccccacctaccaactgcgggtgaagtgcgcgctgtcagctccagagtcctcctcccctctgacctccgtgggcccccgtccgggcagcaccactcccagccgcggctgcagttcctgcgccgggttccccactcgccccgatttactgccacaatccaccaaataacaagctgttgagcagactcgcttctacacgaactcctattggctgctcatgacgccgaagagcttcggataggacctcgctacctgccgtcctcattggatgtagctgtgaaacttcatggattggtgagaaaaacagcaggtaggacatcttccacttatgattggctttttccgaaaaccaactttattggagagttggttattgagtaagcaagtcctgagaaatgattggtagagacgactccggatgtgcttgactgggcactgattggtgaattgaggggtcaggaagagcagttcgacacgaggattggcggcggagtgtcccatggaaacggaacccagaattgcagccaggggcttgcacgggggcggggcagggtctgtccaaggcgcttgcgctaaaccagcttgtcggcgccattttgtctcggcagcggtggccgtagctccatcgcattttatgtttctggcgagaagggaacggagttttcatcaggtagattggtttttgtgcggccgtcctccaccgtttcctccaggacagcacctagtcgtggccggaggagtctcagagctgtcagaaaggtcagttggaggctatggttgtccg

SEQ ID NO: 12426 - DNA, 2300 bp, Homo sapien
aagatgggaagaaagccacaagattggtggtcttagaagacaagttgccgtcaacctaaagaaagatcaattgaagctgggctaaacccttgccaagattctgaaccagtccctgatcaccagtaatacttacaagatgctgacactatcctctcctctgtgtttacaatcaggttttcacaataaccaagttcccttctagaagacaattatcatgagaaaaaacatacagtactcaagaaagcatgatatgtaacttacccctgctaactcttaaattttgagggctgaggctactactcagacccattggttttttaatctatctactaatttataatttacctatctatctctatatatatatatatatatatatatatatatatttttttttttttttttttgagacagagtcgcactctgttgcccaggctggagtgcagtggtgtgattgatctcagttcactgcaacctccccgcctcctgggttgaagcaattctcgtgactcagcctcccaagtagctgggattacaggcttgtgccaccatgcccagctaatttttgtattttaagtagagatgaggtttcaccatgttggccaggctggtctcaaactcctgacctcaggtgatccacccacctcggtctcccagtgctggaattacaggcgtgagccaacacgcccagccacctatgtatttttatagagacagggtctcattctgtcacccaggcaggagtgcagtggcagtgatcagagctcactgcagcctccaactcctaggctcaagtgatccctgcagagtagctagggctacaggtgcacaccacgaccagtatttttttgttttgttttatcgagacggagtcttgctctgttgcccatgctggagtacagtgacacaatctcagctcactgcaacctccgcctcccggattcaagcagttctcctgtctcagcctcccaagtaacggattacaggcacatgccaccacacccagctaatttttgtattcttagtagagacagtgtttcaccatgttggccaggctggtctcgaactcttgaccttgtgatctgcctgcctcggcctcccaaagtgctgggattacaggcatgagccattgtgcccggcccttgttttgtttttttagagatgggttcttgcaatgttgcccaggctggttggtctccaagtcctgagctcaagtgatcctcccacctcagcctcccaaagtgttgggatttcagttgtgagccactgcacctagctagacccactggtattcagagcagtgatgagcaccttgctatgcacacactagtaataacagtaaattgtaaatcagtaaatagcaattgtataacctaaataaaaatgaattatctagttctttaggtccctagcttatgccttttctcctccttagtagaaaagtcagaactctggtatttaggacaaagtcttaccttctttctttctgctgtgtccgctgagtaaggcaaatattagaaaagcagctaggccagtatcatgggactctcagttgtttttgctttgggacctttgactgtcagtctcagcccagcaatttaacgtatttttctagattaaacagtgttgcttctgaattcctcccttggaccttggactgctgggtcctttcaggagacaaaggataccagattggggagtacgggctactgttagacaatgtgaactaggaggtgaccaaagttgaccttagagtcaacttaattttgcaggtgagggaacagagacctaaacgaccactggctcccagtaaagcagattcgcagcatactgtgctttgcctgaatgggtgttgtagacacaggggcagaggcgtgtttggagaaagggttcagaatttggagtgcgacagacgtaggttcgaacagagctctgctactctgtggctgtgagggctcccgcacacaccctctcgaacgctcggcttcctcatcggtccgcaagcctgggtgcgaggcgtcaacgcgcagctgggtgcgcaggaggccccgaggccggatgggccgccgcgccgacgccccctgccggccggcccgcgcccaacgctcggcttgtgggacgcccgcggtcggatgccctccgtccgctccctcctccgcctcttggccgccgcggcggcctgtggcgccttcgccttcctgggctattgtatttacctcaaccggaagcggcgcggggaccccgcgttcaagcgccgcctgcgggacagtgagtgggaccgaggcggaggcgcggccggg

SEQ ID NO: 12427 - DNA, 2300 bp, Homo sapien
ttgggaggctgaggcagaagaatcacttgaacccaggaggcagaggttgcagtgagctgagaaaataagcctgggcaataaggcgagacctagtttctacaaaaaagtaaaaaattagccagcgtggtggcaagtgcttgtagtcctagctactcaggaggctgagacaggaggattgcctgagctcaggagttgaaggcttcagggagctatgatcatgacagagcaaggccctgtctctggaaaaaaaaaaaaaaagagggaaaggaactaaagagtaatgacaaagagctgtaagatccaaattaagttgtcattttaataattcagagtgcctacactcagatcttaggtcactgtttctttcacataagtttcacctagaaggtaagagttaaactatctccaaggtctctggcgactctgacattgtagttctttcagtacactcataatatacaataaattgtgaacaaacaagtaccacctatgagcccaattacgaagagaaaatgtaactaaaataaaaaataatggccacgtgcggtggctcacgcttgtaatactagcactttggtaggccgaggcgggtgaatcaagtcaggagttcgagaccaacctggccaacatggtgaaaccccgtctctaataaaaatacaaaaaaaattagctgggcgtggtggcgggcgcctgtaatccagctactcaggaggcctgaggcagaagaatcgcttgaacctgggaggcggaggttgcagtgagccaagatcgcgccactgcactccagcctgtgccacagagtgagactttgtctcaaaaaacaacacaaaactcattagagaaactcagcaagttacaaaaaaataataattaaaagggtctttaacgctgagcccttaaagtctttttttttcttttttttttaagacagtcttgatctgtcactcaggctggagcacaatggcgcgatctcagctcactgcaacctccacctgccgggttcaagcaattctcttgcctcagcctcctgagtagctgggactacaggcgcgcgccaccatgcccagttaattttttgtattttcagtagaggcggggtttcaccttgctggccaggctggtctcgaactcctgatctcgtgatccgcccgccttggcctcccaaagtgctgggattacaggcgtgagccaccgcgctcagactttaaagtccattttaagtctagacttctatgaaggtagactgccgagatgtaaaagaaataaaattagttatttagcttttagatcggattacattttctgctttgattattctaaagcctccagtaaggcgtaaagggaaagctctaagtagcgcatcctgggaaatgagcagatcagggaaggggtgttagacctggtattatgtctaaagacgattttcatttaaaggaggatcttcccccgggcagctcaaggtcacatcgtaaataccttatagtctaattcagtgtcccaaaacaggaccccgactccccagatccgggttgggggtggctcagggcctaaagttcctaccctcgcccaggtgacaccatctccaggaaggtctgcacccgacccggcgaagcgctgtcccgcttcgcaccccccactgctccaggtacgtgcggcggcctcctcgggagaccccgccactttcctggagcgtagcctgccaccccccgtccgggaaccccggattctcacggcagagaacagacaccatacttaagcacaggctctcgcatccgacatcagtacaaggctgggggttgttgggggacggttgagccttgggagggagggtcagggtctggacaggagccgcggccgccagatgggaaagaacacgtgggagcagtaatgtcaagtgacacttaaacccttagacgccgattcgttataacgcgaggaaatctagaagaaaaagcaggtaccatcagcgaattctaaaatctcctaaggattaacttcggttattttctgcttagacaacgctttctattcccgacttcctctccaataatgacccgaatctgtcgaaacttcttggaagcctaatttacctaatcccacgtccctaacggtcttcggaagcgaagcagtgtcaacagtccctggtaaacacaagtagtattacaagtcgggagctcttcaagtcttggatgagactgtagagcggtcttgtgcggcaatgtgctaccttaaaataaataaataaataaacccctgttatgtccggagtttgtttccacccggagaggaatggaagagca

SEQ ID NO: 12428 - DNA, 2300 bp, Homo sapien
aaccccgtctctaataaaaatacaaaaaaaattagctgggcgtggtggcgggcgcctgtaatccagctactcaggaggcctgaggcagaagaatcgcttgaacctgggaggcggaggttgcagtgagccaagatcgcgccactgcactccagcctgtgccacagagtgagactttgtctcaaaaaacaacacaaaactcattagagaaactcagcaagttacaaaaaaataataattaaaagggtctttaacgctgagcccttaaagtctttttttttcttttttttttaagacagtcttgatctgtcactcaggctggagcacaatggcgcgatctcagctcactgcaacctccacctgccgggttcaagcaattctcttgcctcagcctcctgagtagctgggactacaggcgcgcgccaccatgcccagttaattttttgtattttcagtagaggcggggtttcaccttgctggccaggctggtctcgaactcctgatctcgtgatccgcccgccttggcctcccaaagtgctgggattacaggcgtgagccaccgcgctcagactttaaagtccattttaagtctagacttctatgaaggtagactgccgagatgtaaaagaaataaaattagttatttagcttttagatcggattacattttctgctttgattattctaaagcctccagtaaggcgtaaagggaaagctctaagtagcgcatcctgggaaatgagcagatcagggaaggggtgttagacctggtattatgtctaaagacgattttcatttaaaggaggatcttcccccgggcagctcaaggtcacatcgtaaataccttatagtctaattcagtgtcccaaaacaggaccccgactccccagatccgggttgggggtggctcagggcctaaagttcctaccctcgcccaggtgacaccatctccaggaaggtctgcacccgacccggcgaagcgctgtcccgcttcgcaccccccactgctccaggtacgtgcggcggcctcctcgggagaccccgccactttcctggagcgtagcctgccaccccccgtccgggaaccccggattctcacggcagagaacagacaccatacttaagcacaggctctcgcatccgacatcagtacaaggctgggggttgttgggggacggttgagccttgggagggagggtcagggtctggacaggagccgcggccgccagatgggaaagaacacgtgggagcagtaatgtcaagtgacacttaaacccttagacgccgattcgttataacgcgaggaaatctagaagaaaaagcaggtaccatcagcgaattctaaaatctcctaaggattaacttcggttattttctgcttagacaacgctttctattcccgacttcctctccaataatgacccgaatctgtcgaaacttcttggaagcctaatttacctaatcccacgtccctaacggtcttcggaagcgaagcagtgtcaacagtccctggtaaacacaagtagtattacaagtcgggagctcttcaagtcttggatgagactgtagagcggtcttgtgcggcaatgtgctaccttaaaataaataaataaataaacccctgttatgtccggagtttgtttccacccggagaggaatggaagagcaccagagagcgcttagctttctggttggatgttttgggtgagtttcttggcgcgcatgcgtgttgtgtctcaagggcgggtttgaagggaagtgggtgttgacctgcgggcaactgacgctgttgtcagattacacccacgacggtgcgggtctcgggcgttctggagatacgtaggggtgaatttatgtttccgacgattgcatctggaggggtgtgtaagactctgtggctgaagaaagctattacgcttcttatgtgggtcattattttaaaaatagcatttcgcttttatttgcttgactgcctcttctcaacaaattttaagcccgccactacatgtgtttggttttgccctaccagctctggggttggggagtgcactgttatggttattgttgctcctgtggccattctcttgtcatccccactttcacattttggcgtggtgtattaatagactgagtgggattaatgggtaaatatgactttatagtcagctctaatcctggattcaatatcagaatttagattttcagctttgtggatgttcgacattttaaaaacagttattgcaaagaggtgaaaattttgttctgaagtcttaaggaaacagagaaagtttttccgtccttaa

SEQ ID NO: 12429 - DNA, 2300 bp, Homo sapien
cttttgtttaatgtctcaaacaccattcaaagtcacaattgtagtatataaaacatttgttttggtaagtgatatttaaataaaaacaaggcatgctgctaatcaaacataatttaagaatgcattatttgacaatactgaaaattttaacgtgagcataattaagaatccttttgcttacactttctgacaccatgggattttctaatagaggctggtaacaatttctagcagaagttaagtctgatgaacctaacaaaacaaaggaatagattttagtgattttaaaatcagatccttagctttagaaactgtatatgcatgattcaagatctataaactccatataacgcagaagttggaaagacaatttgcatgcaaaaaaagttaagaaaatgtatttaaacatatctgaatgaaagtttttacagttgatatttgggaaaataaggttcggtactgacaataaagtgagattaagcacgaaacattttaaaatataaccatacactattggatgtggacaaactatgggtagaaatatgtatacgatgtaaaggtctaatttaacagcagtactatttgagtgtcaccgctgtatcccccaaagaacagcattacaaaagcgttttgctgtttttgctcacatattcattaatttaatcctcacaattagcagcgaagtgggtaaagcatatgttatccttattttcactgagctctagacagattaagtgaattggaatatagaagccatcaattggcagaagtcctgcttttcccactatgaaaagaaagtagtgaattaggtaaaaagcactactttgggggaaaactataaaaaacactacgtgggggaaaataaagcacattatacaagttaagtgtatccaccataaatataaaaaaaaaaatatgcaaaagtcaatgcaaaaaaaaaaaaaaaaagcacaacaggggacgttaaagtttcattcattccatctattcaaacattttataggcttcctggccattttcccgggaaacagggtcagttttcaaacatctgtacaaactagacttatatcttacgtttgggaatttaaacaaataaggactaaagatttactaaactaaaactggttgaaaaactacatggaatcacataccacgtgatgttccattcaaactagtccccgttccaacaggaagacgtttatttgcagacaatgccggaggaacacagggcaactcatctttcagcaaaaccaaatgatctccatgattttgagaaactacctcacgaagtctcttcactggcatcttaatcttttttttcttctccaagctgacctcagagcctttcatattgttggtcacaaaacaagtcccacacttaaggacggaaaaactttctctgtttccttaagacttcagaacaaaattttcacctctttgcaataactgtttttaaaatgtcgaacatccacaaagctgaaaatctaaattctgatattgaatccaggattagagctgactataaagtcatatttacccattaatcccactcagtctattaatacaccacgccaaaatgtgaaagtggggatgacaagagaatggccacaggagcaacaataaccataacagtgcactccccaaccccagagctggtagggcaaaaccaaacacatgtagtggcgggcttaaaatttgttgagaagaggcagtcaagcaaataaaagcgaaatgctatttttaaaataatgacccacataagaagcgtaatagctttcttcagccacagagtcttacacacccctccagatgcaatcgtcggaaacataaattcacccctacgtatctccagaacgcccgagacccgcaccgtcgtgggtgtaatctgacaacagcgtcagttgcccgcaggtcaacacccacttcccttcaaacccgcccttgagacacaacacgcatgcgcgccaagaaactcacccaaaacatccaaccagaaagctaagcgctctctggtgctcttccattcctctccgggtggaaacaaactccggacataacaggggtttatttatttatttattttaaggtagcacattgccgcacaagaccgctctacagtctcatccaagacttgaagagctcccgacttgtaatactacttgtgtttaccagggactgttgacactgcttcgcttccgaagaccgttagggacgtgggattaggtaaattaggcttccaagaagtttcgacagattcgggtcattattggagaggaagtcgggaatagaaagcgttgtct

SEQ ID NO: 12430 - DNA, 2300 bp, Homo sapien
gtaaaaaaaagattgccataaatatatacacttgctatgtacccacaaaaattaaaaataaaaattttaaaaacaaacaactacaaaatacaaacccacagatgctagtgaggctgcagagtaaacagaacacttatacactgttggtaggaacgtaaattacttcttctctattttaaaagagggtgccttagaattctgtggggaccacttcagaggcagagttatttcaattgcctgagacttgctgcaggccaatcgtagactaacaggtagaggttcaagaggtagggtacttaaccctgccatcaatttaaattatatatagtctatgaatgagttcatattattttcaaattacttttatttgggtgattataaacacagtttatcttgttttatttattttaggcaagagtgtgcaccccactgcctaccccacagcctacgcctccttgctcaccttcatcacctgctaaggagtgtgttttggtaaagactccagattcttctccctgtgattcggatcatgatatggcttttcctgtgaaagaaatatgtgctgaaaaaggtagaaactttatttctataactcggttttaattttagcaactattaaatttcatgatttgtatatgtacttgttgcttactaggttttagtaaatcattttttctcacaaggaaatttaggaattgattgcgacttcttaaaagtctataattgaggccaggcaggcatggtggctcacgcctgtaatcccagcactttgggaggctgaggcgggtgaatcacgaggtcaggagtttgagaccagcctgaccaacatggtgaaacccctctctactaaaagtacaaaaattagccaggtgtgttggcacgtgcctgtaatcccagctactcaggaggctgaggtagaagaattgcttgaacccgggaggcagaggttgcagtgagccgagatcgcaccattgcactccaccctgggcaagggagtgagactccgtctcacaaaaaaaaaaaaagtatacaattgaatagatgcttagactactttaagtatatggtggtattaacaatgatgtcttctcaaggtattttttaacgcttcactaaatttaggaattatcacattaatggctaccaccattgtcattattattattaattataattgccattatttgtgtgctaaaatggtaagggatatctgaagcaatgtatcatgccatcctatggagttctttactgactactatctttttctgtccttttaaaaaaaaacctttaggagatgatatgcctgccatcatgcttgttaatactccaacagttacccctactactacacctcctccagcggcggcagtttttaccccaactttgtcagatatttccattgataaattgaaggtatcaagcccagagcttcccaagccatggggtgatggagacctgccactggaagaagagaaccctaactcacctcaagaagaacttcatccaagagctatgtaaatgagaacatactcactagtaactgtacatttcaacttatgtttgacttatgtgatccattgaaaacatagaaatattatacaaagctttataaaccacagactaccttatactttgaaagaaagaactttcataagtgttgagttttgaaaaattatcaaattataccttcaccttttttcttaaaaggtttgaaatagctagaaataaaggtatctattatattgttaataaaatagaaaacaatttctccctattgtggatcattatttactatgatcagttaacttttatattattttatatctctctgtatggaagagctttcaagatggcctatgattaaagcatgaaaacaacttttaaaaatcttgttaattatagtagtgcagatttaaaaaaatattttgctaaaggagacatagtcttcgagtctgttttttatatcaaaatgaatacaggccttcagtgacctaacaagctccaaatatgtctttattttcttagtgtaatgtctgtggctaaggatgaagaaccagagagtatggatttccctgctcagcctccacctccagagccagttccctttatgccatttcctgccggcaccaaggccccttccccctcacagatgccaggttctgattcatcaacactggagagcacattgagtgttactgtcactgaaactgaaactttagataaacccatctctgaaggagagattttatttagctgtggtcaaaaattggcccccaagagtaagttaatttgtattagtt

SEQ ID NO: 12431 - DNA, 2300 bp, Homo sapien
cacgggattagaggaggcggcgccccgtggggcaaggcgacccgagccgggccagcagtgtgcattttcagcctctcccggggtgataatggcattctgggcttttccacagggatccctaagcccctgaggggtcttaattaaagaggctgtgcgggtcttggaggccaacacgggccaggaaatcagtatgggaacttgtttagagttcttgcctggcctcagagaggctgggttcacaggagcaaaggagatggaaaagttggaccaaatgtctatatcctaaatcaaaagcctccactttcatgttaataatctagggctctcccacaaaatgtcacttcattgatcatttctgtatgctatgtagaaacgatcagaaaaccatactggaaattgctcatagtaccatgggttggagtgatgctttctctttcacctttctgggattattctgaggaaaaggtagtactagatcagtgcggtacttaagttatcttaaaacttatttacatgtactagttactccctttcagtggaagatatttagatgaaatattgaactgttttgctatacagcaagtatcttcctaaagaaatttcaaatgtggctttaaggagaataaatattttttaaaaaaagataacacaaagtaaaatataagatctccttccccagaaaaaacttaaggattataaaggtcagtaatatatttttgtgatttgagtatgactttttggatataatcatagaatatatctgtttaaaaatattattttgcaaattgtgatagtttcacaatttgtaaatgcacacatacacacttatgtatgtggttatataattagtgccagtttaccttctagaccataagctctgtgaacgtagggactatatctgacttgtttacccactgtattcccagtgcctggtattaggtactcaataaatatctgtgagtgaatattcaaagaggtgcagtgtaattatgatggtacatatttgtttttatcccaggaaaatgcctttttaaaaaaaattaatatttcagttattaagtattcaggttataaatttagatgttgttttaagaaagtactaatgtctgtatataaaaatgtgattgaaaagattctatgaattatgaaatcatatatgcaactgtttgccagtttgtgaaattaaatctttttttttttttttttgagacagtctcactttgtcgccgctggagtgcaatggcgcgatctcggctcactgcaacctccacctcccgggttcaagcgattctcctgcctcagcctcctcagtagttgggattacaggcgcgtaccaccacgcccgggaaatttttgtatttttaagtagagacggggttttgccatgttggccagcctggtctcgaacttccggactcaagtgatctgcccatctcagcatcccaaagtgctgggattacaggcatgagccaccacgcctggcctgaaattaaaatttttaaataattggagaaatggtcccaataaagcagagtaagagcaaaatccacctaatacaattggttaaagaagccacttgtgtaatcctagcattttgagaagccaaggcgggtgcactgcctgagctcaggagttcaagaccagcctggccaacacggcaaaacccatctctacaaaaaatataaaaattagcctgtagtcctagcaacttgagaggctgaggaaggaggatcacttgaacccaggaagtcatggctgcagtgatctgagatcgtgccactgcactccagcctgcgtgatagagtaaaaccgtgtctcaaaaaaaaaaaaagccacttgtctctgaaacacttttaaattttgctttgaaatcaaatcctttcattgtattagtaccacagtatgtggctctaggtatttgcacacatggaactctgcaccttccatctgtaaagatgaccggtagaaatggcagagctaagggacaaaagtctgaggctggtggagacttaatcaccttaatcagtgattacgacggtggggaatgcaactcacttccagacattctagaatctttggaatccacagtgctctgcaggaggaagcaggagcctcttgaaaaacttaccaccaaacttcatggaatcaccctggccttcttcaacaaaaacctctttaacagcactaaaacacagctaaaaggtaaccttttcatgtaggatggtttatttggtagtgtttggttgtgcaccagagaggatggaaggagttgtttcatagcctttcaaacaagaccagca

SEQ ID NO: 12432 - DNA, 2300 bp, Homo sapien
gcaggcataaagaatagataacctgaagagaatcgattttgtatgcttatgaacacctgaccataattccatttttagagctaatatacaaccttgttaattatgaatcaagtttgtagttctttcatgtctgtgggaggcagcaatggggaggaaagtgaaaggtggcaagggagttcttttgtttttgttttttggtaaatgtcaacttaattctatttgtagtagagattaaatgggtactattaagtttaaaagtatgctaatgaaaaaacaatttacaaccaatctacattctcgagtctctctctagcaattgtcaggtgaatgcttgcaaggtaatgtgctgaatacagcgatactaagagggtattaaaacagtccctgccttcaggaagctttcataatgtagatggagagaagagatacacataaacacctacgtagatagatatgcgtgtgcacacccagataaataaccatacaggtagcatgggatcagaatcagatatttatatagttaactggagctcaaaggttggaagggtggttagaccacacagagaggggaggaaagaagaggaattcctagcacgggtaagcagatgggcaaaagtgcaagtgtctgaaataatgatataggatgcactctttcacacaacactttgcctgaacttcagcaattgtgacttgctggattgaatttccgaggttcttggatgtactgcttttaaagatatatgtggtacttttccacagataagccagctagtggaattttcagacccctatcccaccggaaatttcagtgggataggggtctggagtagtgtgttccaagcagagatgaccaatacatgatacttcaagagggaagacttataaatccctctggagaaaagctacaactcatatcacctttactatctatgtgctagccacgttgtaagtgcacagcccccacaatatatagcatatgctgcatactattataattcttcaacagcaggttcccatagcagctgctcccttttacagtggggggaacgtacacagagaagggagtaagttgcccgcacagctatttaggggtgaaactgggatacaaatccagacagtctgatttctgagtcagagctcttattgtaaacgcagactaagtaataataaaagctcaaacaaaaaccaaagcgcgcacgcgcgcgcactcaaatcgtaggcttgtaaaagaattgatgcaacctctcgctatacaacgacatcctcctgcctaattttaaatgccgtccatcgtaagaccgacgttaaaaaattaaaacgacaacaaaacttaagttttagaacactgcattgtgctctgtattgcttgcctttacaaagtggagttaaggaaccaaccccacagtgtctgtgaatacacttgcaataccttgcttgggaagtgaaagaaacctaactcggtgtgagtggaaatgaggagtggccgtgtggggaaagggttaagactgtgctgcaacttggtcgagtttcagaaagttctccggagagcccaactgccgcgtcccgtcgcggcccctgcctgcgcggccgactgtaacaggatgctggggctccaggcgctcgccccgagctttgggcgacgagaaagagccaatgaggagcgagggcaaaatcgggtgcagtaaacccgaaaagggggcgaggaggcccgcgaagagagcgggggaggaggcggggaggggcgaggaggggcggggagggccgagcgaggaggaggcggctctgggggccgggcggcgcgcctgacagaggaggggaagcctgggggcgcaagcgtcgcagccgaggggccggcgcggggaggcgggcgccaggcgggggtttgcagggccgccgcgcgtgacgtagcgccgggcagggcgttatcagctgccgggccgcggcgagggacgcgcggcgacagcggacggcgctgcccgggccgggacagcagcagccggcggtcgcgcgcaggactcgagggcttctagccaccgtccccgccagcgccgcgccccgccacagggcggcatgagcccacccgcggccgcagccctagcgccctgctcctccgcctgggcggcccggctgcggtgacggctctcgctgcccgactgggggccatgaagccgagtccggccgggacggcgaaggagctggagcctccggcgccggcccgaggcgagcagcgcacggcggagcccgaggggcgctggcgggagaagggcgaggcagacaccgagcggcagcgcacccgggag

SEQ ID NO: 12433 - DNA, 2300 bp, Homo sapien
taggaagagcagttcacatgtgcatttctccacatttatgtgcttacagtctattgtgtatgctgtcctttatatggagatgactatgtcacatggcacatccctataatattgttaaagagaatggaatttttgttttcagacagactgcatcttctccttcattactgaagagccaagagaacttgttgtaaggtgatttctccattaaaattactcctcagagtgtgcctcagtaacatacttttatctacaaggataagccctgtcttaacagaaaggctccacattcaatttattgactcaataaatttcaggctcactgattatgtttcagtctaaaagctttacacagttataaaattagaagagcctttagaatcatcccaggtcaagtttctctctgaatatttttccaccatgaactgcgttacattaagtctacccattagttagaatatcagtgattatatccttgatctgatggccaggggaaaatttatattgtcagagttcattttagataatatttgaaatggaagaagtagctgaggacagaagagcaacattcaaagctatcttctttcgggggagaaaagtgggtcttgtctataaagaacaggcttgttaaaagaacatcagaattcatcgctaaacatctctctgagcaaaacaaagcatttcctctcccctgagatcctcaactaatttcataaatattttttcacttgaacccaacttagtgttgcagaatgaaaggagaaaataaatgataagagttccaccaacacttcagtagggagttgtctgaaatcttaattgtgaacctttttttcacaagatgcacagtcttctagagattttgctagtggaacgggtgtgtgagctgatcattatatggaattgagacacatcaaatgccattaaaatttacatttacaactcgagtaactaaatgcattgattcttttcatattaaaagacacttggtattcactgaataatgaaaaatgccacggaaaaaattatgtattaacaatacaacctgcctaaagggtcagaattctgctacacaccttttgcttacctttaaataaatatttaggtgtgttaagagcagggcaattcttgaacggcacgatgttgtttggtttaatgtctttataaaaatatttgaaaaggtatggaaaatgaggtgagagtgttgtggatttaaaaacatgtgtatacatagatacacaattattaaaactttagacaaggacgttttcttcctgggagtggagagccaccagcgcgggaagtctgctgcagggatgaacaaaagcatggctgcacgatagtattatctttgcagcagcagcaggcgccctgacggagggttgcggcgactgtctagtctatcacaccgcacttctggtagtgacaacctccgttattctgtcagctcagccgactaagtggttccccgcgttctgcctggtcaccttgtctccgttaaacgggaagcagaaaagagaaaggtgaattgagggggtacaaggagattcctccgccttgggaccggcgtcgccccatcctctggaagtgttgagcggggagaattcgaggaccgtatttaacccagaaaacagtaagccctctgaattagctgctacgcctggggaaggcagaaaagtcttaatcgtcccttcccagcagggaccaagaaagaccagttagagcgagcctggccggaccacgcgagccccggacctctccgatccttcagagcccgcgccgggcaaagtagaggtcaagtcaacacacacgaccgcagggcagccctcccactctcccgtgcggtccgcagctcggcttcggaacgaccaccgctaacactgcaaggctgtaaggctgggagggggcgggtcctgaagggggcgggaataagaggcggggcagaagggcggaggagtgtgtcgggagatgtagttccgcgagtcccgacagcaaagctgtcccggctccgctaatagattgggaccactactcccaggagtctgcgcgcccgaccggagcgtccatgcgcagtgggagccactttgtatcctatcaggcgaggagagggtgatgtcacctgcgagttagtaacctacgagcggctgtgaaggaaactgtttaaccggatcccattgtacccagagtgcagagccgcctttccagcatgcaggggctgctcaggtaagggggacgctcctccttgcccgccgcactcattcattaagtggcactgctcagtggtgcgggggtgggcgtgc

SEQ ID NO: 12434 - DNA, 2300 bp, Homo sapien
taggtaagtcagactattatgatgtgagaaagtttctgtgtttcccatctgtgtaatgcaatacctcatcaagtgctggcctgtggttacttgtgccctgtctgtaacataaagagcttgtatcagaatgttagttcagctaatgatgttttcatagtaagactttgttgatgagggaagcagcacattatgtagagaacttaatgtgggttttagcattagacctgaattcatatcctatcctagtcctgcctcttattcctgtgtatcctggtgaagttactcaatttttctgaattttgctgtttttataactgcaaaagatagtgctggtggtgatgatgataatgacagtgattttccaggaatgatgtaaaaattgactataaaacctatggaattacttagcccctttgataggcattctgtgaatgttaatttccactacctgttcatttcatcgtttgctatcatttcactgagtctaagctatcccaacttgctttcagagcttttctctaccacggctctcctctcctgtatattcatatactccaacatgctcttcttcttgatattctgtgaacactcttgcatcagtgcctttgcgcttgctgtttcctcagcttcaaaagatctttcacagatgtccaaattgttggttccctagttccctggagagagacctgttctaaccactgtgtgtacattattcacctcatctgccatcattttctatttcctttaccctgatgtgtttgtcttcataaaatgtatcctgggtgtgtagaatacatagtaggagctcaatacatatgtgactgaataaatgaatggcatgatcatttcttttgtgatctttaattcagctggaagttaagtgtaggtatatgggcatgtttttccataaagggaatccatagtggaatctgaacttgattgtttttagatttagttttaatttaataattgcctactgtatgctaggcatcgtagacttttaaatttttctcatattgtgatctgtttcgctcaggtgatgtctttttttcttagaaagaacaaagttgaagctttcaaattttgttacattgttcctttttgagatatctctgaaaagtcaggaaaaaccatgatattaatgtcctcagtcttatgcacctgtgtttataggatgttctacttaataacttttctttcattatttttcaggcatttagacttttttgaaatgctccgaaatgaagatgaactagaatttgccaaaagatttgaactggtacgtatgcttacaattattctggtttgattcatcagttcacattatttctgtctgtaatgtgtgttgtagagtccacatggactttagggcaacctaaaagcaaactcaaagctctattttgtttcctaagtggcaggattagcttctgtttgctttgagtttactttacactggggaaactgaggaacttagatgtttgatttgatttctttttcctgtgaaataggttcacatagacacaaaaagtgcaactcagatgtttgagctgaccaggaagaggctgacacatagtgaagcttacccgcatttcatgtccatcctgcaccactgcctccaaatgccttgtaagtgtgttcgtgactcacatgtgtgcttctgaatgtttggacattgtcctaatgggttctggctcctgcacagtgctgattacattgggtgcacaccagggattccaagccttggttttatgacagccaagtatgtgtgtctacatggcttaaagggtgttacaaaattttttaaatgaaacaaattaaaattttgattttaaaaataaaaaatatgccttacaacctgttcagaaaggggtagagggtacctctcaatcaaataaatgatcattgcatgtcaaaattccataactttgggaagcattggtgcagatgttataaacatctctggtttggtggctttaaagggtgaccaccattgacaaatattcatcctagcttagaaacaacttgaagattttttttcactattcttttcttttttagacaagaggagtggcaacactgttcagtactggctactactagatagaattatacagcagatagttatccagaatgacaaaggacaggaccctgactccacacctttggaaaactttaatattaagaatgtcgtacgaatgtaagtctcttcttattctgctgctgtgagataatggtgacaatgtaagatatttattttatcctacttcagagtaacagctgggagagctgaaatgttctag

SEQ ID NO: 12435 - DNA, 2300 bp, Homo sapien
atgaaatagaagagaatggtatgagtacagtaggattcccaaattttttccttctcttccctacttaatggcacatgaaataacattcagtttaaatagcaaggtggatggttttaacataatcgggtcccaaatctagagaaaaagacaagccagaggcatccttggtggggtgcctcatccagcttcacctggggcttctcttctttgctgcctttgagtgcgcgctttcagttgttcagccctcaccttcatctgcaagcccatgggtgagtgtgtgctttacacacctttgtgtcttgaggatttcagcatatcatctggttctcccaatgactgtaatcactgttaaaataaggacctcatcttctatttccttcttagtactcccaggcctcatgggtgtcatacacagagaggaaacactggtgaaatagtgggtatgacagtgctttggaaagtgatcataattaccatactaagcactgtttaatgggttcttagctgcatatgaccattaaggatacaaaggtactgctactttgtttttctagtataaaaaagtctgccttgcagaacgtacatatagtttactgtgttctttctatggccaggaactttgctaagcactttacgtgcattcatttgcttaatcctcatgtgcacacatacaaacacaatcccttttttttgggggggggggggtgcctggagggatgcagttatgtagttattactatccttgttttacagatgaggaaagtgaggctttataaaaaattttttgctctagtcacactgaccaggaagtatcggagacaggactggggcccagcctgtcttacaccaaagcccctacttcaaaagttgcatgtgacatgtgtacagcttgctctatatttgtgtgtttacatctttatctccagtcctaaatatgatgctttttcaagagcatagactaaaagaacaaatcaagtcatgttaatacgccacattagttataggttgtaaggaagtaagatttttaaaataagtctagaccaggcatggtgactcatgcctgtaatcccagcactttgggagggtaaggtgggaggattacttgaggccaggaattcaagaccaacctgggcagcatagtgagaccccatttccatcaaagaaaaggaaaagtctgggtctaatgcttacaaattaaacaaaggagtgagtctcttgttgcagctaataatgtgatcaagatttttttcccctgggtaagactattgttatatctaataaaaatacattttaacattatattttatattttacagtcaatactttgttgttctgacaatcaagacacatattcctgattaaattagtaaatcatttatgttgatggtagacagaaaaagagaaaacagatttgtatttttgcttaaatccttccctatgagacattaactagataaggaatatttgtataaagagtttgagattagcaatcaagagtcgtgggtttgtggttactgtcgttttttatgtctgacctcggacaaatcacttggccattctgggccccagtttctccatctattaaaaaaaagccttaactatgaagtacttgcagattttactttgcatattatctgttgctcaactttttaacaataacatgtagtttctaaacttctcaaaatccattctttacttgatagcaaactttaaacactcctgacgtataaacaggtcagaaacttaattctgtcctcccgcctgcagttcatggatcctaaatgtgaaagaaaacaattgtgtatgggtattttccctaattctaatcttccaatcccttgcttaaggaaactaaatcatagaacatagcagctttgtcctctgtgtcagcagagcattacaaagccctgaaagaatgttaaagcagttttaaagtcctatttttaggtgcaatattgtcaggaaataagctttcactgagagattttgagaaaaaagtacttgaaaatcagcagctggggtagcaaagtgaattatgttaaattttaatactcaaaccaatatggttaataacaaaatattctttctccaggttgaaattatccaatgacgaaatcaaacgggcaattctaacaatggacgaacaggaagatctgcccaaggacatgttggaacaggtgagctaccagatgtatctgagagcagaagtgaaaagcgaccatcaacagggagagggatgttgagaacatccggttgttgctagtggatcatttcctcatctatgaattgaggaggctgaa

SEQ ID NO: 12436 - DNA, 2300 bp, Homo sapien
ctttatatgttgtaaattatctgggagaattaagtttcaatctctaatgtttaaaagccatgaaatagaaagtgttgtgtatgggagaagcccaagaacctttctctattaaaaaaaagatgaaaataaaaactagttaatacaactttaagaaaaatcatttttgattgcaacttaagccattaccttgtaatagtcatattattggggccttagtgaaaagcagaacactgattatacagagtacaatgtgaacatgattgcagatgaacttgttttctttctgttttcaaagggagccaagtatggcaagagatttatttctacatgaagtaatttgctgaagtgagatttttttgagtttgaaacataaaatatttttgtacagatggaagatatttctattctatttttaacctgtaaaatatacctgctggctacagaaaacaaacataattttatacctacatttcatgagtttaaaatactgttgtctttctttgagatctgagcatggaagggaattttaaacatttaaattaaaataggatggacttccaagcgtgaaatatttaaacccatcttatatttaatatgtgtaagtcacatgttgattgctaaaacattgctatttacaacagcatgactgagctggacaaagaaataagtaccttgagaagtggcttgaaagcagtagagacagtgagtatttttttgttgttgttctaattcctggtctcttcactatctctagtgctggtggttttcagcagatgggttgtgttggcatgtggtatgcccgggataaacatttattgattaaaaaataagaaccaccaccacaagaagcaaaggcaggttatgttcagcctggcaacttgattgcaggcagcaggggtcgtggataagtcactgcagcaggaactggaaactggacctagtgtgccaccaatttatctgtaaggcaggattcatcaggatgagtgggctgggctagatgatcttcagggacgctctcagtttccaagtgctgctaatatatggtgttcactttcggtagagcagtagaacttctctgtagaacttctcagttgtttttgacttggtcctttggggagtatttactaagcagacagtgtagtacatgctctagctgagggtcacgatgactcagaatccttgtcctccaggtgttgcaataatcggagcagccacttccctcagcctggccgcatccagataagcagagtgattacggaggtgccttaaggaagcagcgggttgagggtgctttggaggcatgaggaacaattggcccctattggaggaagcttctcttttggaaaagaagttgtttgagctatggcttaagagggtagggtaaacttaggtgcatagagggaggttatcccaggcatacaagacaacctgggcccaggcctctgaggaaggaaaaccagtcaggctggcagactggacctggtaggatgaaacgtgcctgttggcacagtgccctgcgggtactctgcagatgcagctgccagcgagagagggggcagggatgagaacaggctggcagagtagcgtccctggtgtctgtgctcaaagcagccatagcttgggcctgctctgggtgaaggagacggatttgcaggcagcttggaaaggtgcctctcataagtatccttcagatcatttatcagtaatgctgtgaggactctcccttcttttcgtttttgaatcacaaaactgccatagaaagtagttgaattaattaaagacatacctctaataaaaattaaagtcacaatgtctaatttttttttcaataaattaaggagcatgtgaggtttttttcctttttttttttttttaatgtagggagtagggggcagtattaaaaaaaaaattctactgattgaactttttctcccagccccagagggtccatggtcattatgatggccctaaagcctggctctgacccctgcttctgagccaggtcagagcaaggcctggggtggaggcttctggggaaattttgtgttgttgctttattaaaggatagttttgctgaaatcactctatcccttgggtcatatacactgcatcacactttttataggagaggggctatagaagcctcccctacccttggaggtgacgtagtattgtaagaaaatagtgggggcagagcttcgcctggccaaatatatatgtgttctaattgtgctttacacaaattaattatattgtttgaaggtatcaaagatgaatatttatgaaattatacattaatg

SEQ ID NO: 12437 - DNA, 2300 bp, Homo sapien
gaaagaattagcaaacttgaatatagttcaatagagattatgtaagctgaacaacagagaaaaataatgcagaaaaaatgaatacagcctcaaagacctgtgggagaccattaagtgcattaatatatgtgtaatgtgactaccaaaaaaagaagagaaaaaagagcagaaaaagtatttgaagaaataatggttgaaaacttcccaaatttgagtcttaaaaaaattaatctacacacatccaagaaactgaagaaactcctaagtaagacaaacacaaagagacacacacagatagtaaatagtaaaatagtaaaaatgctgagagacaaagacaaaggaaaatccttgaaagcagcaagagaaaaacaacctgtcacacacaagggaatcccagtaagattaacaactgacttatcagaaacaatggaggccggaaggtagagggataacatattcaaagtgctaaaagaaaaaactgtcaaccaagaatcctatatttagccaaactatctttcaacaaatacacattaaaagtctcttgcctacatctgccctattcaccttgtcctcacctttctcaggcaaccactgtttattaattttttgtttctttatgtaaaagtaaggaaaggcatattttcttaattttctccctcttgtacagaaaagttagcatactatatacacattgatttttttcatttaacaatatatcctggaaattgttccctatgatatattcaaagttattctttttctaaatagcttcatggtattccactgtatggatatatcaaaatatcaaaatatttgataatatcaaaatgtagccaccttcttttgattgacaggttatctctaattttatactattggaaaataatactgcaatgaagcaacttacacataaaacattttgtatgtgtgcaggtatttctatatggtagaatattataggtaggagtgatggttcaaaggctaagtacatttataatttaatacaaattgccacattaccttctctataggttgtacgatttttcacttccaccatcaagttatgagtgtgattgtttccctgcagttttgccaatagagtgattttagactatttacatcgtgggttacaaccaatggtaagtcatgaatttagcgtaatgggttataaccaacatttaaaacaaactgaagtggcgtaggacagaataaaacatatcagatttcaccacacatagtttgatagttgtaaaattctttgatacttctcccttcaaatgatataaactaattttctttccccttaagtgtgagctgtacttagtgactcactacttttgtttgttgtttttttttaactcattaggggttatttgtgtcaacaagtcaaggaaagagcagcccaagaataccatcagagatgcagctttccaggcctccatcctggacttgcaggtttcatattgacatatgtttgcaagatgacttgcacttccaggtctccactctccattccaagaaagagaaaagggagaataagggctttttccaaaaagttttgtctttctaatcaggaagacatgaccttcccagagatgtctgattacatcttattgccagaactatatcacatggctatcctcaagtgttagggagattgaaaaactgaaagtttttagcagagtgcattttccttcccctaaatagtgttatgatgatcacttttgatgaacagaatgtggcagaagtgaagatgtcttaaatattaggacaaaaaaaggtattgactgtggctttctcattgctctttctcaagtcagttattctggggaaacccaactgccatgttgtgaggacactcaagcagccctatggaggagcccacatggtgaggtactgaggcctcttgccaacacccatatgagtgagccatcttggaagcagctccagctgacatcttaattacaaccccctgagagacctgtatcagaactacccagctaatctgctccaagtttctgactcacagaagctttgagaggataattgttttaagctgctaaatttggagctagcttgttacacaacaataataactaatacacttagtagaaataagaatgggttcacgaaacatttcagttgtatatgagtgtgtgctaggtctcagtgtaaaatgaaccccttcttataggttgcagtaaaaaacaaaatggaaaattgtgcacaaaacaaaccaagcaacagttttctactctgaggtcttgctgctgccttcctgaggtctacatgggaatcaa

SEQ ID NO: 12438 - DNA, 2300 bp, Homo sapien
ttgctcacggccctcccttatgctattagcccctcctcccctgatgaagttcagtctccagagcatggcctacaaggcccatcataaggtagccccaataaactttgatcatttatttccttcttcactccccatctccaatatcctagaattcagacactgctcacttcaacactaacctccagactttgcacattcatcaaatgttctttccctttcttctttttttaaaaagtctaatgtcacctcttgtacaaagtctttgtcaggaagacaaataatttcactcacatatttttaagacaatatttagcacactgtaatatactgtgttggccggtggcttaagcttatttgggctgggtttcctatcttatatgttgtttcctaaaactaagcacaatctgagaagattgtgtttgccaaataaattaatgtatgataattatatttttgctttgattgacaaaattaagacaaaatcagtctagattaagctggcattgactgctcccaagaggatatttggcaatatctgaagacagttttagttgtcacagctgggagaggtgctactggcatctcgtaggtaggaactagggatgctgctgaacatcatacaatgtatagatggcccctgcaataaagaattatctggcccaaaagtccatgacgcttaggctgacaaacccagttttggtttgccaccttaaacgttcttctatttatactgtaaatttcctgtaggatattttttctgaatgaaataagcactccaatactaataccattgattctaagatctacaaatatactagtcattctttagagcagtgtttctcaaatttgtgcatcagaatcactgggagggcttgttaaaacataggtgcctgggccccaccacaggagtttcagtagatcaggggtatcctatgcactgtaggcctgataatttgtatttctcaaggtttccaggggatgttgatgctgctggtccaatgtccatactctgtgaaccactgctttagcgaagagcccagggttagttaacctgagggtttatcacacttttccccattagaggccatgcccagaaacttgagatgcaacttccctgggtagccctgcctttcttttccccgtatctcccagccaggtacctggagctgcatctgtggtgattgccaggctggcagcaccttagactcaaaacataccccattcctgagaacagatgaaggctgctagcagggcaaggcaccaatccctctccccccatttatcagccagtaggggcctgaggtccaggcccttggaaatgaagtaacatctaaaggaactatcctagctcctcagagcacctgtatcagaatcacctacggggtttagagtcatgggcccatccttagtaattctgtcagcctgggaatctgcattttatgaaactcttgacatcagtgcttctgtaagtgtggtcctgggaccagcatcatcatcaccacccgcgaacccgttagagatacaaattcttgggtacttccccagacatattcgaaacgctggggttcagacctcgtcacttgtattttaacacgccctctatgtgaattctgttagctcaagtttgagaattactggtttaaattagtctgcttctcaagtttaagatgtctggatgtagacttctggatttttctttcacttcactttctagattcctttcctacctgtatataccaaaagcacccacaggaagcagagtgccccccccaccactccccaaaaggcctgcctgtagaacatttgtaccctacaaaagagagcaagagtgaactttcgttgaatctggtcatttgtttgcatgccagtcggcactttatctggccggacattggtccctcaggaggtcgacctggcactctcggaaacccgaacacccgggccggtaacctccggagtggcggtgtcgcgggtcggctttgcagcgggtactgggctgccgtcccgccccgcgctcctgcgtaaacacgcggttccctcggcaacgctggaacccacgtcaaaggctccgccaggtccccagcgaccgccacccctccggccgagcccagctccccgcggcggccgctagcccccggccccgagccaccactccgacctagcggccgccgcccccggtgcgggatgaggagatccgcggccgccactgggccccatggaggagccgcagccgccccgcccaccagcgagcatggccttactgggcagccagcactccggcgccccctccgcggccggcc

SEQ ID NO: 12439 - DNA, 2300 bp, Homo sapien
actgagaggaactactgaggtcaagtggttgactgaccctgccctaactgacccagaaatgagatgtagtttgtgttcctgctgccagctgccatttcctacagaagtctagagtgtttctactctgctgctggagttgcctagggggaattctggtagccacgctagttaaactgttgaggttttaaaaatggaatcgtaaacataaattctgtctccctcaagtggcctcccagtctggaagtgacaccattctctgggaaaatggcatcaatttctccagaggcattcttcgttaactcgtggatttcagctgcctaaggttgctctaaaagtgcctgttctatcagttatcattcataatcaggctaatctgaaacctagttcttcagggggaatcaaggtccaactttctaacagatgatttgcatggcttgaagatttttaagaaaaggataactctattcctggtaaactggctcctggctcacttccagtcacaatgactaaagcattcttactgatagaattcagctcctgggaggtagtagtctgatgagaaaccagatgccagcttgccaggtcatccctcctgtaagggttatggttatagagatgccctgctttacatgataagctgtacaaggatctgtactagagaatccagcaaaaccttttaatggctcaataggcctagggaactttagcgatcatataaaccttgcaatctatctccaggaatacagtatcttgcatactctcatttaatcctaacaaaaaaactctatgagggaaaagaagaaacacaggcacagagagattaagtaatttgcctaaggttgcacagctttagggggttatcaggatttgaaaccaggcaatgtgtgttcctgttcttaaagaaaagcaacattcgtatcttaatgatttataaactgctttgttcattcattctcatttaattcttcaaagaagtgggggaggtgaggaaaggagaccaggtttagtaacttattaagtgtgattctgtgtctaccaagcatattctcagccagcctggaaccctggtacattggctgttcttcgctctttccttgaccccaccgtaccttgctttatccaccggtgaaatctctaggaatgcctcaccagtgcagagggaggcgctgagtcagggtaacacgcaattcctcgctcctcaagggtctcccaaaaccacaggcggatgggagtcagggaaaatcgaaattacacgcaccaaatacgcaaggctgctgacacacgttggcagtgatttacctttctattaattgcaaggtttcgcggagtaggttagttgccagagttccagcccagaaaaaccgttaatgtagttagtcgcgtcccggttgcagctctgccctgggctggaaaggtcccgcccattacctgtggccagcacgaaggccgggacgctgtggaagcgcaccggtccgtggctgcggccgtcctcgcatgccacgaaggcggtcaccagcccgcaggggcagtggatattgacgcgggcctcgcgggtgcccgcagggggcgccggcacaagcccgaagtccaaagcgaagcggcccagcgccagcactgcgtggccgcacatggagctgtagccctcgttgtgcaggaacaggacgcccagatgcgcgtccggcagctcgctcgggactaggaccgccccgtacatgtcccggtgccctcggggctcgaacatgagccgtcgccgcacgtggtcaaggtgctggcgcatgtagcgccgcttggccagcagggtgggcccagacacctccggacaccccgccagcacgatacgcaagggctcgccgcccgtgtgcatgtccaccaccgacagcaccggcgtccctggatcatgcgggggcagccggggcaccgccagcgcgctctccatggtctgcgtcgggggagacgagtacggtcccgcagctatggcttcaagcccgaccctcacccactgactccgcgggaggagggcgggacgctaaccagccacgtccggggggcggggtctcggagcctaaacccggaagcgagggaggaacttcggagctgtcgcccgggttaccgggaggcggagccgccgagctcgctgtggcccggatgttcggtgcagctgccagatccgctgatctagtgcttctcgaaaaaaaccttcaggcggcccatgggtgagtggtcgccaagatcccgggaagcgtttctggtagtcccgactactttcctacacggctggcctcgggctcggctctttgtag

SEQ ID NO: 12440 - DNA, 2300 bp, Homo sapien
ggatctatctccaggactcaaagcctaacccggtatgattagaggatacttctgagtttaactgattataaagttcaaatatacatatatttttaaattagagcaccagtagagggtcaccaccttgtattttgcccagtcaggacattaagcacccacatgtagacacacaattatcattatcacctatgttcataacagaacacattttcacatgggaaaagcagagagaacataatttcataacagaggtatgcaaattacctttataaaaagtttcctacattgtcctagcttttatcatttttgtggaggataagtgaaaatttcatcaaggctgtcactgggccaatattttagaaaccactgcattaaaattaagcccctgatctaaaggcttaggggaaaagcagctattccttacttaaaaaaaccccaacaactaagaacctaatacgttgtctttgaccttattcacaagaaattatggaagttttcttcatcagtgacatctgattcccttcattcattcattgattaaaacaaacaaacaggctcggtgaggtggctcacgcctgtaatcccagcactttgggaggtcgaggtgggcagatcatgaggtcaggagttccagaccagcctggccaaaatggtgaaaccccgtctctactaaaaatacaaaaattagcctgacgtggtggcgcgcgcctgtagtcccagctactggggaggctgaggcaggagaatcgcttgaacccaggaggcagaggttgcagtgagccgagatcgcgccactgcactccagcctgggctacagaaggagactccgtctcaaaacaaactgcggtctacatgtgaattaatttgaaaaattatgcatcttttgactattcttgaacaatcatttcccaaattattcacgaattcacaatctagactgcctggtctacagtgccttctctcctttcacattcaagcagactttttacttccttctccttatgctgctgagagaaaaagagaaacagcattgaataatattcctccagtttaatattttcgcttttaacaaatttcggacttagctttttaaacccactggcctctttaatgggcgcttattttttttgtaaccaattgtaatcacaatgttctaaattaatacatgaaaatgaatatttcaggtttttcaagaatgcagaaggtaaggaattggaaacttctgtatgggctttacatctagtagatgcttaataaatacacgtgaatatcaataatctaaagtttctcaaaatccaaggcctgaaaaccagtatgataaactgaactgaaataaacagcctatcacttactaagcaaaacccaggctccaagcgactgttgaatttctcctttcatttcctttagcgaacgatggctaaagttttaagattccatttttttgcagcggtcctgccctttgtgacgggcgctataaatctacgtttgaggttgaagcagtagacaaattatgcagcaacttgcttctgctttactgttttttctgcactatcacccgcgttttcaattccgaagtcaaccctcaagcaagtgttccctcgacattaaactaagggactgaagagacatttcggaccaaacaacaaagacctggcatttcgccgcagacagcgcgcctcccctagtagcccgttgcggacagaccaccccaaccccgcaggagtgcggagcccggcccgagggcgggcggggtcaaggggcgagcctgcgccgccaaccgaaggccgcctacaaagagccgagcccgaggccagccgtgtaggaaagtagtcgggactaccagaaacgcttcccgggatcttggcgaccactcacccatgggccgcctgaaggtttttttcgagaagcactagatcagcggatctggcagctgcaccgaacatccgggccacagcgagctcggcggctccgcctcccggtaacccgggcgacagctccgaagttcctccctcgcttccgggtttaggctccgagaccccgccccccggacgtggctggttagcgtcccgccctcctcccgcggagtcagtgggtgagggtcgggcttgaagccatagctgcgggaccgtactcgtctcccccgacgcagaccatggagagcgcgctggcggtgccccggctgcccccgcatgatccagggacgccggtgctgtcggtggtggacatgcacacgggcggcgagcccttgcgtatcgtgctggcggggtgtccggaggtgtctgggcccaccctgctggcca

SEQ ID NO: 12441 - DNA, 2300 bp, Homo sapien
gaggctccagtcctcaagttgattcattcttagaaggcttcctctgctgcatccacaaagcacccattatctgaccacctactgagcctctcacctagacttctttttattgcatttcttttgtggagtttgacctctgaaagcaaacttcccagcagcctgcttttattttcctgagccttcaaacacaattcctctgaaactcactagccttgaggactagcaaaaggaaaagggtctttacattgcaggagcttttaaaaaggaaaatagagaaatggcaccaattgtcccttttgtaaaccttttgttgttagcctctgggtagacaaaatcttaaggtcttcctcagacaatcttaaggtcttccttagatggacaccgcccgcaatggatgtgtgaggttaatgactcctattgagctcagagttggctacagctgggagaaggtaagagggctcaaattaggtttcaggcatccttcaaacagtaaagatagactcttttctttccctagtttctatccagaggaaggtgagctttctgttgggccctgcctgcagggctatagcatccagggtggctggagatgtgatgagatttctctttctttagcttaacagcctatctcaggatgataagatagacatgatgacaatacatatcaaaacactcatctggccagatcccattcagatcctgttcaaaattacttttgagtcattgtatactttaacccaaaataccctgtggtcactacctggcatctggggacgggtggggcgaggcaaggccacgtgacattcaaaagtggtaaaagttgcaaggttgatgcttgttttgtgtttccttctgtcctcatctcaattttttttttttaatttcagacagagactcactctgtcactcaggctagagtgcagtggcatgatctcggctcactgcaacctctgcctcccaggttcaagcaattatcctgcctcagcctcccgagtagctgggattacaggagcacgccaccatccccggctaatttttgtatttttagtagagacagggtttcaccatgttggccaggctgcaatctaactcctgacctcttaggtgatttgcccacctcggcctcccaaagtgctaggattacaggcatgagccactgcacctggccttcaaccaagtttagacaatcataaacacagtcataaaataagtattccttacacttttcctcttgctgagggctcttctcaccacacagactattcctttcttaggagctgtgcttctcactctgtgagcaattctttcctcccagggagaagcaggaagagctagcaaggaagcatgcaaggtttgtcctgtcactcaaccaaactatggagaaaaaagccaccaccactgtttacataaatgagacttataccaaaataaacttgaagagagaagacatagcattgcaaaaaaaatgtattcaagaggcagaggagctaatggaaaaagaaagggcagaatatctaataagaaaacaagagttgactgcacaggtaagtggcatgatttattctttaaaatacaataatgtatagaatctggagcaggaaatgggaaataatttatttgtcctcaaggctggcaagcagcctctgtggtatcttctgtgaacgcgctgggaaaacgggatgagcgggagactcaaggacacttctgctcttggggaagacatttgattggtagcagcatctcagttcatgggtaagaatataagtgacaggatttgtaacactggggtgtccccttgcttatatgctgccatacagggacaaggaataggctaccatcttatccagttgcctttgataaccctgagactgtgtctgtatggacaggactagggtattcagatagggcaccagcccagccctgctgttcctgataaatgaatcagagagagcagcagcatgcagtggggccaggcagaactgagggctttaaagagaaaacaatgtttcgagagcagcaaaatttgtgagggtgggggagggataactactgcatctttttctgccactgcaggagctgaactgcctgctgtgccatgttaattaaaattcagcatcagatctgttatgattgtttcttccttgttctgctctggttgactgggggagaggtggttttgataagagggtgacatcgttcattagggtctaacaagtggcactgtgataaaatggtaagaagttttccaggattacaagctgctctgtctttgatgattttgtttactctgtgtttagctg

SEQ ID NO: 12442 - DNA, 2300 bp, Homo sapien
taaatttgcatagatccttcagtaagggttttatgctatttttttttatatcccgggactggaatatttaaagtatttccattttgcatgacatttgaagcactatgactactcttttgcatgtaattttttgtttctaagttgaaggagggtaataactgaatggtggatgcaatgtagattttaaaggtttcatttcagatttttaaatcacagaatgtaagcaaacaaaccatgttgaacaaaatggtttagtccacatgtcagctccaggggctctctctctctttttttttttttttaagacagagtctaaccctgtcacccaggctggagtgcagtggagtgaagtggtacttcacagagtcctctatattttcaagtttgtttcaaagtcacataattcaggccactgtatggatggtgtagcccacagagctacacccatcgcgatatggtcaatggagattcaatagtcttttcttatatgtgaatttgtgaattatcctcaagggtggaaaagattcttccaaaccaaagtggaatgacagtaagtgcccttggcacagccatctgtctgctcacttgtgtttaggaatccagatgccaggtgagaacccacagcaaccacagcttggtggagtgagccacagcggctcatgtggcggcactgcgggagctcagctgggtgtgtttggtgtctcctgcagctattgacctgttgtattggcgggacatcaagcagacgggcatcgtgtttgggagtttcctgctgctgctcttctccctgacccagttcagcgtggtgagcgtcgtggcctacctggccctggccgcactctcagccaccatcagtttccgcatctacaagtctgttttacaagcagtgcagaaaaccgacgaaggccaccctttcaagtgagtgcctcagctgaggagccctcacccactgaccaggggcttttaccctcacctgtatttcagctcacagatgcacttgagtcatgtttctctgagacccaacagacctcttagagtctcccctaacaccctgtctttgaatatctaacatttctggtgaatttctgaaacaaactcgattattcttattccaatacttattgctttgttgagttttcatatgtatttactattaacagtaatcataatccaacaattacttaatcctctcagcaatatcagaaaggcacagcaggcatttttgtccctatttacaggtgggaacactgaggttctgagaagtgacatgacatgctcaaggccaggtggccagtaaatagcacgaaaccaggactagggtatttgggtctttatttccatgctttctctagaagtttaacaccaaagggccaaccttctggtgggggtgcagggttcatgaacagtcttctcatgtatcctcctctacatttttatactggggaaacctgatttgaatgcacattgaagaggaggaaatacaaaaataaaagggcaatctactaactaagcggatatatgacatgtggcagagggaggtgttagcactgccagctgctataacaaaataccatagacagagtgcttgttctggaggctgggaaatccaagatcaaggtgccagcagggtaggattctgttgagggcccttgcctgggttgcagattgccagctcctcactgtgtcctcactttcactgtgggacggagtgaacaagctcccttgggcctcttttctaagggcactaatcccatttgtgagggctgtgcactcatgacctaatcacccccacaaggccccacctcctaacactatcacatagggggttaagatttcaacatgaatttggggaggacacattcagtccataacactcctgaaaactcaagccaaatactgctttactctttttatctcaattcacagggttaagtaagcacttaaagcactctagaaatatcctctaggtagataacaggtgcagtcttagagcagaggggaggcaggaaaggagagaggaaggatggacctctgtggaggagcttggccaagcagaggaggcttaagctggtatgatatatatatatatatatatatatcatgtttttcccacccaagaattaaatttaaccatttgaactaatgaaaaatgtcattattaaaaataccactcagtagaacccataagtattttaatatggcccaggtcacttgagttttcaatgctctttctataaacctggaagtaaattctagaatttaaacatgaattcttagagatctgatgaggaacagttggc

SEQ ID NO: 12443 - DNA, 2300 bp, Homo sapien
ggctggtcttgagctcctggctcaagtgatccactcacctcggccttccaaaatgctaggattacaggagtgaaccaccgcgcctggccccaaggtcaactttatggtcaatgaaaacgcctggcccagaaagtctgacctaatgtatcctccactttaaagagagcttgcttctccctgttccttattgggaacattgtgtattcaccatacacactatacagactgtcagattggcagtacacgctgtttcccgtaatgtggtggacacaatactcatcagtaaaggtacctgctggcaccttctggacttagggaatgataactggggctatcattggactggcagtgcctcctagtggccacagctctaaagatctccctccaactgaaaagcagccagggcagcaaaagcccaccaggcaacccctgccttaccctctcctttcttctcagtcttgtcctcatatcatgcagtgagaagtcggtgctgatcaggctatcatcatataccagtcttttcagtatttaactgacagaattcccaaaaatgacgtggcaatgaaaaaaattgggaggagggaggaaaggtagggaatacaaatagaaaaaataatcaagaataaccttagagtaggtcattgtgaaaagtgctttgtaataatgtggtcattgttgttccttcccatcagccctgtgggagctctgacaccccattaagctttatcaagaataatttcagatatgttacaaagatacgcagagaggcccagctggtttctccacaagcttgtattctgaaaagaatacacatgatcccaaagatcgtattttaaagtgtatatgcttcattaaaatgaaagatgataaatcatgtctacaagcataaccttgagattactgtccttaggcccatgctggtgtggggtatgcaaatgtagattttgatctgggaaagaacacctctggcaactgtagaagaatcgggaaggctccacttctctatgaaaaagaccctgtaatggataaggccatgccacaagatgaagtggaaagtttgttcctgctccctctgaactcttctgtatgctcccgtggtctccagggcattctctgtcctcatgcagtgtcttgtctcctctagggaccccttccaacagtaccttcttttccagacaatgcccacattccagtcctttctctttcctatttctaccttttcttcatcaaaatacatttatcccatccattccttcagggtcttgatgtatgttctgataaagtagtttatggtaagatttaaaaagcaggtcaccacccattgttctgttccttccttagacatttgcattttaactgtggactcctgacatccttaactacctgggcttggaagccaaaagtcttatctcccaaatacacaccacccacctccattgccccccagtggtcaatcccaaagatgacactgttgagacagaatgccctttgcttccctgagttctgtttgaacgtccccacaaatgacacccttggattgtcactgcattgaccaatgactccacgtaccagagtccaagggctttggtctggggtctacaggcaccgcattctgacatggattccttcaacccacaaacagagaggggtaacccaagaaatacacaagccctctgggacagagcagtaggctttctctccagtgattgttgcttgccaacaaaggttttggatatctgtggaatattccaaaaggagagaatctggcaattcttcagaagattctgggcaattaaaattcatcgagttcagatttttaagagttagagggagaagtgaaaggtaaacggtggcaacaattagggaacattatgctgcaagcctgacatttatgatgccgttgacttggtcttgtccagcaggtttcttgggtttctcagaaatttctagaatatgcacctcgcatattctgggagtcaagaactcccaggaacagcccaagtcctcctcctctcacccccaccgtcagccctttttcccctcctcccaaacctcccacccactgtccgcgtcagcgccttcgcggccagaaccgctttacccgtctccagggtagcacccttgggcagcccagccaacgctgtcgcgtggagcggcgcccgcatccccatgcgcgcaggcggctccggggccgcgccgcgctgattcgctgccggccgcgcagactgcggcgccagcgacgctcccgcccctcaccgcgcgccgcctggtgcagcctcagtctctccgcagccgcgcgg

SEQ ID NO: 12444 - DNA, 2300 bp, Homo sapien
ccacaacagatttcagtggcttcacctttgtgtatggagttgccattcacttatttattaaatgtttattaagaccccactactcactaggcatcactgtaagcactagagatacagcagtgaacaaaagcctgtgatctcaaaaagcttaacgtctacttgggagagataggcaataaacaaataaaggaaggcatacatcaagtactgggtgatgataagtgctttgaagatctaagacaagagatcattgtgaaacaggtccatgatagggacctcatcaaatttccagtgcgctccatgcatcaagatgcatagagtcatgtgacaaattctggcctacgagccataggcaaaagtgacatgtatcatttccaggggaggcttttaagagctggtgtcagctctttcttcctctggcatggcaacctgagaagccatatgttgatattcaactggcacagaagaaagggagcttggatccctttgtagctgaataaaggaaagcctccaccaaatagcaatagttgaaagccagaaatacatgtttgttgagctaagccattgaaattttgaggtttgttactgtagtatggcctaacagagtcaaaagagtaaggcacacacctgaggctaagggaggattgtggagggagccccaaaatacataggcctaaagataacaaaaatctatatacagcagatagagctaagtggtatccaaccctggctggacattttaaatcagctggggcatactagaaaatactgatctacagatgttatatccacatattatattctgagatattatgggtgaggaactaagcatatatttattgaaaactacagtcaacagaaaatgacaaattgggtcagctggctttaggaaacctcccgagaggcaacctgtcccacaatatactttggaaagagcttattagtgagatcaattcaacttccgataaattgttggaaagcagtcaatcaaactgtgacataagaagaaaacttgcaaacttactaactgaaatgttatgaaacagtatgttgcagaaagtattcctgcattaaataagtaattaggccgggcgtggtggctcacacctataatcccagcactcaggtaggctgatcacctgaggtcaggagtttgagaccagcctgggcaacatggtgaaaccctgtctctactaaaaatacaaaattagctgggtgtggtggggcatgcctgtaatcccagctacttgggaggctaaggcaggagaactgcttgaacctgggaggtggaggttacagtgagctgaaatcactcccattgcactccagcctgggtgacaagagtgaaactccatctcaaaaaaaaaaaaaaaaatgagtaactgtattagattctcccaaagccccatctcattgtataattattattaaaataaatatttaaatagcaacaacattagaggataagcactttacctaaattatctcaaataatcatcccaagaatccagtgatgtaggtactattatctcctttgaacagacaaaaaaatcgaaatgcagacaggttaacttgtccagagtcacatagctagtagtaagtggagaaggtaagacccagatccaattggcgcacgattctttaacgcagtgaaaaggggatgtgcaatcaaaacgatacggtgtcttgagggagggaatctagacaaggggccactggtgggggaaaggacctcaggcatggggttgggagcagctgctgtgattctagttgcggattcccagtcctttgaaaacagaacagtttcacaggatgccaaagcatgatggaaatttccgatgagaacaatctactctttttgctccaggcaataatgagctgagctccccactaggatgaagttcccctcatacatttccagtgtaactcataacttggcattctggtttcgaccagactcagacaagcttcagaacacttactgctgagaatgggtccttggactaaggaaaatactgcaaaaagtcacaagcatgtcttaccctcaggcagctcactgcttcgcccaattcagagagaatcagtgatttcccaagtttgctagtctagccctagacagggacttcagttttcctaggtgtctcctagcttttagagagtgccagctactcaccttgtggttatacaagatttgtatagtttttaatgacaacatttcaggaagaagcaataaaacatcttgaagacagaactgtctttttaaaatttgctcagaattaccataccagtaattccagcag

SEQ ID NO: 12445 - DNA, 2300 bp, Homo sapien
tctcagagcacaggagagggcagagaaagaaaggaatggatccaagcgggcagagagaaaaccactacagtgaccttggacaagtagcttaatctattgtccctagaccctaagttccatatgtaaagtgcgtgacacccagcagaggatgctgctgctactagcagtgctctggaggtacagaatatttcttaatttacaccactccttatcttatttctccgtgctctagtcaaccactcagaagtaagctggtgaaactttcacacttttccgctgtctgaaatcatatcaaacaactatgtgtacaacttattaaggaactaactcctgtaaaaatagagttgaggatcatagaataaatttttaaaaacatgattcatatgagagataatgaagtagttgttgttttaagttactaaaaaagggggggaacccatagatcatatccttcctctgcttaaagccctccaatgtcttctaatctcactcagaataaaagccccatgagatcctacatgatctgccccaactccttgggtcactgatctcttatttcccaacttattcactttgcccagacataatggcctgcctatgatacctgggaatcagtgcagctcccacctctgagcctttgcattatctgttttcctctgcatgacgtgcttttcctctggatatcttcatgagtcactctctcacctgcttcaagtgttaaatataggttactttctcaatgaggcctacacggactcccctatttaaaattgcaaactcatctccaccctgacccagaacttgtgtttccttaccctactctacttttttccataacacttaacatcttctaacatactatatactttacttatttactatatatattgtttgtatattgtgttccctccactagagtataagcagagactttgttatctgtttcattcgctaatatatcccaagtgtgtagaaaagggcctaacacatattaggttctcaataaataacagatgaatgaatatggataaagaataaaatcaattctgattcataaataattaggaaaatctaaaatgttttatccatttggggttctcccacagtcctaaagccacagatccctcaaagctttggataaatgcaactagttattgctaacaaaaggaccagatcccactaagatattctaaaataaagcccttctgtatggcaagggaaaacgagactcttgaacactgttgtcatggtgatcccaggtcgtctcatctatgggagggaaagctcagcaagattgccagtgtagcctttaggccatctggataaacatcaggcagaaggcaggcattcatccagggaccaggagtgactctcaggttttgttcttctcgagaggaagtgaagagaggagaagaaagggaaagaatacagtgggctgccactatggaaagccttgcaggatagtccattatggtaatctgcacagcctgcttggtggaattggcagaagtgatctcttacattgctccacttagttgcaaaaaaaaaaaaaaaaaaaaaaaaagatactgattcttattggaaatataaagctcagaagtcaagttgtgtccaaggctcaaaactacctgctttgtcttgctaaaggagaggatataaacagcaatggacgaggaataatgggtgattttcagatttgttgatattcgtgggcccaattagagtgctgtatacatcagattatctgataaaatctgtgaaattgaaaaagttccctgagagaatgaatcagaaattaaaacgatgacttgtagaatcttctctgcattgaaacaggaacaccaactgagattctgttgctaagatattgctgggtcattttttaaaatagctagctgaagatagagaggtctgtaaaacactaattaattgggccataacagtaattagccttttagttcaggtggcctgtctttccagcatagccctggaaacagattatttttgtgctaatgagatatgtgtttctcaagcaacgacaaaacatctcgcctaatggaattttgttttatccctcctctctctgtccatctgtctgtccgtgtgtgtgcctccgtggctctccttcgctctgtgggacgacagaaccatctgctgcagaatcccaggggaaaggcagcatctccgaggatgagctgatcaccgccatcaaagaagcaaagggattatcgtatgaaaccgccgagaacccacggccggtgggccagctggccgacaggcccgaggtcaaggccaggtcc

SEQ ID NO: 12446 - DNA, 2300 bp, Homo sapien
ataaggaaagttagtaatgaaaattgctaacactgaaatcttgtgctcatctcttttcagcagtgtaaaatagaatactttatcaaaatggaactgtcaataatgttcaatttcctttaacaactacactctaaatagatttaactggctatttccttcacacattctcaatgagagtattgattagtatgaaagaaattgacaaataattagaatcatatccccaaacttcctatctattaatcataaggaaacacagaggcttgcttaggtctcccagttttttaatgatgactttcattcatgtttctcagagaaacaaaagaatatacttcatattattttgtatgtaactcctttgcatagcaattctcaaatattagtattcatcaataaccactttaaggttatatcattagaattgtctatgttcttgtcttgttatcagtaataaaaccatgagaaattcccatctagtatttctgatgctttagggaatactaagtaatagatttgaaaaaacttacaagtgccctctaattacaagacaggattaagctccatggaaatacagcagtggaataagcttttcaacttaacggttttttaaatacactcttgttttcccatggaaagatgtttaaaaatcattatgattcatgataaccaattattttgttgtttttggatgagattatttttatagatttattgagttataactgacaacacattaaattgttcatatttacagtaaacaataagttttgacatatgtttgcacctgtgaagctataaccacaatctagatagtgaatatttccatcatgagacataattttgagtatgtcaaaaatgtaaaattttggtgaccatcagatttccagggatatctggcttcaggaggccatatttattgtttagtgaatgatttttctctaatttattgtcatcttttgaacattagtgcactagcagaacaaaagattaggcagactctgggctttttcattttagcattattgaggagcacctgaatggtcctgaagttggcctttgaatataccaatggacaggtatgaaatcctcaagatgcgcatggtggccaagagtcccacagtctcacagtgtgtgcggtaccgtctgcgcccacctttcctagagaagaaacagcagaaaaacctattccttcaccctgtgtgttgtggtgaatcttagtttttaaaggcacattattttattatataaacaacttgggaaccaataaaacacaagacatttgaaaagatgggtcttcgtatgggcacaacatatgataaggcaagtcactttcctcctctgagtttgggtttatttgctgactatcttccattttatcacagtgaactgtaaagaaaaagatgcaagcttcatggaatgtccaaattctgaaatacaacggactgcacagacagcttatgattaggatggccttggctcagtgtttctgaaagcaaatgtacagcttttgtccttgcctattgacaccctgtttgccctcagggctggtcagggtgagatctgttaagctttttttggaggctgtcctgataactcatttctttactccactattttcaggcccattctggaaacgcaggatttaaccgcggggttgcagcttccctggtctccatctgccatcagaacccatctccaccccttccccgttcagacctgtgtcccctccacaactcatactggtcactctcagaactgtggccctgagttctctagctttccctctttgcctcgggacccaggacaccagtcggggcttaactttctcagttgggaaggcgacgctgctggtggctgctgctacttgctggttcttccttttttttcctccccaaacgagaggaagattcgagtggatttggcacatcccctaaccggggcctgccatttgcaggttgggggctgacgtgcccaggaggacccggaccaagcaggccattttcacctgcgtaataacaggattgggaatagcgaagcagcggcggcagcagcgagtggagtaggaggaggagcgcaggcagcggccgcggcggggccggaggaagaggaggggggagaaggaggagctgaagcgggaagagcggcaggcagcggctcggcggagttgcagcagaggcggcggcgacgctgagacaccgcagcttccctgagcgccgagtccctccggggacagcagcagggagcgcccgcgcagccaccgagcctctgcccagccaagccgccgtcgccgcgccggggga

SEQ ID NO: 12447 - DNA, 2300 bp, Homo sapien
gaattgaaattagatgtctccacagttctctaccaataaggatagggctgctttgaaaaataaatttaacaatctatttaaaaggttctaattaacaaataactatgtaattcaagattttcttatttgggtctgcaaagtcacctctattttgttaaaataagtgattctttaattcaggatatgatatagcaaatttgctataattagtggtaatatctctttccagttgttttcagattcaagatgcctttacccataaataaatagatttaaattaatatggcttggcctttgtctagtatgatcagaggtgaataaagtgaagtcttatttcaattagatgattacttaatttgcttgactcttcagtagtttcaatttccagcgttttttgttcagacataaaaccttataataaagctactttaaagtgagaaaaggagattaacaaaaatgatcactctttttgcattgcttctatggcttttaactgtaagcatcttttgcttcaaacaacatttcgaatatgtgaacagaaggtgattctcttaagacttaccctgtggacaaaggctttattttggcaagtcaccaatagttcttaagtctacagctatgcaagaactcagactcagttgctgactggccagatccttgagctttacctagaataataacaatcttaaaattatttgtttatatcatgtaaagaaaactgttagctctctcctagtctttcactggtcaggaaaatcccaatagattcctaaaaatatactttgataatgtttatactttcatcccagagctggacccctcaaattaagaaacttagtgtagataattcgctgaactggtttctgttcaaatttctatgtctagaagtgtagaaatctcaactattatgttctaattcatctttatactctatgaagaaaacttccccaaagacaggtcaccttgttcaactacatttcagagaagataatagtaaaagtaaaaactatgaatctgacttttctggcattagtttgaaacccctaagccacaaataactttaattagcttatttcgaattatctattaatgacagatagaaacaattttctgtgaaataagaatgtagagggaaaaccagttaatttttgtttatgtatctttacaaacggtctatattacagataaagttaattgaataaaggcaaatatgctgaaattgttgacaattgttaaatgagaatattcctaaaatctgaactttttcttgggaaagcagttcaaaactatagtctatttaatgaggtggccatctggtgacagaaagaagcactacagacaatattttgcattaacatcacaactattctacacaaaccgactgaaccacataaaagagagcacagtccaaaagaaacataattcaagtcatacatgcaatttaaaatttatctaacagccgcattttcaaaatagaaacaataattttaacaatattttttatttaacccaatgtatcaaaaatattatttcaacatttaatcaatatgaagattaataacgaaagagtttatttttttcatactaagccttcaaaatacaatgcgtaccttacagcacatgtcaatttggacaagccacatttcaagcgatcatgggccctgcgagtctgtgggtagcggctcaccctgctggactgcgcagatccagagaacgacacgagacctgcggttgctttggtttgccttttactaagttcatttctcagcctctctgcccactctgaaaagtctcccctttccccccttttaattctactctattttgtaaattactgttgtctcctgaaaattttggaatgcttaaaaggcactcaaaagcctgtccgagatcgactagaagaccctcggaaggtccctctcttctctggacctcactgggcgttcgtttgcccgcgccgtccttccattcggcttgccgggcgcgcagcggcttgcggctgtggtcagccaccttcccgggaggcggtggtcgctggccgcgggaaggatgccgcgctgggggtcggggttcgtcccggctgtcacgccaccttgtgacatcacagggccatgccctcggggctcaaggccagagaggctccgcgcttccaggacccgagagctaaagataatgaatgggagagagcgagactggaggaggtaacgaataagtccccaccaccttgcccataacgcgttgctttcagtcacgttccgcgaactggcgaaggtaagtgaaaagataagcgcaggtacaga

SEQ ID NO: 12448 - DNA, 2300 bp, Homo sapien
tagctgggaccacaggcgcacacaaccacacctggctaattttttgtatcttttgtagagacagggtttcaccatgttgcctcaaactcctaggctcaagcgatcctcctacctcagcctcccaaagtgctaggattgcaggcaagagccaccacgcctggcccagctgtccactcaccctttaaaaatggattgcaaccatccttaatttccccagaattatgtgtcccactttgtttctgaagctcagcgcatacctgtttatcacatacactgtaattactgatgtccttgttgttcaagttatgtccttgatgtccaagttatattttggtaaattccttaaggatcatgttttatttgactttatatctgcagcaattagtgtagttcctgacaaataggaaccactattcccttcactatttcaataaatgttgaatgaatattttatacacagctaaccaaagggcttgtaccatatgccctactaattttattctaagaaagcacgatgttcaaatatatttgaaaaacagcagatatttcaacaataaacatgttaattctgcttgggtcatatgtaatgcccatgagaagaacaagcataaatacagactctctacataaagataatagctcatccttactaagcacttaagctgtgccatttactctgctaagcaatttacaattatttgatttaatccaatgacataactctctgcgggttaagttctattatttgccttattttacaagatatggggaaactgagcactagagaaattacataacctcaagatctcacaagtagtaagcagtagtgccagggtttcaacccagacttcctgactctggagcctccactcttaattacatgaaactcagacttcttggcggtaagtgatgcttccgagatgcttaatgtggtactctgacccgcaatgagtgagcttcaatgagaaaaactatggatggaccaacagcacgttttcccatattctatcaaatcgtgaagataccaaactatgaaagggtctacctgcaaattaagtccttgaagacaagtatatgtatatccggggttttcttccacatgctttcaacacactacacttttgctctggacacaatatcttaaaaataaataaataaagctttggcttttaatatgaacacagtaattatttttctattacgacctgaaaacctaaatacttaaatacaaagtcagcatttccaagacagccaagagccaagaattaaaaaaaaaaaaaaattaaggccgcatttatagttttgaggaatggagatccaaacaaaacagtccacaagtcatcttggacgctgaagtgtgcagaactgctagggcatctacccaatcacatgggggaattgcgggtaccttgataccgacaagttagcttcaaagttcccttacccgagcctctaaatcagctgagaccaatcattgttaacgctctccggggccgtcttgaggactcccagttggcaatctggaacgtgtccagaacttggtggggcgggggggggatcatatttcgtggagaatgggggaggtgagccctgggtatagggataactttttaactagcgttaattggggtctttgcggccaggctgtaaagattcccgccacactaatatgaatcagccatggccttttaattggaacgccggaactctgccttgttttattaatatcttaataacacgtttctataatggacatgttggttccttgtattttaaaacgcagccacaaactgaggcgatagcgatcacgttatgcagtccccaatcgtccaagccgaataggctgcatgaagtatcactcaaaaacattcattaccgtcggtgtgttgagtggtaacgccagtgtgcgaattcattaatggaaatcacgggaccccgagcggttggagatctgccacacccctctgcctgcgttaagacagcctgacccgacctctggtaaattaatgcgcaaaatggcggttgcacgtctgtttccccaccccggcgcacaatcctgaggaaggacgtcacgtcaccagggcaacgacgctcttgcgtaaaggcccggcccaagggaacgttcagggcgtctcggctttccccgctgctgcttctgctaggcccagtgcgagaccagagcacgagcgactcccgtcgtccccggccaggcagatgttggcctagtcctggcgcgaacgaagcgcgctatttccctgcttcctctaggccaagcctgctttacggcagggcccgcctcg

SEQ ID NO: 12449 - DNA, 2300 bp, Homo sapien
aaatttagtaatatattgataatgtttgtactctgtgctttaaaattaaattatttgaagcagtttgatgatggtacatttaactgttaagtgctgtgccaagtttgagtttctccacttaaggtagaagtagtcactactttatgaggaaattgtagtgtgcaagtttgtgttctcagattcataccactgcttatacaaaatggaagtgttgtaaatgctagttaagttcttaggttaagctgcagagatacagtcataacctgagttgcgcatttctgatattaaccgttctaatgttaaattctgggtcctgggagcgggacagtacaagacaaagaggaagagaagagctttccctctttcttagctgctaatgtatgaatgtgggtaaggctttgactttccaaagttacttgaaattttaaattataaaattttaaaactctgaagaatcattggtagaatttcagccaatgtagtagtttagacatttaggggagaaatgtttttgctctggcctcagttgttcagttttacaaattcctgtattcaattttcttactactcagtgatggcttttaattacttcctcctcctttgcacatttgaattaacatattctctaaatgctaagcttgtacacaattgtataggggtagttgctgatgtagaaggacacttgtcacaatttgtatgtattgatcatttgtaagttgggactaagacttttctgtggtgtgtgtgtgtggtttttttttggaagggagtgtgttgttattctgtgttgctttgctttttcttaaaagatcctcttctatatatttcgtgtgatttaaatgttctttttttttatataggtttgtggtaaatatgccagctctagaacacatgaatcagattttacacatcttgtttgtatttttaccctttctgtgggcacttgggactctgcccccacccgatgcacttctcttatgggcaatggagcaggttttagagttcggccttggaggctcatctatgtcaacccacttacggtatttatttttaaatattgatgttatatgtaatattcttaaagaacatttttcttttcaagtaaatatttttttcttttttttttctgtacaggttattagtaatgttcatcatgtctgctggaacagctatagcatcatatttcattccaagcactgttggtgtggttcttttcatgactggatttggtttcttgctgagtctgaacttaagtgatatgggtcacaaaattggaaccaaatctaaggatttacccagtggtccggaaaaacatttttcatggaaggaatgccttttctacatcattatattagtcttggctcttttagaaactagcttgcttcatcactttgctggcttctcacagatttctaaaagcaattcccaggctattgtgggctatggtttgatgatattacttataatactgtggatacttagagaaattcaaagcgtatatatcattggaattttccgaaatcccttttatccgaaggatgtgcaaactgtgactgtattctttgagaagcaaactaggctcatgaagattggtattgtcagacggattttgctaactttaggtaggaagataaagtctattaaccttgtgttacaaatcatatcctggaagtattcaaaaatattactcaattcccatatttgtgtggtattataccatatacaagtgtttgttcttttatgttatggttttttgtttattggctttttagttcatcgcttaaatgtgctcataaaaaatgtgtatttgccagaataaaatatggtagaaggagctattttgccttaattaaatttctctctttttgttttgttttagtatcaccttttgccatgatagcatttctttcattggacagttccttacaagggctccactcagtgtctgtctgtattggattcacaagagcctttagaatggtaatcctaatatgtgtttaatagtattttcctattgctaagttttattgtaattttgtttaatagtttgcttagattatctaattctacctgataaaaatggataatttgtatactgcaggtatggcagaatacagaaaatgctttattggagacagtcattgtatcaacagtacacttgatctccagtacagacatatggtggaacagaagcctggatacaggactcagactcttactggtaagtgtgtcttttaacagctttactgaaatatattttacatactataatatttgtccatttagtggtgtatattcag

SEQ ID NO: 12450 - DNA, 2300 bp, Homo sapien
catctggcttctttcacttttatgttttcaaggttcattcatgttatagcatgtatcagtacagtcatgcactgcataaggacgtttcagtcaatgacagaccacatatacaacggtggtttcataagattattatggagatgaaaaattcctatcagctagtggtatagcccttgtagggtagctcattactcacgtgtttgtggtgatgttggtgtaaacaaacctactgggctgccagtcatatagaagtatagcatatacaattgtgtacagtatgcagtacttgacaataagcaactactggtttatgtacttactgtgctttttattattttagagtatattcctacatattaaaaaaaaagttgactgtaaaacagcctcaggcaggtccttcaggaggtattccagaagaaggcattgttatcataggagatgacaactccatgtatgttattgcccctgaagactttccagtggaacaagatgtgaaggtggaagacagtaatactaatgatctgaccttctgtaggcctagactgatacgtgtttttgtatcttcatttttgacaaaaaagttttaaaagttaaaaatttttaaatagaaaaaaacttatagaatagggatataaagaaaaaatgttgagcagctgtacaatgtgttttaagctaagtgtcattacaaaacagtcaaaaagtaaaaaagaaagtataaaataaaaaagttatagtaagctgaagttaatttattactgaagaatgaaaaatattttaaaaataaatttagagtaacctaagagtacagtgttttaaaaatctacagtagtgtatagtaatgtcctaggacttcacattcattcaccactcactcactcacttagagcaacttctagtgctgcaagtcccattcatagtaagtgctctattcaggtataccattttttatcttttataatgtatttttactgtacaatttcaatgtttagatacacaaatacttaacattgtgttacagatgcctatggtattgagtactgtaacattcagtacaggtttgtagcctatgagcaataggttataacatatagcctaggtatgtagtaggctataccacctaggtttgtgtatgtacgctctataatattcactcaatgatgagtctcgttattagtgaacatatgttttcatttatcttgggtatacctacctaggactggaatttctggttgtatataggaactccatgtttaatacttcaagatactgcagaacacatttcttagaacatatccttctctggccagacacggtggatcacgcctttaatcccagcactttgggaggctgaggtgggcggaggggtgtgtttatctagttttctttccttgtgatatcattgcctggtcccctaaaatgagttaggaagtgttccatactcttctattttctggtagaagttggtgaaggataggtattgattattcgtaaatgttctgtagtattcaatatgtatctgaaatgttttgtggtatgtaatattttgtagtattgaagccatctgagcctcagcttctctctgtgggtagtttttaaattattcaatctctttactttttgtaggttattcagattttttatttcttcttgagccagttttagtaatttgtgtctttctaggaacttgtcaatttctgcattatctaatttgtggcctacagtggttcagccttaaagcatagttagtacactgtcagctctctttagtgttactgttttttttttttaagaacaaactttaaaatatagtcttgtttattaattatgaggttggagaaaattaacaaaaaaatcaaagaataagatttatttcttcaaaaatactggggcaataataaaattactgtatagtctgtcttatatgatcttgaaaattcatgaaaaatcttctaaggataaataaaaataatttttacatttctacaggttggtatcatacgtgatcgtttgattcagttcatctctaaattgcagtttgccgtgactgtgcttttgacatcatggacagagaaaaaacaacgtcgaaaaacaactgccactttatgtatactcaacattgtcttttctccattcgtgttggtcatcatagttttttctacactactctcttctcccttactccctcttttcacccttcctgtgttcttggtggggtttccccgacctattcagagttggccaggagcagcaggcaccacagcctgtgtgtgtgcagatacagtgtactactaccaaatggt

SEQ ID NO: 12451 - DNA, 2300 bp, Homo sapien
gtcaaaccatgtcacttctgtagtcaaaaccctgcagtggatctcttctttcatttagagtaaaagccaggctctaaatggctaggcttcctattccctctttggcctttattgctttaaccctctcactctattccagcctcctggctattccctctgcctaaaacactctacttgcatataatcacctaactccctccctcaccactttcaggtctttgctcaaatgtcacctcctcagtgagatttcctatggccatcatatttaaaattacactcccactcttatcccagcactcccaacccccccttgccttgctttactttttccttatttttatagtacttataccttctcacaaactatgtaatttacttattagttttactggtgattacccatgtccctcactttataagtagtatcataagcacagggatctcttgtttttattcaggaatacatcctaagcccctgaaacagtgcctggcacagaataggcctttaacaaatgttttgttttgttttgttttatataatgaatagtaagtgaattttttgtactagcacagattggataaaatcgctagtgactaaaaagctgtctctttagtccagtggttctcaaaatgcagtgccctgactagtattagtaatatttcctgagaacttgttagaagtggaaattcttgggccctaccctgaacctactaagttagaaactctaggggtgggatcagcaacctgtatttcaaacagcgctccgagtgatgctgactcacctacagattgagaacctctgctctagtctaacccataccagaagacaaaaaatattgaggacattttgattacttaattttattctatttaaaaatgatatggtttaataatacctaataatgttgattgatcctttgtgctctgtgacatatgtggtttaaaaatatactttttggtgttactctttttttctgtctgtctttttttgacacaagctgggttaggccatgccatctattaacaattatattaatactttaaaatttacaaaacatgcaaccttcacaaccatatacactaggattattttcctttgaaacaggaaaaaggaatctcagagagggtaggtgacctgctcaagttcttgccagcacctggtggagctgtgactgaaaaacaagttctgaaggcactgacacctttgtaaaaatatataaataagcaatatttaaataagcagtagcaattataatagtaaatagtgacctgatacctccttttcaagtgattccttctaaggaggtaatcaaaaggtgtttaaaatttatgtaaggatatattgatgatattcactcagcatatatttgttgcatacccactgtgtaccagatactggtttaggcactactgacatagcagtaaccaaagtaatcaaagaagtaaatctgcattctgatgttataaatctggaacaggagactgataaattctggcacatccatacactgaataatgctattagtctcataaagtgggatggaaagcatataatactactgtatatactgtataattctaattttgctttttttctcctccaggattataatttaaaagtttttattgtgtggctcactcttaactatcattatagtcttttaaaattatattcatacctactaaatttgctcaatttctagtagaatttccataatattttaaaaaataatagtagcattatttttaatctctatccagaatcaaatgtgttaagtgccattaactttaagtcaggatgttgctcttgagttaaagaaattgtttttgtcattttccatatttttgtgatgagaatctatgggcatttacatgactagttgctgtatattatgtaataaatgattataaactcaagtactttttatttcttctttaggggttagaattgcaggaaacatcctgtcatactgcagaagctcgcagagttgatgaagtttttgaagatgcttttgagcaagaatacacaagagtatgttcccttaatgaacactttggaaatgtcttgacaccctgtactgttttgcctgtgaaattgtattctgatgccaggaatgttctatcaggcataattgattctcatgaaaacttaaaagaatttaaaggtgacctcattaaagtacttgtgtggatacttgttcaatactgctccaaaaggcctggcatgaaagagaatgttcacaacactgaaaataaagggaaagcacctctaatgttgcctgctttgaacactttgcca

SEQ ID NO: 12452 - DNA, 2300 bp, Homo sapien
tttgttttgttttgttttatataatgaatagtaagtgaattttttgtactagcacagattggataaaatcgctagtgactaaaaagctgtctctttagtccagtggttctcaaaatgcagtgccctgactagtattagtaatatttcctgagaacttgttagaagtggaaattcttgggccctaccctgaacctactaagttagaaactctaggggtgggatcagcaacctgtatttcaaacagcgctccgagtgatgctgactcacctacagattgagaacctctgctctagtctaacccataccagaagacaaaaaatattgaggacattttgattacttaattttattctatttaaaaatgatatggtttaataatacctaataatgttgattgatcctttgtgctctgtgacatatgtggtttaaaaatatactttttggtgttactctttttttctgtctgtctttttttgacacaagctgggttaggccatgccatctattaacaattatattaatactttaaaatttacaaaacatgcaaccttcacaaccatatacactaggattattttcctttgaaacaggaaaaaggaatctcagagagggtaggtgacctgctcaagttcttgccagcacctggtggagctgtgactgaaaaacaagttctgaaggcactgacacctttgtaaaaatatataaataagcaatatttaaataagcagtagcaattataatagtaaatagtgacctgatacctccttttcaagtgattccttctaaggaggtaatcaaaaggtgtttaaaatttatgtaaggatatattgatgatattcactcagcatatatttgttgcatacccactgtgtaccagatactggtttaggcactactgacatagcagtaaccaaagtaatcaaagaagtaaatctgcattctgatgttataaatctggaacaggagactgataaattctggcacatccatacactgaataatgctattagtctcataaagtgggatggaaagcatataatactactgtatatactgtataattctaattttgctttttttctcctccaggattataatttaaaagtttttattgtgtggctcactcttaactatcattatagtcttttaaaattatattcatacctactaaatttgctcaatttctagtagaatttccataatattttaaaaaataatagtagcattatttttaatctctatccagaatcaaatgtgttaagtgccattaactttaagtcaggatgttgctcttgagttaaagaaattgtttttgtcattttccatatttttgtgatgagaatctatgggcatttacatgactagttgctgtatattatgtaataaatgattataaactcaagtactttttatttcttctttaggggttagaattgcaggaaacatcctgtcatactgcagaagctcgcagagttgatgaagtttttgaagatgcttttgagcaagaatacacaagagtatgttcccttaatgaacactttggaaatgtcttgacaccctgtactgttttgcctgtgaaattgtattctgatgccaggaatgttctatcaggcataattgattctcatgaaaacttaaaagaatttaaaggtgacctcattaaagtacttgtgtggatacttgttcaatactgctccaaaaggcctggcatgaaagagaatgttcacaacactgaaaataaagggaaagcacctctaatgttgcctgctttgaacactttgccacctcccaaatccccagaagacatagacagtttaaattcagaaacttttaatgactggtctgatgataatatttttgatgatgagccaactatcaaaaaagtaatagaagaaaaacatcagttgaaagatttgccaggtacaaatttgtttattccaggatcagtagaatcacagagggttggtgatcattctacaggcactgttcctgaaaacgatctttacaaagcagttctattaggataccctgctgttgacaaaggaaaacaagaggacatgccatatattcctctcatggagttcagttgttcacattctcacttagtatgcttacccgcagagtggaggactagctgtatgcccagttccaaaatgaaggagatgagctcgttatttccagaagactggtaccaatttgttctaaggcagttggaatgttatcattcagaagagaaggcctcaaatgtactggaagaaattgccaaggacaaagttttaaaagacttttatgttcataca

SEQ ID NO: 12453 - DNA, 2300 bp, Homo sapien
aatgggccttagctgccatgaatgggcctgaccccagaccatcaaaagtgaccattactaaaaggagggaaggcagggtaccattctattacatctggaattaaaaatgaaggttaccagttatagaaaagactttcggactttattcaaagcattttaataatacttagagaagattgatttattaaatgctagcaactctcattttaacattaacttccgaacttcaaggaggttttaaaaaattgaattttaatttttaatttttgtgggtacacagtaggtgtatatatttatggagtacatgagatactttgatacaggcatacaatgtgtaataatcacatcatggtaaatggggtatccaccccctcaagcatttatcctttatgttacaaacaatccaattatactcttctggttgttttaaaacatacaactaaattattattgactataggcaccccattgcactatcaaatactaggtcttattcattctttctattttttgtatccgttaaccatctccacgtcccccccaaccctcccactactcttctcagcctctggtaactatccttctactctctatcaaggaggtttaaatttcaaggaaaggagaattcaatcaacgtgggcttattgcttctcatgtcaacactaagctatgtattccagactcttcaaaagaagcatcagatttgctactttatttcaaggattctaaagttccattggaacaatactatattaaccctgaaaataattaaaaaacaatttcagatatagttcagaagtaattgtgaaaagaggtgagattagggaaagatgactctgagtccagataaccccaaaaagctttttagagaaggatgagggtggggaggcaggtagggggtttataataggatttaaaaagagaaggaagagctatttaaggaaatttgattactgcaagtaacattcttcaaaacatttaaagaaaaacaaaagtttggcaggcaagactagaaaaagaaaacaacactggggagggaagtcactgcttcttttatttccatgactgttttaaagtcatatttagtttcagccaaggaagagcctttgacatcagagcacacaaagtactctaggaaatgaagaggatgaaagttctactgcatcaacgcccagaactttctccatttggccacaggtcgttctcatacatggcctagtttctatgcactctaactgggtccctctgaggcttgtgaatggaaaaccctcttgctttcaaatgcttgaaaacaagaaagatgctactattgatgcctcaaatacatgtaggtatttagtgggaagcaattaaatgttttgaaggtcatttcaaacggaaattaatcaaaaacagtattttactcttttgtgtattagagtaggcaagaccttggtgttttcattacattctctgtttttatttgctgtttacattaggatgtgaataatggcttgggtaaggggaggatttggtaccaacctaggctttggttgccaaacagacaccagagtaaatttgtgtgtggtcagaatcaggttgtaaggtgccaacacagcacatggcttcagtctttttttctctaattgtaaaaggaccttgtccccatggagggaccattgccttggcttgtggggtcttgagtgatagccacagtctttcttcagcactttctcgacctcatgaaaagatactgaagcttgaaaaggggatgttctttctgaataggaatggagaagaggggccaagcaagaatgattctatctgtctcctggccgttgatagtgtccctgtacagagaggaaataacgtagtataatatgtagcttatgtttgaatcagcttctttaaaaatactggaattttatttatttatttttggtagacacagggtttcctcatgttgcccaggctggtctcggacacttgaattcaagcaatctgccggccccgccgggtgtgccgcatgagggcgcgggccgcccaaggaccgcgagtggggccgcgagtgctgagcccggcgcgcccgagccgctcctcctcccggcctgctccctgggcggagccggggcagtgcggctctgggctggccgaaggggtggcgctgcgatcccgcagggcagcgacgcgactctggtgcgggccgtcttcttccccccgagctgggcgtgcgcggccgcaatgaactgggagctgctgctgtggctgctggtgctgtgcgcgctgctcctgctcttggtgcagctgctgcgcttcctgag

SEQ ID NO: 12454 - DNA, 2300 bp, Homo sapien
ggaagccaacccagcagcgaaaaccccttgcttgtgaaagcaaaccacctgggaatggactgcttcaatgaacacaccactgagtgccaatctactaaagtctcactcaagtaactacagttcttcagctgacatcaacctactctgccagtcaccaaactccatgcttctgcagagctgtattaagatcagttccctgatctgcttagagagactgggcctggtcagcatagctctcccttatatacctaagcaataaattcagctttattttttgtttattgtgatggtctgaattgtgttctcctgaaattaatatgttgaagttttaactcctagtacctcagaatgagactgtatttggggatgagcttgttaaagaggtggttaaggtaaaacgaggtcatgtcagtgggccctgatccaatatgattgatgatgtccttataagaagaggagattaggacacagatgcacacagagaaaagactatgtgaagacaggaagaagacgaccatctgctatagcaggacgagccacagacaaaactccttagataccgggttaaagaaggaaggagctttattcagctgggagcttctgcagacttgcatctcaaaagccgagctccctgggagagaaattcctgccccctttaagggcttacaactctaaggtggtctacgtgaaagggttgtgatcgattgagcaagcatggggtatgggacttgggctgcatgcaccggtaatcaagacagagcagaacagaacagaacagaaaatttcacaatgcttcttcacacaatgcctggaatctatggataatacaagcagttaggtcaggggttgatttttaactaccaggctggaggtgctgcagtgggctgtctgactattgatcttatttttgcctttctgtaacttttgaattctctttctttttctgaggtatgagacaaggagagggggtggtcttcaagtcaaggagggggacctcagaggaaaccagccctgtcagcaccttgaccttgaacttctagactccagcactgtgagaaaataaatttctgttgtttaagccatccagtctgtgatattttgttatggcggccctagaaaattaatatattaatgtttattttggatattgaggtctctagacactagaaatcaacatcaaaattcttaccaaatgaaggtaatgaccctggactctgcctgagcacttctgtctccaagtaacaggcctcagtgctgtgcttgggctcctggcccacaggttagtggttttcacctggacctcaggttggttgcagaggcaggccacatccttagggtaggggatttacctatgggggcacaaatacattccttaacatttctcgtaagctaattttagtgggtctctgccatttgcgattgagagtaccgactgattgagacattggtacccagaagtagagtgctagaaatgaaatatcctaaaatgtgaactactgtgtcaaggtggagtaggaggcagtgaggctctctccatctccctccatccctgggtgggaagtgggcagtctttatgatatggtaatgaagcagctcattaagatgttattgtagtttctttgggattcagacctgtacatactaaggtagaagcttcagggaatccagcagaacaaaattaggctgctctggtgtgagaggcagtattatatggtggttcaagagcaaagactgaaattagactacctaggttcaaagaccctgtctcctagctgtgtgacctagggcaagttacttaatcacaattaagcttcctcatcagggaaatgggaattaaaatagtacctaattaactggattattgtgaagattaagggatttaatatatataaagcacttagaataggcctggcaattagaaagcatatggacaggttaactcttgttgtcttggttacttcttgtggctcctgtcaagatcctactagaaagagataagccttggtcttagatagctgggaacagcatacggctttgttaaaagagatcacgctcctcactgctctcatgccccatctcagcagacagcaatccaagactgcttagggttcggaattacaaaaccaaattccctgctaaggctaaagttgatctgaacaaaagtaagggcaaggcaaagagaatagacattagacagggacctgaaaggatccagaaatgggactttacatcccacagaggaaacaggtaaggtgtttccatacagtgacagagaatagatcagtggctgcctagggaag

SEQ ID NO: 12455 - DNA, 2300 bp, Homo sapien
ggcgcaatctcagctcactgcaacctctgcctcctgggttcaagcaattctcctgcctcagcctcccaagtagctaggattacaggctcccgacaccacacctggctaatttttgtatttttagtagagacggggtttcaccatgttggccaggctgatctcaaactcctgatctcaggtgatccacccacctcagcctcccaaagtgctgggaatataggcatgagacactgcacccagcctatatcatttaatttttaataatgagtatttaacaaacagcaggcaaaatttctgaaaatttaataatctgctgtcatgagccagtataggccagctctccacaccacggactggaactaagttcagcactctttccactcctgctgcctttactaccagcatgtaaaagcaatgatgctcagtatcgtacgggggacaaacctgggtacccgtcattaatttctgtgaccctgggtagttactaccagatgcttagttttctcttctataaaggaggagattaagagtccttgccctgtctacctgcaagggtttttgagaggattaaactggttagtctgtatgatagtgctttgtaaactgcagagtcaggttcagataaaaggctttatgatgatgacaatttcattactgttttcaaccaggccaccattgttaaggatgcagtgtgtcgctgctttcaaaagtatggtttagtttgagatcttctgtaatgcccaggatagacagtaaacacccagaagaattgttctgaagaagcccactcaaatctgtgctagtctttacttagcacaaataggtacctatattgggatgaaaactatttatttgaagcttataattcactcttttctagctgctgctggattgtctgacgggtctttcctggagttatggaatacttctcaatttcaatagttgaataaaggtgtttttttttctgtcatgcaggctagggtgcaggggcatgatctcggcccactgcaacctccacctcctgagttccagtgattctcctgcctgcgattctcctgcctcagcttcccaagtagctgggattacaggcgtgtgccaccaggtgtggctaattttgtattttcagtagagacggggtttccccatgttggccaggctggtcttgaactcctggcctcaagtgatccactcgctttggccttccaaagtgctgggattacaggtgtgagccactgcacccagactatttttaatttcaatttttaaaaaagttgctttgctttttgcaccagaccaactcaccaagttattttctatggattatacccgtgcacataatgtagtttcctgattataaattaaatatccctaatgtccacgttgaaacactctcgaaacttaaatgaccataaactatttgccttgagtttgctgaacttgtctttgggctgtaagaaactcttttctgccaagctcttttccacatcaggccctttgcccatgctgacccctctacctggaaagttctcccctgattatgaagctgactccttctcatcctttagatcaaatgctgccttcttagagaggtctgcactgaacacctgtttcaagtcgtctcccggatctgtttccttatttattttcttcacagcatggataacagtatgcaatttcctttctatctgctgacttatttgtctatgcctcttattattatgttggctctttgtgggcagggcttgcccattgatgtcattatctacctccagtgtcccacacagtgcttggtgcacaatagctatctcatgaacagatgaacttatctgacaagatccactctagtattgtaaggctgtggccatatatggctatcttgaggtgaaagcctaccctaaagactgtccaggacttggcctctggtgctcacagttgcccaggtttctctcaggtcgcaggatgagccacagtggtagcataagactgctggctgctcccctctgcccctccctaatggggctgcccagtgatgtcacacaggacaggattctctaatccttttgattctgtaacagtcctctaagcagctaagtttctcataatgtattatgatgtaggggagggaggaaggagggccagggtagggggcacaccctctccctgaatgaaattcatttaggggcactgtctgctcgcatgttctgttctgggagaaaatgggtagcagaagctacaatttgtactaagctaatgaaaagagagaaaagaagaatggggaagagaagggcaaagaaggcaaa

SEQ ID NO: 12456 - DNA, 2300 bp, Homo sapien
gcattcagcaaatatttagctgctgcttttaaagttgtaaaaagccatctctaattttctcaacatgactttggggaaggttctgtttccttcacttttttttttttttttttttttttttttgagacagagtctcgctctttcatccaggctagtacagtggcacaatctcggctcactgcaagctccgcctcccgggttcatgccattctcctgcctcagcctcccgagtagctgggactacaggcgcctgccaccacgcctggctaatttttttgtatttttagttcagacagggtttcaccgtgttggccaggatggtctcggtttcctgacctcgtgatccaccctcctcggcctcccaaagtgctgggattacagtcgtgagccactgttcccggccagaattccttagaagatgatcgtggatcatttccacatatacaaaataaaaataaaattcactatgcatttggtctcagtatcatctgaggatacatttcctaattctccacatatctccccgaccccccaaaaaaagaaattagatcagagatctttgaaacgctaccttcttggaatccttaatactccaggcaagtaacagcatgagtagcatgctggtggactcattaacattctgaactacaaaagctcatatggcaaccatttagagtgctcttaaaagacaaattttcttatttataagcagaagctgggtcactagtgacggtagtggaccatagaaaacttgaaatgcctgcctatctttctgcttccttcctttaggcttccacacctttcttctctctgttctgcacttggagaatctgggtcaattgtagaagaagagggagagaaatagaaaatatgaacagaaagaaatttttaaggagtctacgcattgtacagactgccgataaagcagcaccttcctactatttatttctgaatacagcttgcagggacattttggtatgaactaggaaactcatgggttataagattaatattttaaaaagatatcaatattgtctgattaaatatgtttaatatcatcatatccccttttattaaaccttatgctaagaaggggggacagatagaaggggaaaataacattgaaaaaagaggattgaaagttctcttctgaactgtaagactttgccgggcctctacacatatttgggatgttcacagtaagattttagtgggaatatattgccatgatgatgacattttagtaatttttataggtatattataaaactatcctgctctgctttggaaatctgtttatatttcaattaacaaagaaaaagattatctacaagattggctttaaagtcctgaatttagtgtgtgttgatagcctagtaattgggaggcttggggtgaggacaggggctgtagtgtggagtctaaagcttaatctgatcagcaatactctctttccctttccaccacaattgtgacttaaaaaaaggtttacattcctgctcccaaattactctccaggagagtcacccttgaggcagacttgcctgggcctctcaaaatatatgcagtaatgtaaatgaccccctcaggaggctagtatttgagaatacccctcaccatccttttccactgaagccagtcactactcaagagttagaaagccaaccagaacataggttcaacaattccttcctccctcactacctgtttcatatttttttctctcacacatcctcttcatttggtttcctcttttctcatttctccttctctctcctccctttttcttctcttctctttttgccttctttgcccttctcttccccattcttcttttctctcttttcattagcttagtacaaattgtagcttctgctacccattttctcccagaacagaacatgcgagcagacagtgcccctaaatgaatttcattcagggagagggtgtgccccctaccctggccctccttcctccctcccctacatcataatacattatgagaaacttagctgcttagaggactgttacagaatcaaaaggattagagaatcctgtcctgtgtgacatcactgggcagccccattagggaggggcagaggggagcagccagcagtcttatgctaccactgtggctcatcctgcgacctgagagaaacctgggcaactgtgagcaccagaggccaagtcctggacagtctttagggtaggctttcacctcaagatagccatatatggccacagccttacaatactagagtggatcttgtcagataagttcatctgttcatgagatagct

SEQ ID NO: 12457 - DNA, 2300 bp, Homo sapien
gattccaagaaggtagcgtttcaaagatctctgatctaatttctttttttggggggtcggggagatatgtggagaattaggaaatgtatcctcagatgatactgagaccaaatgcatagtgaattttatttttattttgtatatgtggaaatgatccacgatcatcttctaaggaattctggccgggaacagtggctcacgactgtaatcccagcactttgggaggccgaggagggtggatcacgaggtcaggaaaccgagaccatcctggccaacacggtgaaaccctgtctgaactaaaaatacaaaaaaattagccaggcgtggtggcaggcgcctgtagtcccagctactcgggaggctgaggcaggagaatggcatgaacccgggaggcggagcttgcagtgagccgagattgtgccactgtactagcctggatgaaagagcgagactctgtctcaaaaaaaaaaaaaaaaaaaaaaaaaaaagtgaaggaaacagaaccttccccaaagtcatgttgagaaaattagagatggctttttacaactttaaaagcagcagctaaatatttgctgaatgccagaaagaataaataggttgcttttgatctaagagttggggcaacaaaatggtttaggagatagaaagtagtagggtgcaaattgctatagtgagctcctcaagtaaaatagagaggccttcaacataaatttaccttttttactggccagaactcaatttggccagtaaaagaacctgccttctacaatgaagtctttggtttgtgtgtgcatcagaacatcttttaaaaatacggacttttcttctaacttcttttcctgcgaatgtggtgtaggtcaaattcgtgaactggttaagccgctgacaagagagggaagggcaccccagccaatgggaacccgtgctggtgatgtactgctcctaggctgcgattcattggctgcctagggtttgtcattctatccccggcgtctgcaagcagcgtgggtcgggttttccagctagctaaactggattttggccgctggcacgtgcagtttctattaactttagctcatctctacctcttaatagaagcagctgttatgtttctgattattctcctgattttgaaaaatcctgttcccttaacctacctcattggaggtcgttggaggtcccctgggacagaaccacgtgattatctaacatgtgcaaataaatacaatgtggaatcccctgaactatagagggaaaacctgccagaaactcagagcatgtgccccgtgcgtgaatcagttgcactcgcacattggtgggcggtggtagcgtgcttgtgtctctgccctttgggtcgcgaggtgtgtggccgtggcacctgcttgggcttcctggggtcactgggagaggaaggctctggaggagtgggactctggggtaggggggtctggcagctgcctgggacccaccatgggttcgaagggcagcggccagaccgcgacggcgcccaagaagggtggacagcttcgggtctgtgctcggggctgcgtgtacaccatcttcgcagggagtggggtttgtatctgcaggcaggtagaagagccagggctccgggcgcggacgccgtaggggtagcttccgagtccctacttggccaagggccggcacggaggggctgtcgatctactgggcacctaatagccgcacattctgtccagtccctggcgccggaacgtgaaggcccgggtcctggctgctatccgggatccggacgctcccttcggcttcggcctggtgctccaggccgtaaggcaaaggcggcggcagcagcagcggcagagaaagaagctgggtaaggcagtgacgtcatctgtggcggcccctcccccgcccgccagccctcaccgcagttcctgcccaacgacatccgggtctctgtagctgcgcgccgcgccgcagctgtagcggcggcggagccagcggggcggggcgagcggaggggtgggggaggggcgacgcggtcgtgagcgcgcctgcgcggggccgcgctagaggcggcggcggcggcggtggcggcgctagggacgggagcgcgcgcgggagctagagagcagtggtctcggcgctcgtccggcccgcagcttcgggtcctcaggcggctgttgctccggaacgggtggttggggaggggggggtggggggactctagacagctgaggcgcgaaagcgatgagtcctcggctcttcctcctccttctccgggacccgctctctgcctccctctccaacgcccggat

SEQ ID NO: 12458 - DNA, 2300 bp, Homo sapien
acaaattttcataagaaaatctagtgttaaattgaagtagactaactttttacctactaaattttcttgacagtcatagcaatgtagtgccagtaagacaaaatagatttacactttatatttgctttcctatgttttcctaaaaagaagtagttaataaatataaacaaatgtaataagagtaaatttgggttaatatctaaataaggaactcaactaagcaagaaaacaaacaatctgattaaaaatgggcaaaggacctgaatagacattgctcaaaagaagatgtgcaaatcgccaacagatatataaagaaatgctgaacgtcaataatcatagcgaaatgcaaatcaaaaccacaataggatacgtcacacctgttagaatgactatgataaaaaaggcaacaagtgttgacaaggatatggaaaaaaggaaaagttgtacactctttgcgggaatgcaaatgggtaccgccattagggaaacagtgaagagacttctcaaaatttaaaaatagaactatcataagacccagcaatcccacttttgaatacatatccaaagaatataaaatcactttgtggaacagatgtctgtgctctcatgttcactgcaacattattcacaatagccaagatatatactcaacctatccattcatttgtcaatgaatggataaacacacacacacacacacacacggacttttattcagctttaacagagaaggaatcttgtcatttgtgaccacatggatgatggatgagcctgtgggacattatgctaattgaagtaagtcaggcacagaaagacaaatactatatgacttcacttgtaggtggaatctgaaaaagctgagcccatagaagcagagagtagaatggtggttgccagtggctgggggagggaggaggtgggaatgaggaaatatgttggtcaaagggtacgaagtttcagttaggcagattgaataagttctggagatctaatgtacagcatggtgactatagttaataatactgtattgtgtccttgaaacttgctaagagagtagatcttaaaggttctcaccacacacacccaaaaatgattatatgaggtgatggatgtgttatacaaattaacttgatcgtggtgatcatttcacaatgtatgtatacgtccaaatatcatgtacgtggtaaatacaatttttatttgtcaattatgcctcaataaagctggaaaaactaagtaaaagatttttcacacacacacaaaagaataaatctgctaaattgttacattatcaaaacatgttagttttgttgaatattaataccaactagtgagcaatatgacagcacactataataaaattggttatgcatatctgatctgaggcacttaaggaagaaaaacttctgaaaccttctttttcacttaaatattccgtgaaacagcttaggttttggtgacttgagacaattattgtgatcatttacggttaaaaacatttctacgagaaatatacaaaggattgaggcactttggaggactgaactgcttaatgattttgtttacactctttatttcactttggataggcagacaaagcctaagagcataaattacctaaagacagcattttgggcagaaaatgtactttatttgaaactgagcaaatgagtcagtctcaaaatgtccattcaactaatatgtatttgagttgtgcttgctttttaagatgttttgaaaaatgctgaattcagaattgaattttgattattgaattgagtattttttactcttgttaaaagttaatatcaattttattgttgtactccaaaatatttttaaaaacttgttacaagaggaataaataggctttaaaaaacacttgtcttcaagaaaacaggagagtctctgacaggtctctacttctttgagggtcctctaactccagcacccacttctgtggttttacggggcttattccgcgcttccacccgcgaagaaggagcggttgcagccgcgcaggtctcgtccagagcgcgatctcgctgctcttcagcgcgatctgcggctcccgcggcgtgctccgcggggtctctcagggctggtaccaggggcgtgggggcggggctgagcgagtccagcccagggctccggggaccgtttgtagttaggatccgctgtggcgtcctgagtggagtttgggaccccagggagggagggtgtgggcgttcgggtccagaggagctgtttaggtgcgtgtggaagggagctgcatgtggcggtttttctctgggccggcg

SEQ ID NO: 12459 - DNA, 2300 bp, Homo sapien
taggcgctgggatcggggtcggctctcggctcggctcgcgggctgtaaggtctccgcggaccccaccgcctcttctgcgcgctaagggtgagcgccaagcaatttcgcgagcaatagccggcaaagtaaccaccccgagagggaaaataaacctctgcaaactggagcaagggggtgctttcctcccctggccagaagctccgggatcgcagccctcccgggtccggcttcatccctgcccggccaccgaggccctctttttctgcaccgcggattctcctccgcctgcgtgttcggggcccttgtatccgatgtttctttctaaaagttgtccttccggctgattcggaagtcgctccaagggaaagaaggtttatgctttgtcattatcttcatcgccctctttattttgcccctgccttgtcgtatttcaagaaaatgaactcttagaaaagaaagcctctccgttgaggcggttggcaatctcacagaaatgatgtaaatggtttcagggcttttttcttcccctctgctatttttttcgagtgaactgtgaagatctgtgaaaataatatcagggttttccgtcagaacgagctttgccctgcactcaggcgtggcgtgatctgacccgacacctccaaccatctgtgctatctatctgccttctgatttaccagatctgtacaagccgcatacaaattgtacttgatactaaagaaaagacagtcgggtccagtccagttcggctgtgaacgttctcacctgatttctgtctagggatggacctccccaaaacggttttcctggcgtttttgttatacagccccctaccagttattttcttcaaactaaacaaacccctaccacaggcccagatgagatcatggtttctttgacccaggcctcagaaaatggtatgatgtggactgccaattgggaatcaataaaagttgccaattcactccactagcccaaagtcagagccaccaagccactccttcctcactacaggaggggtcaataatcagcggcttaggaagtgctttctgggcccccgcattgtcgtggatgcccttctgtattgtatttttactgaattgtttttgagctaaaatgccaaggttagagttgttatccccagctcaagaggtataagttctaacacaaggtaggggcaaaataagcctacaaggaaaggagttaagtcgatattttaaaaaagatctaggaaataagcttttaagttgctgtcctgacctaccaatgacttctcggctctagatgtggctatgctgcactttgttcaagtccattaaactgggggagggggagaaagtatatttctccccctttatttggaggtccctacagcccacccttcttttcttaaagtgtctgacttcgtggtctgcatctgcgttatcagacgtgaacatgtccttgttggcatttaaaattattttagtgggctttgaagggagtaaggctagagttcaaactgacctcttctacagatccctggtcctgttcctgctgctccagatttgcttcccactcagctgctttggcaactggaaaggggaagagggaggcatgcagagatgggtacttgggaaaaatgagaagatcgcttccccccaccggcttcctgctcccaccgcaaggtttgctgtttcgttacaactaaacttgcgaattctcggagcatttcagtttggcccagtcctctttgtcctctggagacctctcgaccgagacaacgcatcgccccaaagtgaattcctgaattcctgtggcatcactgcctatttggtgggaaaaagggagggaggggtagagcggggtgggggagggaggagtagtgaacgctgccgcactcgcctctctttttctcccagacactcgcatgtcttttcaacctccaggttctgcaaaatactgaagaaaagtccaggagctaacggcgggcgctgtcgagcacggggaggtgctgaaatagtcctggcgtgctgattcaagctttgattggcagagccacccggtgactgacagggggtctccatggcgcccgcgccgccaatccgcccaccccaatagcggagccagctcgcctgccggcgtgcctgagccgagccgagcccgaaccccaagccgcggagccagcacctcctccagtcggggtcgtccgctcccggccgttgagccaccgccgccacccggtagtgtgtcccgctgccccaatccgcctcatcaacaagcgcctggcacactcagccaggcccgcgggcatctgctgc

SEQ ID NO: 12460 - DNA, 2300 bp, Homo sapien
atgtgaaacatcataagcactaaaataagacagtgaggggaaattaccagacatggctctgggtttagcagtgccaggcttccagtttagaaagtcattgggcatactatatggcagaggctcttttgaaagcatgcacacctattaaatgcatttttttaaaaaaaaagcctaaggtaatgaaatatcagcatctgcttccaagatctaattgcatggaataagcaagagtttcaaggatgcagaaaacattatgttcagcagagaagcagcttcctgtctacttggaatctcccatgtggcagccctgaggtgggaaccctttatgagtttagaatgtatgttgcagggtgcactgtactgggtgcatcattttaaaaccatattaataataaaagaggaaaccaagacatgcttctccttctcccacttgcatctcaatatgcaaaaggttctgtagtgctgggctctttggctaaaggaatcaaaacatatttgaagaagacaagccagtttaaggagcctacagtttgttcttcaccactcactaagagggcacattgaaatcaaaagcatttttgaagtgtacttagaattctgttttgaacttatctaatcagagataagtatagtcataaagtcactctccttccaccatttggcttcccttatctccacgcattgttcttatctcctgctagtctcagctactgacaatagattatctttgtttagagaggctaattgttttcaaaatccttttaattattgctttggaactaggtgtgcaaatgaggcttaagataattacaacttcacttgtttgtgcagttttactaagcattctccacacataaacaaaacagcagatgatgggacttaaattgcagtgcatctctcattccctggcagcaaaataggccagcattgcaacacacacacacacacacatacacacacacacacacacacacacacctctttatttaatcttcttggagccgctgtcgttctcgctttgagggcagtgtccctctcagagcagggtaaggattatattacaaccggacggttattggagccgggcacagttttatttaatttacaccacatccagcgcctttcgtacgaggttcccaaagcatttttgctaatagcaagtaaagcctctcggcattcctcagtagcagaggtggcactgcaaaacacaaccgcacagatggggaaattgagtccagaagcttcaggaacctgctggtttcaatcgcagaacattaagataccaaatcacaaatgaacgctcggagtctctaggtgctcagcaagtatgctctaaacagctctctgcctggtctcaaatcatggaggtcttttgtgaacgagggaaacgctgtccgactgggagtacttgtgccctttggagggtggtgtgcagcagtggggggaggacagtggtagttggtggggggagggaggaggaaatagggttggactcctcgagctgaagccaacccgaagccactcttccagaggctgcatgcgcggaccctggtctgctcttgaattatttatcgcgttccataagctattcatcaatccattatttattcattccaacattaaagtaattaaatatgagctcaccgggagagggcaagtctgcaagggatgaggacaagagtacggagggagaggggaggaattaaggtttggagtcattgatttgtgcggagttgtgcgcgactccccttaggtgatactggcgacgggtcccgcgttgcagggtcctgacgcgctcacccactccctacctccccacacctccgcagcgcagctccctcagaccccaactggcttcccacctttcctcttccttctcctcccaccactccctacccgcgcagccccggcaacacccccaacccccagctccgcagcctcgccctccccgctctgggcggtgcggcctctctgcccagccgggcggcgcgctggctggccagccccggataggcgccgccggcagccaatcagcgtgccggggacgctgcgcgctttaaggccgctgcggggagaacagaaaccaagttccccggcaactagcagcatccaccgggcgggaggtcggaggcagcaaggccttaaaggctactgagtgcgccggccgttccgtgtccagaacctcccctactcctccgccttctcttccttggccgcccaccgccaagttccgactccggttttcgcctttgcaaagcctaaggaggaggttaggaacagccgcgcccccctccctgcgg

SEQ ID NO: 12461 - DNA, 2300 bp, Homo sapien
aggattgattagagaccagcagtaccgtaatgacccggaaagaggggcagccggggattattaatatcagaatgcgggggtggggggggagtgggtgggcaaagtgggtagggagaagtttcaaattactaggatttatatgtaagtgcaggtttacctgaggaaaccagatagtcagtgaatcacgctaacgataaatctaattgcatttcaaatttcacgaagcctgatttttttggagagtggagtaaaaccatcatgaaaccaagccaatatcttagtttttataaacacatagttttataagcttattgtaagaattcaagtgaagagatggggaggggtgctaaatgtctgctttccttgtcactgggcctccttaccatttggactccaaatagcttgatttttcttctcgtgggagtacatttttgagtcgctttggttcttccctccagggatatggggcaatggagtggacattttttcagagcctgcagaggagtaataaaccaaaatttaagtgaagcagtgatacctgggtagtggtttttgttttttgttttgttgaagacatgaatgatcaggatcccaaggagatgtggagaagagtggtttgtctccttcctccaaatatgagccaaaacaaatcagcccctgatggtctgggctgaaatgcagctcactggataattaactccatctttccagtccaccctaactgtttatttagtgtcaccctgcattaccgtcactagcactttcctctgaacaggaggagctgcaggctttcacctcccaaaaggaaattctttttagcttagacagatgtggtattcaggatgtacataagttgagaaaaaaaagttgattggaaattcaatggaagatagcggttttggagagtttcatttcataaacctgccctaaggagacattttaaaaaacagggaatggggggtggggcgcagagtccctttaattcttaagaattgtttcttgtgacaccttggctccactttccagagaggtagttggcatctgatgttgagtagggtcttctagctcaaacctggcgattggtcagagctttctcagagggcaatttgttaacccttttctcccctaggtggccaatacacctttgcccgccctccgtgcaggctacaccatctattgcccgccctccactccctgtgaaaggttctcgccaagtaaggcctactacaccgcccagacttgagggtctactttcaagagaacttacctgcgctgcctcagtgggtgacataagcacactctgtgaaacctcacagcgcccagtcccggagagaaaaaaacgagcgcccagagccgaggggaagggagagggagggaaggaggaagaaagaggaggatgagaagaggaagaggaaaaacaatgagaaagaagagagagagataaggagagagaatgagaaacaggttcacatacagacagaatgaacgagcgtcctctttcagatggagaaaagagttagagacacactctgggaaagacctgccacggggacacacgtagagggagagagagaataactcttccaaagacacacaccccagctctgttcccctccagtctgagctccctcccagtgcttgaccctcagtcggtccatcagtctgtgtgtgtttctctctttctcccttccctgacctcgagacaatacggagatggtattttcgggagccgcgcggggcggcagggttttcagcggcgagccaggctcacagctggctctgtttgtccaggtgtgggcggtggaggtggtggggggcgtcagtcgccctgaatcttgggccagcgcagcgttttcgcaccaaagaagtaggaggctctgctctcgagcttcccgcttccaggagaaaacttcctccctccatacatacataaatacacttggggaagagacaaatcttcattgttcagaaataagctgaggaggcccgcctgctcccctcagccaggcagagcgaggcagggagggaggcgggggccgcgcggatccggtgtcacgttgcagattcccactaaagataacgaaacgtgatctatttttcagaacagcaagtggatgggaaagaaccttgacaacacaaaactcatttactaatggactggttttgggtttctcttctctgagtccgcaaatctctctgcctgagccccaggcctattcagacctcgcggggagcggcgtcccccaggagcaggtgggctgctgctccggcgccacgccggccatcggagccggagttcc

SEQ ID NO: 12462 - DNA, 2300 bp, Homo sapien
cccatctctactaaaaatataaaaaattagtcgggcatggtggcacgcgcctgtagtgccagctactcaggagactgaggcaggagaatcgcttgaacccgggaggcagaggttgcagtgagccaagatcacgccactgcactccagcccgggcaacagagtgagactccatctcaaaaaataaataaataaataaataaataaataagcaaataaataatatggccttttctgttgttataaattttaaatctaccagcgatgtcaacacattagggtaatgcaaaaacaagttaaatcctacatcaaatgacatcttgattgaccagcaataaaataaagcctgtctacaaaaaaaaagaaaatctcaccaagtttatcatgacggcaggtgacctagacagctgctttgtaatatgctgaagtaggcagctatgagtagctgggaagcatacacaatacaaggccaccctgaagcaaaggttaggatgatgtcattaaaatgttgaattttgagaggccgaggcggacggatcacgaggtcaggagatcgagaccatcctggctaacgtggtgaaaccccgtctctactaaaaaatacaaaaaaaaaaaaaaaaaaaaaattagctgggcgtggtggcgggcgcctgtagtcccagctactcgggaggctgaggcaggagaatggcgtgaacccaggaggcggagcttgcagtgagccgagatcacaccactgcactccagcctgggcgacagagcgagactccatctcggggggaaaaaaagttgaattttgagaaagagcagcagcaggcaaacccaactgacctacagtaatcaaagaagcagaaatggatcatcccttttggaattaagatcttgtgcaaattacaaaggaaagagacacaactgcaaacaacaaaagactctacccccacttcagcatcaaaccagagggcaatctgtctatgctgtggaaaagggcttctgatcctgcactgatctggatgacacccgcacattcagtgtttctagcctatcatcgttaaaaaagaaatactcatatacttacattaaaaagttcatgtagaaaacttaaatttccatatttaaagcttagatctcttccacacgactcatccaggataaacttatggtttaatattctacatgtttaattataccatgttcaactcagttgggttgccagccctccacgtggcttaaggttaagtacattttttgaaggcttcttgtttttgtcttctcagtgtgctatttatgctgctaattataaggttttcaagcatttttccctctttggaattttaatttactgtaaatgcttgccccttagaacatttcctagtgtcattttatttttgaccgttttgaatacaaaatccttgataaagacatccaaaaagagggagaatggggaacagggacatactggggggcttctgaattgtcctctgaagttttgtcatctagatgctgagggtggtctctttgttaaaaatttaaccatccagaccttaaggccacacaattaatattccctctggaattgtagggcctctgtttgaaagagttgtccagttttcaggccacattaggtaatttcccgcccaggagcgtggcttggaaagaatgtcggtgttttccttcaggtataggtgcctgggggtcaggaggggagggaaaggcgaggggtggagtgggaggcgggtgatcgacagggatagaaactgtgtctcctcctccctctgaatgcgaaatagccaatgaggtggctaggccgggccggcccggccgccactgccatatagtatgcagcaaccggaggagtcacgttgggggaacggcagaaagcagctatccgtttacactactttgctctaacagctatcttaatggtgactgcgtggccggggggaaacctgatcggccagatacagccgaaaccaggagggagggagtgggctttccggagggggagaggagggagggagacgaaggaggaggagtaagagaggaggaaagaaagaggaaaagagtgcgagggagtgagggagggaggaaaataaacaacaaaaaatgtcctcttcctcccccaccgggcagatcgcaagtgcggcggacatcaagcaagagaatgggatggaaagcgcctcggaagggcaggaggcgcaccgagaagtggcggggggcgcggcggtagggctgagccccccggctccagccccttttcccctggagccgggggacgccgcgaccgctgccgccagggtgagcgg

SEQ ID NO: 12463 - DNA, 2300 bp, Homo sapien
agccagcacttgaattcagctctcttggtactagagaccaaatctataagtgctattttctactgtctttaggtccataagtaaagcttatctgacagatttccaagtcagctgttgctaccatgcttccaagttagtagtttcccacctaggaaaaggataaagcttgtagcattgctgcttctcacaatctttagtgctttctttgccttaatcttaagttttgggagaaaggaaaagcaattcacttcgcaacgtggttggggtctcatcttcaaagacgtaattaaaactgtcctggatagctgggcatcattacaggctcatgcctgtaatcccagcactttgggagcctgaggtaggaggactgcttgagcccaggaattcaagaccagcctgggcaacatagtgagatcccatttcttaaaaaaataaaataaaaaattagctgggactggtggctagtgcctgaggtcccagctacttagaaggctgaggtgggaggatgacttgagcccaggagttcaaggctgcaatgaattgtgatcgggccactgcactctagcctgggcaacagaaggagatcctgtttcaaaacaaacaaacaaacacacaaaaattgtcctagtggcaataaactataatgccatctgagtggatgacctcaatgtagtattggctaaaaattttatttgcacatatgacatattcattctttcaccagaagtttcttgtatgttatcagctgagcttacatgactatgcagttataaagaagtataaagcacaggctattaaatggtccaaaatataaagtactagagttgcctttgttcttgaagagcttcactctgaatcatgtaactggtctggatgtggtctttcaataagacaatagcagcagcataataagcctccgggtcagcatagtagcatagtatttggtgttacctattttagtaagtttatgtttggttaactcctgttgaggaacaatattatgatcaaagagatgatatggtttatttattagatgaatccttgatgtcttcatactaatgtaaagctctgtcacagcctgctttgatctgctggttcctgggtgtggtatccagctgtttgtcagcatccctctctatacccatggaaatcccaactgtatttttgggttttgggttccctaccaggttcactgtttaaaaatgtgaattgaatattactttttattgaaaagaacacaagttctatgatgagttaaaattactataaatgtttatagcttatactcattgtatcagattatttgaaaaatctagtttgcatgttcccttctgatggagtttgggtcagatgaaggtggttacaaaaaatgtttgacactaaaaattttcacattacactattgtttgatagtcattcattaattcttcacttagtctacttactcattaagaatcaacaaatctttattttggagatgaataagatgtgtcctttacagtgggaaagcttattatttaatagagctgtttacagacttcaatttgccttcttgataaatgtgatgaacatggtttacaatttacaaagatattcaggctatcagatcttggaattgcagaactaaatttttctgtatgtattcttatatgattttttcctaggtatttggggaaataaatactgtctgatggagtagatagctttttcatattttgtatctgcgaatgcatattatcagctgagctgacatgactatgcaattataaagaagtataaagcacaggctattaaatggtccaaaagaaagtaagtacaccgctcataaatctttgaaatcatgggaatgtttccagacagaacaagatggaatttatcttcctaattgtgacacagtaccttgaaaaatgcaactgggtgcgtggagataaggctttgtataatttgccattttaaaagttcccctgtcaaattcaaggtattaagttgctttatggaaggctaagaccaagccctagatgcaagaccgggggaactgactgccggaacgtttgtgttgcagcgcctcgccccttgccggtgctctttcgcgaagggaccgtctctgccaagcgcctgttggtaggaacctgcttggtcgcgtctgagggggcttgtaggtggctctggctgaaacaggcgcctgcgagagtctgtaggagggaaaccgccatggacgatcagggttgccctcggtgtaagaccaccaaatatcggaacccctccttgaagctgatggtgaatgtgtgcggacacactct

SEQ ID NO: 12464 - DNA, 2300 bp, Homo sapien
cagcttccagcacctttcctagagattgaaacttgaaacctgagggtgaaattaattttgtttggccctggagtgttggcttgcacagcatttaaattaaaacaaaacaaaaaatgaattagttgccaacatgtaaaaatgaggagacatcatgtaaaaatttggatctctcagttttgttgaaaaactgctagatctggtaacattttggctccatattctcaacagcatggagttgatgagtagccatcattaacatgagatgcattctttagttggccagtttgatgaatgttggaaattgttgatgctttgaatagaaggtataccaataaccttctcaaaaggagacttttcctgttgttgtttaaaaagtaactttctacatgccatactatttattgcaggtatactgtacttaatctttgctttgtaagtgttagttaggcctaagttaaagaaattagacttataagtaaaactgctttatgcataatatttctctagtggatgatttgttaataaaatcatatctagccttaggtcaaatatttataatcattctattatttaaaagaaatttttttaaattataagaacagtttttacttatttaaagttctgttctgcccagagagcatagtataatatggaagtaggtcttctgattagaatttatttaagtagtagaaaattcaagccagcttgggtagggagaatatgaagtgagagaaactgaaatgtgaaagattaaagttgcaaacagttttggtacaattaaatatatctattccaagtggacaatataaacttatgcattaatgaaatgatatggtcatattatttgaaatttgcagaaatggaatcatactatacctttacctttttttttcagttagtggtagattttgagtatcagcatatgctttacctcctttttagcaggtaatatttctttatatggatattgcttctgttgatggaaatttagaaatatgaaattttgatagctctttctaatttttttttaaagtgcactggttaattccctgcaacagtgtacaaaagtgcctttcccccaccacacttgcgtaacatgcaggatttcataaaggctctattagttttaactcactggggttacaattaacacctcactgcctttcatatttgtgtttagcagcaagtctccaatatgattgtaagaatacagacataaagcattttttttcttaatgtttgtgctttaagcaaacacacaggttaaagttttcatttaacattatttaactttctgagcaataaaagtctgaaagaaaatttagaaatacaattgtatgaaatagctattgtttgtaagcactttatccacctcttatttctgtaaaagagtcatattacaattactatgagatctattctttgggcagctggaaagcaggacaaggaaaaatcgttctcctcttgtctggtagaaagtacattgtgccctctggtaccagacttgggcttattcaaaggctaatggattccacacaggtgagtcagtcttttgtgttcttaccaggtgcattattgattttcatgatggtagcctaggtgttctcattcaacagcagctttagcaaagtctccaaaatatcacaaagaaaaccaaagattttgcacattttgggtgcaagaaaatgaatttttctcaactcttttggccattgtactttttttcttgctagacgcttatgaataactcctttggaaaatgtattaatatgtaatgtgtttacttctttgtttttgggcatggattgtgtgtcatgatctatttatttaatttagagtgtgaagcaacgtgtactggcttgtggtacttttttttgcccacagactgagttaagttagggttggaagggttccctgttgtagaaggttatccacataccagattctaggaatagtcaagttcagatagtcatctggggtcaccaatcatttgatattcacttggcccttaaatcacaataccacaatacatttgagttttaactaagacaaacatttcagggtaaccttcaagtaggaactctttgaacagtgttctctaagtgaaaactataatttacctgagagcccttaataattgaggagaagaaagtgacttttaaagtttgggattatctaattttcaggttttcaaattgtttatttttcaatccttagcactaaggtagtagcttaaactatgacagcactgaaaaatttatgttgatgcttattaaatttagatattttcaaaaagttgc

SEQ ID NO: 12465 - DNA, 2300 bp, Homo sapien
ttcaaaatggccctcaaaagagggtatgtagctcaagatctagcttaaagttaacatgataaaatgttctgcctctgtaacttggcattaaaaaaaataatttttaaagctaaaattaacaatttgcaaattcccttcaaatacatgaatattactatgacacacgtaccaattaaatgtttgaaagacagctgatgatctcgaaggtttaggtgtgcaatatgtccaatcctgctaaaccctgaagttacatcttgaccttcaggaagcacagctctcaagatttcttctgacttaaagtgttcatatgttagttccaaattgtatttagagatctgtggactgacattaagctgctctaaaacactgagttctgctttctcaaaggaatcatgagtaaatattttatagggatccaacatgattagtctactttctttatcttccggatcttcaatcacacgtcttatgcctgggcgctgcaatgctgccctttttagggatcgcatcaatttactgactatttctttcctcactttaagcactggaatgttgactgtctttttaaaagctgttctatcaagttttgtcatgcctcggacatcagaaggtggtgaaaacaattcagtctctctctcatgtgtttctgtttctggcatggttgagaatctttttctttgacccaataagaaaataccaggtgcttccaaaagcatctgtgtcagggatgtccaagctactggaatcaacgattttgattcagttatgctatggctttccagtttcagaaatcttcctgagaatccaaatggcctccataagatccttaaaaaaaaaaaaaaaaaattcacacacgacagcttttgagaataaaaatctaaattctactatctcaaataacgggctaaatgctgacaaataaaacgtttagtgatgtgtgggaagtatactatcttttccagactaggatgacttcttcaggaagtcgtattagtggtagataatagtggtatatattaaatttacaccttcaacccatctgctcccagttcagagggcttagtgatccattagccatactcaatgatcctcttcacccacaattttctagataatacatttgggattggaagactgaagtatgagttaaatggtcatctgtaaatgaaatagtcattatacatgaccattactagtggtgatatttattaggatagtctcatgggtgcttattgtgtcagatactgcgctaaatgctttatgtacattatgaatcttgggaggtgtgcagtattgcaccctcattttgtaaataagtaaactaaagctcagacgtaaggtaacccacccaaagtctcccagctgataagtggctaaacatggattaaaacctagttttgactgacttcggtgcttgtgttcttaatatattgctctgttgtttgttttcgatgctttactgccacatgtcctgcctttaactagaggcttctgtattttgaggacgagagctttgctgattgttatatgcatagtatcagttattcactgtcttctaaaataccaaagaatttacttgtaaggggaaagggccctgtcccagaatcctgtaaagcaacgaagtctaacttcaccgtcagagatcaaattggttctagcagctgaccagctgggtgaccctggataaattactataagtctcggttttcccaccagtaaaatgtggcgaaaggcttttgaaacattccttactatccagaacctcgaaactaagctcagcacctaggcgggtgggtgacctcgcgatgtttctgtgcccaggcagcacatggcagagagcagccctgggcgggctggtacctcccctggaccattagcccctaacgcggccgccacctcaccaaagcaccattccaattccccacgtcgctctgcagctggatccgcgagccgacccctcacctcccgctccggtaccgatcggatgtgggtcgcgggtggatgggcgggtcttctatgacatcatcactgttcgccgcgaagagggcgcgcgtcatcagatcaagtcgactcgctcctctccttccaggccctggtgaagtacggaatgccggaagggccgggctcaaagctccgcctctggcgcgaccgacgactggagcgcagggcaggggtagaggctcgtagatggaactggtagtcagctggagagcagcatggaggcgtcctgggggagcttcaacgctgagcggggctggtatgtctctgtccagcagcctgaagaagcggaggccgaagag

SEQ ID NO: 12466 - DNA, 2300 bp, Homo sapien
gaaagcacagaatatccaggattgtcttctattttgggcaaactggcctacaagctaagtcctgaaacataaaaaagaacaggcacaaaacacatgtctggcctctgaaagtgaaataagactacttaacaatacaaagagacagcgaggaatgaaaagattatgtgttgtatttgcactcacaaaattgctatttggaagttaatctgcatggctttgattcactttggccaaggagatacaatgaatatgccactcttaagtgtcatatttcattataaatgaaatgtggatcaagttcccatttttaaaaactagtcacacttctgtgtatttaagaagctatgtagtagccctccaaggtacacactagcaacaagaataacaagaaaaatgctaaaaccccagaaataactaactagaaattgtataatagcagcttctggaatctatctctctacttctccgtatattatcaaaatggaaaaaaaaatttgatgctaaaatatgaagactcacctaaatccaaagacaccggtattagccaaaacataagctaagccaaggatgccacttcccatgatggcattcatcaaattaaacactgataaaccaaatgaaacacctggggatcgctgtctgtgaagttcctgtaagcacacaaatttagtagtgttaaatgtttggacggtgaagttaaaatttcgtaaagaaattccataaatgaaagattatggaaaaaagctgcaaaccaccagggtttgtatgacacactcgttgcttaaccaacactaatttcctttcctttccttcccacctcccactactgcagctccaggaatctagggtttcttaggaaaatgatttccaccagtacacaagacaggcagagttcaggaagggccatgactaaccttgtgactgcaagagatgaagataggatgggaatggagtggggagagagaggagggataaggcctcagctcatgtgattactaaagaattgctgagtcaacctgggactgctgtgggcagttgtttctcctcaattactaggactgcacaactaatctctacttatatatctaatgaattagttctaccaaactggaaggatggtcaggaatatcttgcaatgacaatattataaacagaagcaattcacgttgttctggcagtatccctgaaaacatccccctccccacaaacagcaccgggaacaaagtcctgggaacagtgtctaggactcgagttaaaaagcggagtgcccactgcacaggctttagggtcaggaacgtgctatgcacttactaccaagccacttccattctaccgctaagaatttctgtattaaaatgtttattattttccctccccccatgactaagtcggaagaggaaaatcctgtgactcttgcaaagacctcacgagactggtggagaaaataaggtgacaaaaatactaactaacagcagtgagtacataatcctagggccgctcatcccatcatgttcgcagcttccactcaacgctgcatctcttccacccgacgcttttcatcttttctttctagagtatgctaggctgctatcacgttcataactgcgccaatctcatctgaatctcggcggctgccttcagaccccatcccccagggttcaggctccagcatctcccctgtcccggtgcggtcctccttttctgggtcttatttggcaggcacttgagggaagccggagggcgtcagcgcggggaagcgaacacagcccacttacgttgcttagcaacggactcaactcttcggcctccgcttcttcaggctgctggacagagacataccagccccgctcagcgttgaagctcccccaggacgcctccatgctgctctccagctgactaccagttccatctacgagcctctacccctgccctgcgctccagtcgtcggtcgcgccagaggcggagctttgagcccggcccttccggcattccgtacttcaccagggcctggaaggagaggagcgagtcgacttgatctgatgacgcgcgccctcttcgcggcgaacagtgatgatgtcatagaagacccgcccatccacccgcgacccacatccgatcggtaccggagcgggaggtgaggggtcggctcgcggatccagctgcagagcgacgtggggaattggaatggtgctttggtgaggtggcggccgcgttaggggctaatggtccaggggaggtaccagcccgcccagggctgctctctgccatgtgctgcctgggcacagaaacatcgcgaggtc

SEQ ID NO: 12467 - DNA, 2300 bp, Homo sapien
caagtagaacaatctcagttttgttattagtgactgatgctaacaaaattaaaacatagctaagaatcaattttgtatataaatttaatacactgatttcttaaaacaaacaaacaaaagattgacccaatatatttaagaacatttaaacacttctgctctttgaaagacactgttaagagaataaaacagcaagccacaaaatggggaaaaaaaaatctttgcaaaacacatataaagaacagaaattggctgggcatggtagctcatgcctgtaatctcagcactttgggaggctgaggcgggcagatcacttgaggtcaggagtttgcgaccagcctggccaacatggcgaaaccctatctactaaaaatacaaaaattagctgggtgtggtggcgtgcgcctgtaattccagctatgcaggaggctgaggcactagaattgcttgaacccaggaggtagaggttgcagtgagccgagattataccactgcactccagcctgggtgacggaagtgagactctgtctcaaaaaaacaaaacaaaaccccagaaatataaaatctaaaaagaatgcttaaaagtcaacaatgagaaaacaattaacaaatggtggtatgtgcctgcagtcccagctactcagtatgctgaggcactgggatcacttgagcccaggaatttaaatccagtcggggcaacatagcaagacccagtatttaaaaaaaaaaaaggcaaaagagagttgagctaaacagatactttaccaaagaaaataaacagatggcaaatatgcatatgaaaagatgctcaatatcatattagggaactgcaaactaaaacaacgagataccactacatgccaattagaatggtgaaaatctaaaacactgacaccaccaaatgctggtgaggatgtaagacaacagaaactctaatttactgctctctggaatataaaatgttacagccattttggaaggtagtttggcaatttctcataaaactaaatacattcttaccatacagtgtaggaactgtgctccatggtatttactcaaataagctgcaaattatgtctacataaaaacctacacaggggctgggcatcgtggctcatgcccagcactttgggaggtcgaggcggatggatcacctgaggtcaggagtacaagaccagcctggccaacatggtaaaaccccatctctactaaaaatagaaaaaattagccaggcgtagtggtgggtgcctgtaatcccagctactggggaggctgaggcatgagaattgctagaacctgggagatggaggctacagtgagccgagatcacaccattgcactccagcctaggtgacagagtaagactctgtctcaaaacaaaacaaaacaaaacaaaacaaaaaaacctgcacacgaatgcttagagcagctttatttgtaattgcaaagacttggaagcaaccaagagatctttcaacaggtgaatggataaacaaactgtggtacatccatacaatggaatactattcagtgctacaaagaaaggagctattaagccacaaaaagacatagaagaaacttaattgcatatttctaaacgaaataaggcagtctgaaaaggctacatactataggattgcaactatatgacattttggaaaagacaaaactatggagacagtaaaatgatcagtggaaatgtacaaagacgagcaggtactattcctacagaaactactccaaaaaaattgaggaggagggactcctcttaactcattctatgaggccagcatcaccttgatactaaaacatgacagagacacaataaaaaaagaaaacttcaggtcaatatctttgatgaacattgatgcaaaaatcctcaacaaaatacttgcaaactgaatccagcaacacattaaaagttaatccaccatgatcaagtacacttatacgggatgcaaggttggttcaacatatgcaaatcaataaatgtgattcatcacataaacagaactaaagacaaaaaccacatgatcatctcaataggtgcagaaaaggcttctgataaaattcaacacttgggggaggagccaagatggccgaataggaacagctccggtctacagctcccagcgtgagcgacgcagaagacgggtgatttctgcatttccatctgaggtaccgggttcttctcactagggagtgccagacagtgggcgcaggccagtgtgtgcgcgcaccgtgcgcgagccgaagcaggtcgaggcattgcctcacctgggaagcgcaaggggtcaggg

SEQ ID NO: 12468 - DNA, 2300 bp, Homo sapien
cttttgactttgaaaatctgtcaccttaattagtggaatgaataaactagtacctttaggccatccaggaataggagaaaaggaggaaaggctctgagctcaagaatggggcttgcccttttaggggtgtggtggtgatctactagaaaaaagacttaagatttaccagataggcttggtgtgatggctcacacctataatcccaacaatttgggaggctgaggcagaaggatctcttgggctcaagagtttgagacaagcctggacaactgagggagacacctctctctcaaaaaaaaaaaaatctacaaaagttgtgaaaactgaattccttcctagagacgagttttgtggactagtgattcaatgaaacgggtgggtggaactcaaccataatgatacaaagaactatttattcttttattgaaaaaaagggtgactggagactggatcacactgtgggaacttgctgagaattttggaacttcctctctttgggtatgataagaagtgagggaattgaaattcaagtcacttgaatttccctcagtcttctataatacctggtttccaacttgcattcatttaacaaactggaatcaatgttccattattaaatcaatattactttttaattttaatgtgacttgtagaatgcaatttgatacttgattacaccctatgattcatagctattattggctattttgattgtttcttactcctaatatgtcccctatcaaactgcaaatgccttgaggtcaaaggtccttttttgtctaattagcataggactgaacacttggaagatgctaacaacattcctctgttaaatttaataaggattttaactttccaagttcaatgggttttgaatgactcctgaatataatatattatgctaggtgtagtgtaatagagaaaacatttgtattacttgcattttacaagctggaggagaagcaagaacacaatacctagggaagatttagatttagtaagaaatcagaacgtcccaatacccccttgtatatgttttaccaacctagatttaaaaaaaaaaaaaaaaaagccagaatcccaggcaacatagggagctaatttgagttctttttataataaatcctataaatccttgtagtttacttccttaggccagacactccagatgtttttgtggatagcagctaggtctcctgggaccttggattgggcctttctctagtcaggcaaataatctgaaaagaaaacgaaatcacatgtagtccagcacattttttcctttcttggtttctccacaccagctaagagttatttaaaggctctgaacctctccagcctttgattctttttaaggatgattttatttttagagaactttccacatttcctagttatacagccagactgggtgatctggccagaaaatcattttcccttaaaaaaaaaaaaaaaaaaaaaaaaaaaaaaagctaaaatttgaacgcaggcgttgaattcgaaacagatttatcataacgtaattccctggacactcccaacttgagactgaaagctgggcgaaagcggtttgtgaagctaacctaaaagacaaaatggtctagagccaccttttccccgcaaataacagaggattaaggatctgaaatcttcaagcctccaggaccacggtgcaagccctcagcaaaaatttctgctggaggccggagcgccttttgatttcgggagactggcccaggaactctagtcacttggaaggcggaagagaaggtggtacctgagccaggtaggagccactcagaggcagcccggggccgccactcacctaggagaggaggtggagtccgatgacctggactgagaggaaacgcgagactgagtctaccaggtgaggtaaaaaacacccacctgctcacctcggaaggggcgggcgaggtgcggctcccggtgacccgcgggggtgcagcgcacctgggcggaggcggaactgggagggtgtgggcactgctcgtagggcctggaactaaactcacctgtgacggaggcagaggaggggcccgggcaaaaacccacctgagctggcgggaaacccgacccgcgagcagtccccgggcttgcgcggcgcggagagggaggcgccccgcggcggggcccccactcggtcagcccgcgcgtcggtccccgcgcggccgccatgacctggagcgccacggcccggggcgcccaccagcccgacaacaccgccttcactcagcagcgcctccccgcctggcagccgctgctgtcggccagcatcgcgc

SEQ ID NO: 12469 - DNA, 2300 bp, Homo sapien
gttttcttttagccccaaagtccaacaggagcaaatcctttagtggctcttaaagctagagttcagctgtttggaggaaagggtgacagagctgacccacagggtagatgcgacatcttcccctggagcactaaggccaaacaggagccccctggacgtttgggagcaggctttacaagccctgcctaaagctaagatgtcattagagtgatgcgttgcatccctgccttgttctctaaggaagctttggtgttttcaagacaggccctttcccccctggcccattgtccttacttgttttcattctgtatagtgctgttattacgggtcaggcctccttgcactcatgtgaaatcgttgagaacctactcaattagaaagttctgaacagggccttagaggagtgggggctagaaagatgaacctggggccaggcacgggggctcatgcctgtaatcttaacactttaggaggcaggggctggaagatcacttgaacctgggagctggaggttatggtaagccatgatcacaccgctgtattccagcctggatgacaaagcaaaacccagtctctaaaacataaaagaaagaaaggagggaaggaagaaagaaaggaatgaaagcaagccgaatctgctccgagggaaccagtatagcaagacagaatgtaatcaagtatcttaagagtggcctaggcttggctgggtgctgtggctcacgcctgtaatctcagcactttgggaggccgaggcaggcgaatcacttgaggtcgggagtttgagaccagcctgaccaacatggagaaaccctgtctctactaaaaatacaaaattagccgggcgtggtggcgcatgcctgtaattccagctactcgggaggctggggcaggtgaatcgctcgaacctgggaggcggaggttgcggtgagccgagatggcgccattgcactccagcctgggcaacaaaagcgaaactccgtctcaaaaacaacaacaacaacaacaacaaaaagtggcctaggctttttggggaacaaattggttgtggctggccctcagggagcaagctttgcggcatagcagcgtaggctaaaaggtcctccccggagacaaaatctgcagggaccacggggtgggaagcatcagaaggctgcccactctgactgcaaatacaacaagctggagtgttcctagaagaggcaatttcttccgcgtgtgtgttggggacagcctgtgtgtgtgaacattttctgcccttgccgcgcagagctgggtggaccagaaaccacccgcagaggaagagacttattacctcttggccatgtctgtctccagaagaaccgacctttcctgctctatgtgcaacaagacacaccttccgaggaaggaggcgaacaggatttccatcattactactgccctattaaaacacacacatacacacaactgtgtaattagcctctgcaggaaaggcgcacaaacaggatgcgttcgagctgaccccgggatgagccatccctgtaaatattaggaaaaagaacctccccgccgtgcccccgcctccggccagggcctcttggggatggccctgcagggtcaccagcccaccggggaggttgggagagagggggcgggcgactcctcgccgcgcgggttcctggctggagcgccctcctctgcgtcctcccaaccttccatcgctccccaggtcagtctaccacgcctcaggtgtttgctcgggctgggccacgaaccctttcctttttggcctgcgcccggggtggcccctaacccgcagcgcacggccagacccagcgctacaaggagggcgcgcagggcggcgcaagcgggcactggcctcccgggggcttgcgcggggatccacccaccgcagggccgggccgcggaccgcgggccacgcccctggggtccggaaggcgcgggagcggacgcgggggttctgtgaacttggaacctggcggtgcgaggttctcgccggggatgcggcggcggcagctgcttcctggtttgaagctcgccgagtgggggagagcgtgagccttcggaggcgggggcaggaggagaagcaagaggaggcgggggaagagacgcttggggctggggctcaccggacgggtaggtccggctctccagggagaggagctgcccggccctggagaaggggcgagtcctgcgcgagtccccgggaggcgccgcgcgcttggaagggacggtcgggcttccccggcccgctgagggctcggcggcgggctcccctcctttccacctcgggagggagg

SEQ ID NO: 12470 - DNA, 2300 bp, Homo sapien
actccagcctgggcaacaaaagcgaaactccgtctcaaaaacaacaacaacaacaacaacaaaaagtggcctaggctttttggggaacaaattggttgtggctggccctcagggagcaagctttgcggcatagcagcgtaggctaaaaggtcctccccggagacaaaatctgcagggaccacggggtgggaagcatcagaaggctgcccactctgactgcaaatacaacaagctggagtgttcctagaagaggcaatttcttccgcgtgtgtgttggggacagcctgtgtgtgtgaacattttctgcccttgccgcgcagagctgggtggaccagaaaccacccgcagaggaagagacttattacctcttggccatgtctgtctccagaagaaccgacctttcctgctctatgtgcaacaagacacaccttccgaggaaggaggcgaacaggatttccatcattactactgccctattaaaacacacacatacacacaactgtgtaattagcctctgcaggaaaggcgcacaaacaggatgcgttcgagctgaccccgggatgagccatccctgtaaatattaggaaaaagaacctccccgccgtgcccccgcctccggccagggcctcttggggatggccctgcagggtcaccagcccaccggggaggttgggagagagggggcgggcgactcctcgccgcgcgggttcctggctggagcgccctcctctgcgtcctcccaaccttccatcgctccccaggtcagtctaccacgcctcaggtgtttgctcgggctgggccacgaaccctttcctttttggcctgcgcccggggtggcccctaacccgcagcgcacggccagacccagcgctacaaggagggcgcgcagggcggcgcaagcgggcactggcctcccgggggcttgcgcggggatccacccaccgcagggccgggccgcggaccgcgggccacgcccctggggtccggaaggcgcgggagcggacgcgggggttctgtgaacttggaacctggcggtgcgaggttctcgccggggatgcggcggcggcagctgcttcctggtttgaagctcgccgagtgggggagagcgtgagccttcggaggcgggggcaggaggagaagcaagaggaggcgggggaagagacgcttggggctggggctcaccggacgggtaggtccggctctccagggagaggagctgcccggccctggagaaggggcgagtcctgcgcgagtccccgggaggcgccgcgcgcttggaagggacggtcgggcttccccggcccgctgagggctcggcggcgggctcccctcctttccacctcgggagggagggaaggaggggagggaaaagtcccacggaggaggcagaatggccagtcgaggggcgcttaggcgctgcctttccccagggctgcctcgactcctgcacctgtcccgagggctggcctgagacgggactcccggttctcccgctgcgaagcagcgcggccccccggggccggggcagcggcgccggcatgtcgtctggcaccatgaagttcaatggctatttgagggtccgcatcggtgaggcagtggggctgcagcccacccgctggtccctgcgccactcgctcttcaagaagggccaccagctgctggacccctatctgacggtgagcgtggaccaggtgcgcgtgggccagaccagcaccaagcagaagaccaacaaacccacgtacaacgaggagttttgcgctaacgtcaccgacggcggccacctcgagttggccgtcttccacgagacgcccctgggctacgaccacttcgtggccaactgcaccctgcagttccaggagctgctgcgcacgaccggcgcctcggacaccttcgagggttgggtgagtagcggtgaccccttccctttgtgtccacccaacccccgttccccttatgtttttcaaaactcacccgggtcccgctttcccatcgctttgtggctgagggaattccctccagactttggtcttcgtccacgtggccgcggcactggtgacgcgaccgcggtgggtgtgtgcaggcgcaggtgtgtctccaggaagccggcctggacacgatcccctttcaggacagcggcttggcctaacgggaagtcgggcaggggtccagggcggtcaccctttccgcccagtctttgggtaaggagctccaactttcagcacgagagtgataggtaggaaaggcagggaaggagtgatacaaaagggacttgatttgggtaaagtgcttcaagcgctact

SEQ ID NO: 12471 - DNA, 2300 bp, Homo sapien
tttttaagtcagtaatctgtagttccacttgcaaccataaatttattatggagtaaattcaattattccacatttaactctctgaataaactacatgtcaatttaaaatactaaagataaataagtatttctttaatcctgaacttcaaaagcacctttgggccagatgcagtggctcacacctgtaatcccagcactttgggaggttgaagtgggaggatggcttgaggccacaagttcaagaccagcctggtcaacaaggtagcaagaccccatctctatttttttaaagcatttttgaacctataaaggatacttttttaaaaaagcatgcattccatatatttccaaatttttttaacaagattttctttaaaaagaaaagaaacaacactctgcccaacctatgttccatatccttacagttctgaaatacccaaaacctttttaaaaaaaacaacaaaaaaaaaatctgccttctgatgcatgcaaacgcatgaaaaactgctggtttcaaggtcatttaaatgctgaccctccctaccaaccactcaacgttttccaaaacaccaccagtgggttatattaaacatctaagtgtaattatttcagaccattataaatatcgatatctgatttacactgaatattcatccagtggaacaataagcagctctgtacatgccacctagtcagataacgtggatcttcctacacttatgacaccaagaagtcctcatcttttggtcttcatgtaggctgcaggttctccacctcgactgcatactggaatcacctggtgagcctaaaagtacggatgatggggtcccacagccagagattcctatctagaatctttaaaagtggggattttttaaaggtccctgggtgattcaagtgggaagattatggttgagaaggacgagtctaggctatctccaggaagagatgcttctcatggccactggccaatctgcaccaccataattcagaacctagttcctctagagctttgcccgacctaactcctaatcagacactaatagaactcaacaattccatctggatgcctacactcacttctatttcatttccagaaattcacaggataaatgtaaatatctaactgtattttagcaattcctctctagtccccacttctaagtaccacaaagtaaattaggctgaagggaaattaactcaatataatttgacgattaaggttagtcattatggtttttgtacttctatttaaaagaaaggaatagctccacaagccatctttaattttagaaaatatacggtaaaattactaattccacaaagtataaaataaatacctaaatgagccttcatcaccatccatctgatttcaccacttgtaaatttcaaacattttcaatactgatattgggttcaaaactgactccctccagaacttaaactattaaactcctgagagtcttcaaatggcgtactccactttgccaaaccagactactttattataattatcattccatcatctcaaagtgggaacgatgacacctgcatcacaaagacagtgtgaggattaggcagtaaaagcatgttagcaccgtgtagagcgctctagaagttttaattgatttacagcagaaattatgcctcctgggaactatgtgaaaagcagaggcaaggggagagctgcgggtagctacacgtcaatacccaggaacacaggctggtgatggggggagggaagacagttaacaacctcctgaggagtccttacagcctcttctcagacccatagcagcagaaacccacactgcaggactcccacctcggactgactaagttacttgcaagtatatgtaaatctcatctccttggaaaaatgctaaataataaaactgccaacgtgcagacccaggcgctcatttccctgccagtgtagctcatgtacctctgggatgtgcaagccgaaacacgtgtgcacgtctgagcggctgaaccaacatgtatccataaacattatgaataatactcgcgagaatgtacggctttctcctaagtagcgcttgaagcactttacccaaatcaagtcccttttgtatcactccttccctgcctttcctacctatcactctcgtgctgaaagttggagctccttacccaaagactgggcggaaagggtgaccgccctggacccctgcccgacttcccgttaggccaagccgctgtcctgaaaggggatcgtgtccaggccggcttcctggagacacacctgcgcctgcacacacccaccgcggtcgcgt

SEQ ID NO: 12472 - DNA, 2300 bp, Homo sapien
gtgtgagtttaagagctgcctcaggagtagtttagagagaatgaatataccagtatggtttttattcccttgattacttaaataagtattaaaggtgtgtgaaaagattagctgaatcctaggttcctcaaacaaaatgttaacttttgtttgggtggtaagagatggatttcaaaatgggaaaaagcgagactgaaaccatcatccagcacacactatgtcaggaatgtattaatgacagcctgcgcttgataagaacaggacaccaacagggggcataaacaagatctaggtacaactgtgaccttgaagtgaccttgagtttaagttgccatttaaactcattttccttaaactgtccttttctggcaaaataagtgactcctgaagttgcctcattagaactccaatatgcatttttctctctgaactgtttctgatgggtgttgactccttctgttgtcatttggtcctataggaccaaacttgtatatgtagaattttattttaaaataggaaaaatcatgattctgaaaaattgtgcctgtcaagatattaaatgactgttcccattaatattattgccattaatattttgaagtcaaattacatagtgacagctctctgcctgaatgatacttacgttaaaaggaagaaactgtctgagagaattggaagagatgataatgaggcctccccaccactttcccttttaagcccctcacctatcacctactcctccatcccctagacttaagtaggttcccttacttttcttctgcttgggccattgtttagaaaggtctgagtcttgggatgagctggcctcctgttcaggcttagccctccacctgctctgcctgggtcccctctgtgttctccctgggccaggccttcccttctgtgttttcatcctctcctgtcctcctgacaccttcatttaattgtaactttttttttttttttccgagacggagtctcactctgtcgcccaggctggagcgcagtggcgcaatctcagctcactgcaagctttgcctcccgggttcacgccattctcctgcctcagcctcccgagtagctgggactacaggcgcccaccaccacgcccggctaattttttgtatttttagtagagacggggtttcaccttgttagccaggatggtctcgatctcctgacctcatgatccacctgcctcggcctcccaaagtgctgggattacaggcgtgagccaccaagcccggccttttttttttttttttttttttttataattaaagttaaggttgcagtgagctgagattgcaccactgtactgcactccagcctgggtctcactctgtcatccaggccagagtgcagtggcgcaatctcagctcactgctaccttaactcctaggctcaagccatcctcttaccccagcctcctgagcagctgggattacaggcatgcgccaccatgcccccagctaattttttaatttttcatagagacagaaaggtcctctaggttgcccaggctggtctccaagtgcggggctcaagcgatcctcttgacttggcctcccaaagtgctgggattataggagtgagccactgtgcctggcgaaaccttcattttaaaaacatacccaaatctttctgagcactcagcctttcagtcctctgttggccttgcccactatccttttgaggtggggcacagtgttttcctttcccttctcagcctcttccctgacagctgtctgcagatgcccttccctgccctgttcatttttcttcccggtgcccatccccaggagactgcgctggcgaagcccaggagtgacagtgtagtcaggtcagttcttctttgtcttgttggctgctaccttcttcagattcattgctcccctgtttctgtgtttttccaatgcttactgatgtgtttttaagtttctttttgtatctttcctcatccctcaacctagtaaatattggtgttccccaggtgggagggggcggggtggggggcgggggtgggtgggaggtggtttgtctttaccttcttttctttgtcatggcgcatggtctcgtcaacttttaagtctcaacaatattgcccatatgccaaggacttccaaagctctgtctcttgtcttcccccctgagcccaactattgcttctggaactggggcaggcttaggacaaaccactttatactccgtctcctttaatcctcacagtagactgtgagagaggaggagtgctgtggcacctgcatttctcacccgaggaaactgtggcttagacaggc

SEQ ID NO: 12473 - DNA, 2300 bp, Homo sapien
gacacgcgcctgcaacacgcatgcgtggtgtgcttctcgtcagccccaggtggccattagggtctatggtcatggcgaggttgggcgtcatggctgtgaaccgcactctattctgtgtcctgtgctctttctctgccctttctccccaggaccctctctagagccattaaatgccttttccccatttaggatcatcgctctggaatattggcaggaaggttctgtggcatagtttccttgccttctaacttgccagcattagctgctaactctctctctgccctttgtttaaggtctgaaattgaatgaatggagaaggtcattttgtttgcccaacagccacatccaaccattaggcagaaaatacagtgttctctggctcctggaagaaaatcttattagactaattgctttatttatataacttgtcctcttcctatgaaatcagacagattttgaaagaggaaaaaaatacttgtggccattacttatattttagtgagtaaagtacatttgggcccagttatttcaagactcataatgacacagcgttaaactctataatctggaacatccaacaactcaaaactgaagctgcctcctgtgtgcccacaagatgtgataagcaccatacctgacaccagatttgcaaagaagctgctccactgcacccatcttgctgcatttagtttctctgtcctattgttaatgcagatatagttgcacattaaaacctattgtttgtaggccgggcgtggtggctcacacctgtaatcccagcactttgggaggccgaggcaggcggatcacttgaggtcaggagttcaaaaccaggctggccaacatggtgaaaccccgtctctactaaaaatacaaaaattagtcgggcgtggtggtgcacacctgtaatcccagctactcgggaggctgaggaaggagaattgcttgaacctgggagggggaggttgcagtgagccaaaattgtgcaccattgcactccagcctagacagcaagagcgagactccatatcaaaaaaaaacaaaacaaacaaaaaactattgtttgtattctcgttttaagattgtcttagaaaaggttttctgtcaggaaaaaaaaaaaaaaagttttccaaatagggtttggtggtatgtgcctataatcccagctactcaggaggctgaggcaggaggatcacttgagcttaagagtttgagaccagcctgaacaacataggaagatcttatctcagaaattaaaaaaaagcaagaaaaaggaacattattttccaaagaccattcctcccactgcactactggagcctaggacagtgaaggcagaaagagatcttgttctctcttacctggctgtagaggaacagggagagccagatgagcctcagggtcaaggctgacctcagagtgtagtctctcagcagctttctatctgtgcccctgccttttagtagaacaggatggacttacaagtttggcatttgggtcccattagggacataagcaaataatggaagtattctgcaaaagaattatgctgccactgttcacagcggtgggaacagagtgtttagggacagtctattcgagcctaggacggcaacaagatgttcactaatactatcatttcttgagggctttctttatgccaggcgctttacgttaattctctcattgactcatcataactttttaaaatataggaaaatcttcatgttagagttgagaaatctaaggctcagagaagttaagaaatttgtccacagtcacacagtaactcagtggtgaaagaatgatacaaacacaagcagtgacactgcagagcctgaccagccctccatgtcagagaagctgttagttctttcagccttccctggcttgcaggaggcctcccaggacattcctatacaaacttggcccaaatcctttacatgtccccttagaactagcgtcaggagggagcatgcctgcttgctttcccctgcagccacacctcctctgtagtctgggaaaaaaactgttaagtgtctcattctcggggccaggtgtgcctctgattccttgagtatcctctagttcagttccactgtaatgagggccacagcaggaaggggaacataaaatgagtccctgagttcttgacccttctctttcccctgctctccagtcagtttgagacttacacttggggtagaatccagattttccaccctggtcccctcactcactctgtgcagcttataaagtgcttttcttggccctagaaaacattctgcttcctttagtaa

SEQ ID NO: 12474 - DNA, 2300 bp, Homo sapien
agaggcacaaacaagcccgttgatttagatctatcgaggaattggggtaggggcaggggtggcagttttgctaagaagaaaagcaggtgaaagtgggagattccaaaagagaccagagagaaggcagtgtgtcctgcccaatctgccgctagggtcagagaccagctccctagtcacactcggccaaggcaggctgccgggctgactccaactctaaacaaagccaggcagccgcccaggtgggtgaaggctgcagattgcgctcaggcgtgacgccggggtgcaggtgggagcgacgcccgggtgcgtgggtgcagcgctcgcccgcccgcggttaggcgcaccgcgggaaccggtcaggtgcgccgtgtggggcggggcggaggcagggcgtgcgcccccaggctggtgcctggggcagaggattcgcctgcttgacgcgctgatgccttgatttggtctgacaagtggaggctgctttgagaagcggcctgtatttttgacattcaggaagctagaaataaccagctgggctcctggcgctctggccgcaaatgtcttgcgctttccaggcaactgccagattgaaggggcttttccccaatgtagacctgtgctctgtgtgctaggaggccgaggttccagtccaggctcggcttctgactccctactttaggaggaatcactgaattgactgcagctcggcttctgctctgtaaaatggggctgttgctagctgagcctcttctgcctctggtagaaaatgattccaagtggctgccctgtccaccctaatcccatggcccgaacttgatgtctgctgcttctagaagcctagtgctccaaatatctgctctgggagggacttgcagatgatcctgattggaaatgaggctgattaaccttttgtgtatcattgactctaggacaatctgttgaaacctaggggctcttaccctagacaaattaacacaccagccagatacagcttacaagggcagagagttgctggtttgaaccacagacccctggtttaacatctgtaatctagtcaacccctcctctttcttgaaggctgaaccaaacacgaagggttttccccaccttccaatcctcatacatgcagacacccccttttcctgctttctccttcagtcatcttcctcaccatcccccatgcttgggcactctcaggagggaaattgtcctataaatatctgtaaaaggcatggtatgtcctgtagcagagaaagcaaaaaataaaaatataattcctccacccctggcatggcacgtgcagagctctgcctgatccttctctcccacaagcctcgggggtgggtaaacaaaagtgagaggtgaagctgctgcagcgaagtaccccttcaaaatcttcagtacccttcagagccagcgctgtcatcactatcacataaactgtacaactccaacgtcaaccagcagccgcctggctggcagcaggaagagccaatgcaattttgcacagtggcttgcttgcccaaggtattgcctggcaaatgggcttcttgtgcaatggggaaccacagggaggggcctcttaaatgtacctcaaagaaacagctctaacaatggatgattcaacaggctagtaattggcgctcactcttaccacattgttttgataaaacgacatagcccaactggggatatgaaggcagtaagtagaaaagctaacctcttgctactcaaattgtggctgagaaccagcgacatcccatcaccagaagctttatagaaaagccaggctctgtcccagacctattgaaaggagatctgcattttaacatgattgcgagaggatccacatcttaaagtttcagaggcctaatccaaagtcttctgataatgatcattagagtcccagccacccccgacttccccctgggaaaaccacaacaaatagaacaaattcctccaagctctgctcataagaagaacccacaacccacagacaccccctcactcaactagagacctcacccacctgtttgcagagtcacccaccttgggctacttcttttctactatttaatcttctgggaaaacagaggtcttctatttggagataaaaatgacaaaggagaacctcctgaacagcatccagtttgcttttagctttagccatctctctgacctcagtgctgctggactcagttccaagatctaactgtcaaatgctttaggggaaacgggaagagaagtccctggagtaacccatgtgcgcagcctggcactgttttcacttgcctttggaaatg

SEQ ID NO: 12475 - DNA, 2300 bp, Homo sapien
aagctcttgtaatattcttgtagaacatcctattcttttgcttcagggcctttatcacaattgataattatatacttacttttacttattgaattaattcccagtctctctcagtagattacatgcagtgtctgtttcacttgccattgtatctctaatgcctactacaagtgcctggcatgtagcagacacaactgcttgtgaatgaatgaatggtctcagtgattctgtaaggatgaaggtgatgtagagtagtagatggcagctctactctggaagtccagaatactgctctgattcacacctgcaagccttattggtcaatgactactgatattccagccacccaaacaactgctttcggagaagcattaatacctgcgaataaaacaaatctattcgtttcatacatttggttcagaacactaggagaatttgagaagagacgagccagccccaagctgtccttgtttcttttattaagaataggccatgatttgagcacattctactacttgcctcacttcagcctattgatgggggaaaagtgagagtctgtgtgtggggactctggcttggcagtgagatctaacacagaaagatcctgaagaaatatgctgacaatggggttttatctcttcaatgcactggagacaaaatccctgcttttaaaaacaacactcatacagagccaaggatgtcccagagtgaacagtcctaaccctttctcagcctgcctaagagctcgttggtttcagaaggatgagccaaggactgctacttagagactactgtctaggtcaacccaactggcataagtaaagcacctactgtttatagtaggaggctgcaagataacaggagatgcagactattgaaggctactgatctatctgtgtagacaggcaagaataaaacaactggagaagaaatccaggattacacaaaaagaagagcgtgatggtatggtagactactccagaacagtgaatttcccctgcattaaggatgagatccctatgaattgggatcattcaggaagtcttcttggagaagaaaagtttgagcatatggggaaaaaaagttggattggcaaagagctgagctgtcagtagctgggtccttagtaagtaggctgcatggagctgggagttatgctaaaggagttgtaatttgggatgcctctaattaaccattttgggaaaaatataataaatccctttgtagcatctataataaactgcccaatatctatgtggtggggaaaaagttttattctacgtttcacgtggatggtgataacactaggtaatctcagcatctttcttattctcttgctaatccaggattctaagtaataatcactttgttctacaacctgaatctagcccttgtactgtgcagtttttttctacacttatttttcctgttgtctgaatcaatctccatggaagcataagttttactgagtttcaaccagctgtgtccaccgaggtaaagatggtaaaaataaaaggcacagggcatatataccacagcagcagttacttcccacaaggaaccagagattggaagtgaagctaaaacattttcagctacgatagcatctctttcaaggtgagccatttccccagggagagtttccagctcttagcaaaggcagaacaataaaacatcaaggatgtctttctaaggctgcaaacagaatagccaataccttgaagctgatctgcttcagagtcctttaaaagccaggacagcaacaaagtgcccacattacattttctacaagcttgctaagcatctcttttcctaaaccacaaaacccgagacatttctacagaacaggcagaaagggaagtcctgggagatcagggccctgtctcagcaggcatcactccagcctgtcttttcccgagtggttttctgcacttctcttccatcttttcccctctgtcccacactggaagtcactagtctgtgccctccttacctcccatggtttctgcaccttcatttccaaaggcaagtgaaaacagtgccaggctgcgcacatgggttactccagggacttctcttcccgtttcccctaaagcatttgacagttagatcttggaactgagtccagcagcactgaggtcagagagatggctaaagctaaaagcaaactggatgctgttcaggaggttctcctttgtcatttttatctccaaatagaagacctctgttttcccagaagattaaatagtagaaaagaagtagcccaaggtgggtgactctgcaaacaggtgggtgaggtc

SEQ ID NO: 12476 - DNA, 2300 bp, Homo sapien
atgataggccaggcactgtggctcatgcctgtaatcccagcactttgggaacccgaggcgagcggaccacctgaggtcaggagttcgagagcagcctggccaacatggtgaaacctcgtctctactaaaaatagaaaaattatccgagtgtggtggtgcgtgcctgtaatcccagctacttgggaggctgaggcaggagaatcacttgtacctgggaggcggagttgcagtgagccgaaatcgcgccactgcgctccagcctgtgggccagagcgagactccgcctcagaataataataatgataataataataacgccaccaacaatactaagagctaacatttactgagtgcttactatgcaccagatattgttctaagtatacatttattatctcatttaaccatccataatactgtggtatagacacttttatatccattttataaataagtaaactgagttatggagagattaaacgacttgccagtaagattcaaagcctgtgtacaagctcacgcttgattctggagccagtgttcttaacacagtatcttgagaatgttaaactaaaaagtttttaatttacagtattctttccacaattaaaaaagaaattatgagtaattatttttagttctttcttctcttcaggcatttcccatggttcttttcaagacataatacatatcatttagtgttgtagatctgaaaaaacaaaagtagcgtgaagatcaaaaattttctaaagagacggagtctcgctacgttccctaggctggaacacccaggcttctccagcctcacacctctgagtagctggaaccaccctgtccgctaaggtcaatgtttaatcgtatctttgtaggtctactgaccagttaaaaagaggtgctgtatacattggttgttgtcttgtcagagtttgatgcttctatatagaccattgtttttacatgctaatacaattgaaagccactacagatatttatatttacaacccaaagctaggttttaacaagaaactcataaggcaaaggtgagaagtaaaataatttagcgccaagtggagatatatgtgcaatgctactttgttgggctcaaaacatatttttcttttagaagactgacaggcttgaagtttatgcctccaaagacaaaagtgattatgttttgtttagtagcttgcaaagttgccaaaggccattttttctactctttccctgaaattggtttatatgcttattaaagtcatttatacctatttgcaaatgcttaacatagtttcagattttaagatttccctgcaactttatttcccttgaagtttacagcaacaggagttcatttttatttttaattgcatttattcagtaagtaaactccgccacagaaaaacttagtagacaaggtgagttcccctgtgctccgtggcaaagagtgcggtgggtgacattgacccatggttaggtaatctggtaaggaaagaccccgttgtaacacatctgagcaacgagaccaaaggaagggcttgctgccacgaggcgaagtctgcttttttgaacagagagcccagcagagttgggcggcaatcgtgcccagcactgaggccgaggagaaagagagcaggagcattacattactgcaccaagagtaggaaaatatgatgcatgtttgggaccaggcaaccgaaatcccttctcagcagcgcctcccaaagccgggcaccgccttccttcggagaaggcgcagagtccccagactcgggctgagccgcacccccatctcctttctctttcctccgccgctaaacacagacgagcacgtgagcgtcgcagcccgtcccagctgtgcctcagctgaccgcctcctgattggctgagagcggcgtgggctggggtggggacttgccgcctgcgtcgctcgccattggatctcgaggaacccgcctccacctcaggtgaggcgggcttgcgggagcgcgcgccggcctgggcaggcgagcgggcgcgctcccgccccctctcccctccccgcgcgcccgagcgcgcctccgcccttgcccgccccctgacgctgcctcagctcctcagtgcacagtgctgcctcgtctgaggggacaggaggatcaccctcttcgtcgcttcggccagtgtgtcgggctgggccctgacaagccacctgaggagaggctcggagccgggcccggaccccggcgattgccgcccgcttctctctagtctcacgaggggtttcccgcctcgcacccccacctctggacttgcctttccttctcttc

SEQ ID NO: 12477 - DNA, 2300 bp, Homo sapien
tgaaccatttcccaaatggttcccccactctatcatgggggaaataatgcattttggctcactgcaacctctgcctcccaggttcaagtggttctcctgccccagcctcccaagtagctgggattacaggcacacgccactacgcctagctaatttttgtgtttttattagagacggggtttcactattttggtcacgctggtctcgaactcttgacctggtgatccacccacctcagcctcccaaattgctgggattacaggcgtgagccactgcgcccagccagttgcaataccattttcataaaactcaaaaccaaccacaactaaaaaatataccgtttaaatatacatacatatgtgataaaatatatacatgagaaagagaaacaaaattcaaggtagttatttatttattttttgagattcggtctcactccgtagcccaggatggagtgcagtggcacgatctcggctcaccactgcaacctctgtctcctgtaaccaccatctcccaggctcaaatgatcctcccacctcagcctcccgagtagctgggactacaggtgtgcaccaccatgcccggctaattttcaccatgtttcccaggctggtctccaactcttgtgcttaagcaatcctcttgcttttgtctcccaaagtgttgggatttcaggcgtgagccaccgtgcccaaccagtagctgtgattaaagtagggtacagtcaaaggaataggtcagaggaggaaatcgcagattgatgtgaaggcgttggtaatgttctggttcctacacaggtgaaaggtgtacaggtgtttaactgctatgctttttatctcacacatcgcataaatttttctgtgacataaaatattacataacatttaaaaaacaggtcaagagggcagggtgcagtggctcacgtctgtaatcccaacactttgggaggccgaggggagcggatcacctgaggttagcagttcgagaccagcctggccaacatggtgaaaccctgtctctactaaaaatacaaacaaaacaaaacaaaacaaaatccggttggagtggtgcatgcctgtaatcccagctactcgggaggctgaggcaggagaatcgcttgaactcgggaggcggaagttgcagtgaaccgagaccgcgccactgaactccggcctgggcaacaagagcgaaactccgtctcaaaacaaaaaacaaacaaatccaaacaaacaaacaaacaaacaaaaacaggtcaaggatcagaaaagtaaagtgagttgacactccatttacacacagaaagcccaatgtttttctattatatcaggatacctcttctaaagaatgatagcttacctttcaatcagagaaatgatctaaagttcaaaatgttactccatagctagctcctggaggaaggaagctaggtggcagcgtgtacacaaaaaggcaattcatccaaataataatataacaagaatataacaagtaggtattttctgctaagtgctatgtagcacaggggtgaatgcgtggcagggcaggaggagggctgtttacaagagggtatgaaatgcagctcttcttttcaagagtggttgcagaatgccagggctacaaagagagggccgcacattaagcatcgtattatgtgggtacagagtattagggttctcgatgaccagaaggagaatgagtgcagtttgtttcctagcaagccttctttagcttctcttcccaagtgggagtggggttggggttgggactgttctttcctagctcaaaagttcacttatgtcacactagggtcagtttaaaggagagtgctagtaagggtaaagtcaagttacataacctagcggaaaatgaagacctaaaaccgctcgtgagcaaacacaacactttagacgtaaacctcttccaaagaagggtggatctcagcactctgggtgaaagcaatctcagccagtaaaacatcagaacgctttcacgcacgcgcagtaagcacacgaccggtggcaagagcccggataaaggcggagctaaaggtgccggataatgcatcacggagcgcgtgtgcgcacgccgtagggggcgggccgttcgggcttggtttcctgggcgaccaccgctggctagtccgttagaggcgtgcgggcttcggaggcgtgcgggcttcgggtgccatggggactcctcccggcctgcagaccgactgcgaggcgctgctcagccgcttccaggagacggacagtgtacgcttcgaggacttcacggagctctggagaaacatgaagttc

SEQ ID NO: 12478 - DNA, 2300 bp, Homo sapien
ctatgcagggaacttatgtgataacattgtttaacatctttttaacagttctggatagaatttatccatcaacttaaccaatttactgagtacataatatatgctaggtgttgttttttgcatgatttttaataggatttgttattgagaattcactatgtgctcagcacacttctaggcaatggggataaaatagagaactaaacagacaatccctgccatccagggagcctccattctagagcaggagacaggtgtaaacctcatataaaatcaggttatggtgagcaaacagaatgaattgagtctgggtaagaagagcatatgaagcgaactaggtatgtagtatgtgagggaactagggtgtggggaatgagataactgtacaaaatatgatgaaagagaatctttggagaccaaaagctaacggagtttggaatggaagaaggtagtgttgaagagagaaattcacaatcccccatgttgtgagtctagagtgatgaacgcttgtagcaaagtgatacactaggtttggatgagctgaatttgagattttagtgagacatccaagtctatcagtatttctcaaacttccgtgggtgtcagactcacctggagtacttgccaaaaatcccaaggttcagactaggcccttttccttcaaccagcctgggcctttgtgttctttattagctcactaggtgtttctgacacaccagagtttgagaatcattggctttgacagccacagatacaagcctggaaagaaaaattgagcaaaggctggagatgtatattttggagtttcaaaaaggtgttaattgaaatgtagggatgggcctactcttgcagctggtgaatataacagggaagggaagccataggacaagttttggttgtatacatgtaggtggtgggaagacaaggaggagcctgaaagagcgacacatgaattattcagcataggggggaaatgtggagaactcagttcccctgtaactgaaatgtgggctgtatggaggcaaagccctcaggattaccttatccctggcattgtgccagcatttaatagataatcaatatttgtttattgaataagtcaatgcatccatgaatggctaataaaaaatttttagaatgtaagtagtcatatcacatgcagtggctgaggtcaagagactaagggatagctagtagatttagttaaaaggaagttattgctatacaagatattgggtaattaagtttaagcagtgtgttaggccctctagtcatttgtaacgttcatcttgagctgttgatgaacactgtaatagcaataagatatatacacacataatatacacacatatgtgtatgtatacattgtatgcacatatacatgtaaaagtataaatatttagctctggggtcttcatagtgtcctgtggttctgttgatatcctggagctgcttccttcaggctgtaaatcttgtgggatgaagtgtgatttaggagtctgaaagattgtggagagctatctatcttcgggaggttggaacatagacaaaagcaatgagattccagggacatgtcttcagtaagctagataatccatttgccaccctcagtttttcagcgattgctccccaagaatagatatgatttctagagattgcataaaaatataaaatcctattttaagatttgtttaaagctttttaattccagacacatacttcctttgcaagtataaactttagtgtcataaagcagagatgcttattagtcagctctttgggatctgcaggtttgtagatgaaacatctgaccttttttgcgttttgaaatgtcatgcccaattggatcttaatgaagattcatttatccttttcacactgttaaggatggtctatggggatagacttctctcagtccacgtgaacagaacccattactgctaatggaagttttccacatggctatggaggtgaataggcattgaaataatctacatctagactttcacagtcatttttatgtaactattttaagattttcctgatgatccctttttgtgcccaaatgctgtttgacatcgtctgtaggtatctggtgatgggtctgaggttgtaactttaacaggtgtaagtatttctttcctctgtttcagctggaagttttgagagtgaaatattcacagccattaagagacctccaaattaatttctcaacatgcttattctatagttcacattcaatccagagcactgaaggaactgaacaactggacactgtagacatcagatagctggccatg

SEQ ID NO: 12479 - DNA, 2300 bp, Homo sapien
aaacctacctgggttttgacaatttgacacaagtattctcatcttaaggaaaagcccaggatattggagctcaaggaatcatttattttgtctcagcaggaaactggtcgtgcagtgtgactacctgttaggctgatggattttcgagctctgctcttctctgctggcgaaggcctttggctttttcctgcagacccagggcttggcaggaaagacaatgggagtgtggctggtgattttgagcacacagggagacaggtgtcccacttttcatctctgctttccactgattaattggttggccttgagaagttaattaaaatctgccaaatggggataagaatgaagagatttttaccttgcaggaaggtcagatggattagtggtattaacagtacccaagtgaggagctccttcagttgcctggtgagaggtaaagtgtgttgaaataattaattgctatgaaaataccagcattcacaaatctttttctcaaatcaacccagggaggggctacaaagcccagttttcatgggccacagcttgaattggcctatccaaagcccagccattggcaggatctgtttattcagaggagttcttaggacagtcaggagctctacccaggactctcttagaaacctgcaggtggagtgagcatttatccgaagagacagcctgatacataagtggagagagctcctcattcactaaaatatttttaccttggcattgaagttgacaaaactaagagctattaactaacattaagagcaggggcctcaaaggatgtgaaaaccacagagagtgtgattccaacccccaccttccgtcttctcccccttcatcttgtgcgcttgctctctctctctctctctctagtgctctctcgctctctctctctctctctatatatatatatataaacacacacacacacacacacacacatatgtctatatgtagaaatagttatgcctaaaggtttggggaagaagaaaggagactgtatgtttcaaaataaggtttgaaattttgagtattggatacgagttaaggcaggcctgggactcaaactgccagggcatgagtcctggataatcttgtctgggaatttgatctgggcttggggggagagagcgtgttagttatttagtctttctaagcttgagtttcgtcctccataaaatgaagatattaaaatacctacctcattgcattgatgtaaatattcaaaaagataatgtttcttagttgggttcctcaaaaaagcagagcctacgtaaaggctttgttccctgctttgggagtgcaaccccagggaacaaaagtgcgagacaagggaagtaaggcagggaagaagggaggtcaagtgtgagaatacacagttgaattggccaccactcagtatggctaattgcctgatcttgtgtgatcacactccaagaagctgtatgaactgataggacaactgactacggggcaaaaagtagacttcacatatattggtgtcaagcagggttctgcagctgtctaagccttggcggtcgacagagagaccaatgataagaaatgagaattatattgtgtgggtagaaggtaagactttattgagtagttccaggctgaaactacttagagcccatataggctgtgccttaggggaagatggaacatgagttaaggccaagaagatctgaagtgtttaagagccaatttttatagtctgtaaaggatttgatatggtatttggcataagaaatagtttagtagatgttagctattattacttatggtcagaaatgcaatacagagatgatcaagagtaggctaaaatagatgggagttttaggaagagacaagggagtttgagagaagattctgacttgatttttgagttggcctaaatccttggagacttgcttctaatatatatacactagtcagttgtattcaaaagtctctatagcaaccacttttatcacttgaaactaagtacctctgaatagaaacactcacgcatgattgcatgctcacaggaaaggatataagaagcttcacttattttacaagaaatctaaattttcttgcaggctaatttgaatcttaaaagaaaaggatatttattagatgtctactgtctgtcaagtcctctactttttacaacatccctacacagaaggtaccatctccattttacagttgaggaaaatagaacatggaaaggattaaatgacttgcccagtgtcatagagctagtaagtggtaggcctgggcttcctaaggaaatacgaacccag

SEQ ID NO: 12480 - DNA, 2300 bp, Homo sapien
caggcagggtggattcatctattcccaggcgttcttggttacctttgatgtaccaggcactgtgtgctagacagttgggacacagtgttaaccaggtgaactagcttaaaatctggtgtaatgaatattgtgaaataggattggtagggtgaattgggaacataattagggggctaatgtagtcggtgggaggctgtcaggggaagctgctatgaggaagtggtatttaagctgagacgtgaaagctgagtaggagtaagccaggtaaaagggaggcacattaagaaagaagaaacagcatgtacaaaataccttaggcaagtgagacccttccctattcaaggaaactgaaaaaagtccagcgtgactggaccttaaagagcaaggaggagagtgttttgagatgagctggacaagaagacaaggctcattgagatatcagctgcatcttgcccttattccaacgaagaaggaagcagcagtggtgtacttctggctaggaccatctcctggatgtgaagtgtacccgtctcaaagccccctgtcatacccgatagctgaaactttatcatcagatcttcaacccactgtggcttattattacttcttcagacagttcgattttaggttaccagctttttaaatcttagggctaacaaactgttagctttgccacaggctttcagtaggtgctgagagagcaagcagggggccctgagagtggtggggccgctggtgtagccccttcagcctcacagagtgccagccaccagaggaatcaacataacactgcacagcagccctgccctggctccaaagacagcaacttttctttctaattgattcccagtcgtgttctcttccttccaggccctggcatgactctacagggaaccagggaagtgatgtgtctcttcttcagtgcgattctctctccgaagatagctttgggtaacatttctctagtagatttttcatcttcccttctttaatttggcttactggctacccaaattgcccactttgatgttctaatcatcccccatccccaagaaaacagccctatttaacaacaacaacaaaagcaatgtaaaacatgaaaacatagcttgagatatgagaaattatgcaatcatttggggaaatgtatactaatgtgtacatgtacactaaagtgtactaaagtgctaaatcatgcacacctctagtctcctttgtgaaaaatacctttgcttttgtgcattttcatgttaaagaagtttacatgttggcctgaggttttaagtagctgttggaccaaaatgaggactttctaattgtgtgaaggacgtgttttagagcacaagaacttttttttttttttttttttttttttaaatctgaggccccctgccagtaggcagccacagacaacgccaaaaggaattagactctgggctgatttttatggattagttaacatatccctcctcagaatctatcaagtgctcaaacctgcagacacaaacacgaacacactagggaggagagtcccagaaggcggaagatcccgtactgctcatccccaaacgcctcaccccgggtcacacccacgaactcatccggttctcccttctcagggtcctactccaaggcgaagagtatcccagaggaagggtcagggtcttaaaaaaaaaacaaaaaaaaaaaacactgagccaaaccccgctgcttcctcagccgctgaaagtgccgccccacccctctccccaaacccgacctccgtaggggacaccgagccaaggcctgcagcgagtgacctgcccggggaggcgcgggaccgaggctcacctacccgggcccgcgagtctcgcccagccccagcctcccaacccactctgccggccccaacttaggcgagcgcagtcgggacccttctgtcggggctctttgttcgccgcccctcggcgttccagctctcaaccttgctcccagcagcccccgccggcgcactcgacctacaggaaagttgctcccgagctgtggaggggcgtcatcgcctcctagcaacgctcctagcaaccgggtaacatctgctccctgtggtccaatgcgagctgagaacagctgcgcgcccgcctagcgctgcgaacccggagtgagaggcgcttcagagactggagggacggacctgcaggagccagggctgcccgccgagctgcagttgccgctactgccgctgtcagcgcccgactgaagagtgacagccgcaaaagcaggagtgagcaccgaaccccgcgcttctacctaacaggtgcatg

SEQ ID NO: 12481 - DNA, 2300 bp, Homo sapien
aaagggtaggcaggtaaaatttgtttttaatgagttgatactttttagaaaccttatctgcaaaaattaatgagaacaacaaattccacatgatgttatttcttcatctagctaagagtacatttaaggctgcctggatgaaactttgcactgatttttgtataatagttgatcattcactatttgacaaattgtttcagaatgcctttggtggtgaagtttagataagtccctatgttttgcaattttacagataattatttaacaagttggatagattcatgaaattgtttgaagtggttcatactgttctttcaggtttgagtgagatgtcagatttcagtgtctgaagttttgtcctatggagcatatcatttaaagaattgtcattaactgataaaacagattggaaaaactaggtgccaaaggtgtatttaagaaaataccaaagactcaaagatgagtgttaggaagactatgataatgaagataagaatctaaagtaaggattgcataggacatagaagaacattgttaaaggggtttggaatgatttgcttactaatgtactttcagaacactttatacataataatggtaatcaagggcactgctttaaatgaagatactacagacctttaggaatcatatgccttggaaaacaatctatgtatggtgacttgtcaacaaagtatcttccctagttggatgccaacttgtaaccaagaagactttcttctattcaagagaaatttggttttagttttgatttaatacttggtccctctaattaatcactggggtgattaacatgaattctgttggtataaagagtattggttccctaattagcctgcattgttgaagaccacatagatgtattactgataagactatgaggctcatgtttaattactcaatcaaaattaggaagaaatgctttggaagaaactaaaaaattacaatttaggttaatttttaaaggcaatttagtatacatgatgagctagctttgaaatacagatttaaatgtttaaaaattaatttgagggcaagatttggtaccaaagtttcaaaaattttatttcactgcttataaaatactttatcagaacacttattttaaaaaataacatcttatttgaaaaactccaaatttgatgggatagttacaccatcatacaattttaaaggtagaattagctttctaatactttaaaatattttctgaaatgaacatttcacttggtttaggaccgtgtctgtaagtaaaagacaccaatgctaatagatatgacttacaaaaatgccacatatcgaaattgattgaggattgaaatatatatactttggcattgagaagagaggaagagaaaaaaataaaaaaagtgtgacattgtaatatttattgtatttaataaatcttgaagaaagaactcttgagcaatgaaccagtgacagatataaaagcctgttttatttgatgacatcattaactgagttttctcatctatacattcatacatcgagaaggaactgtcttaaaaaccagtgtttctttttttttttaagttctagcgtacatgtgcagaatgtgcaggtttgttatataggtatacacgtgccatggtggtttgctgcacccatcaacctgtcatctacattaggtatttctcctaatgctatccctccccagtgatatttgttaatatgcttttttaaaaaagtgtctgccttgaaactggtaattaaaaaatatctcctagggcatttaattatttttcccaataaacaactcatagataacgggttgactaatgttatctttatttagaaaatttgtatgtaaactgtgtaaacttgtctgagttaaccaatagactaccggggttttagcatggtaaactgatatacagggagacccaaatacaggcttgctttgctgactacccagcgtgctttattacaggagatgcaaaaggtggaagaccagttacacctttttttttttttttttaaaacctggacatcctttctctggtgacaagagccatccttatggtaaggaaggtgagatagaaaatggagaacctttggtaatgttgatctttcttgtgggtgtccacctagcctaaaagccaagtgaagaagaacataaaaaagcagaagaggaaaaatgaagaaaagaggaaaaagagggtggggccagagaaataaagagtaggattagtaagtgaaagaaaaagttgctttgttgtgtggggggggtgttcttgcttgctatactcaattttgctttc

SEQ ID NO: 12482 - DNA, 2300 bp, Homo sapien
ggctggatcctggttttgcatttagctgcttcaagcagtaggcttacccagttggggagaggagagaaagggagagagaggtggggggagagagagaggtgggaagagagagaaaggggagagagaaggggagagagagagggaggggaggggaggggaggggaggggaggggaggcaaggagggagagagagagagacagagacagacagagagagagagatcctgtcttgaggtcagtgattagtaatctagggggttccaaaaggggacaggtgctgagatgtgtacttccacccctgcctggggattctccctgcttctggtaatctgaccttgataatttctaacgcaattacctctcctctagcacattctgaccccagcaaaaggggacgcacccatccaactatcttttcgccttcaacactgaagacttcgctctaccaccaaccgctgacgccgcggcagtgcacttttggtcccccactctttgaccctgtttgcacaatcgtcctttctcgacaggcccaggtgcagcccccagagaaaagaggaagccttacatgtatcatatttacctggagggcttgtttaaacagatgagtcaacccaatcctcagagttcctggttccctaactctggggtagaatccactaatttgcattataaacaagttcttaggtggtgcagatgcggatgctgcccgtccaggccactttgagaaccactgccttagatcaaggaaggtgcctcagtgcgggctcctctttcctttccatctctctccacccctttcgcatttatgccattttcctttctctgtgacacattcaggcttttggactgtttgtaacggtgccgctgctgtccgttctcaacgcctggaaattggggggtttgttagaggtgattcgtgccctgctccaccctggcgcatcttcgcccccacagcctttaccgtttttccatcgctaacactgccctcctcactccccctctctcgggtgtgaattattcaccctcttcccctactcttcacatcaagtgcaacctttcccgcaactttgcagcggtggcgggctcgcggatcgcctcctgcgctcagcggtcctgggggaaactcccctgggcggccgcacgctcccccagacgccaagcccggcccgggtcgcaggggccattccgggcgccggctgtgcgctcggacttcagggctcgcgctcccgctccggggtggggtaagggcggtgcggaaagcgccagtgttcaggaaggtttcaggcgccggagcccggaggggggcggtagcagcgtcaggtggctgctctgcgtccccgcgcgccgcccagccagtccctgccctgctctcagcctcggctggggctggagctggagcctgcccgcacctccgccccgggagccgcgtccgcgccagcagcccggattcgggacccgagcgggagacgccgagatgtgagcctccgactggccactgctctctctggcaccctcttctcccattccaccggcccgattggacagcgatcgcttgcctcgatctccggggagaggagcaaccaccaggcgcacagcccagaagttgggctacgctgttcagcccggagctcgctgcgcgagggggtggacgaggagaccgggagacgaaggcgcggggaaggggtctcggtctgagctgagggggattgggagggtgggggcttgagttcccgcttgcgctccccagcagggggagagatgcagagcccgcgcccaggcgccggccgccgcggtagcagcctcagcagcagcctcagcatcagcaccggcgggacagcgacagcgggggcggcgcaggcgcactgtgccccgcggagcctgcagttcccgagccccgtgtgcggcaccgccacagtctgggcagcggcggccgggggagcgctactaccatgaactgcctggtcctcctccccagagctgctcatccgggtcgggctggagacacagtcaggggaccccgtcgccgccgccgcgccccctcttctttcggctcaatcttctcttccaccttttcctcctcttcctccaccttctttgcctgcatccccccctcccccgccgcggatcctggccgctgctctccagacccaggatgccggggggcaagagagggctggtggcaccgcagaacacatttttggagaacatcgtcaggcgctccagtggtaaggagagttgtagttcagaacacccccacctccatcccgcccacacgcgccccccatcctccccatcccatc

SEQ ID NO: 12483 - DNA, 2300 bp, Homo sapien
tggacctggggagtaagggaaggataattgttaaactgataattgttaaatttctggccctgggtagaagatggtgcaatttttgagataaagaacactggagaaaaagcaaactggggtagcatatgatacaagaattccacatgcatgtttatagtggcacaatttgcaattgcaaaaatgtagaaccagcctaaatgcctatccatcaacaagtggataagcatggaatactactcagccataaaaaggaacaaaataagggcattcgtagcaacctggatggagttagagaccattattctaagtgaagtaactcaggaatggaaaaccaaacatcctgtgttgtcacttataagtgggagttaagctatgaggacacaaaggcataagaatgatacagtggactttgggaactcggggtgggggggggaagtgggagggggtgagggatgaaagactacacattgggtacagtgtacactggtcaagtgatgagtgcaccaaaatgtcagaaatcaccactgaagaacttttctatgcaaccaaacaccacctgttcccctaaaactatccaaataaagataaataaatagaaaaaaagagaaaaaagatacaagaatttggttttgaaaatgttaagtatgagataactgtgagactttcaagtgaaaattttaagaaggaaagtggaggtgcaagcctggatcttttaaaaataagaagcctatcaggagataaagaatttaaattatctaatactgaatcagtgttaacagatttgtgatttgtagtccagctttctgtgcctgacaactaaatacatgcgattgcgagatgtatgcttatgaagtctttcaccagagctttagccataaaaaggagcaaagttaacagagaattgagcctgtgctctaggtctcatgttgggcattgaataatgtgaactaacctgcatctacatgtcacagacactcctattgacaaaactctcaaagtacatcccaaattctacttattttgctcatcttcacagctacagtcctaatccaggccactataatattttatctggaccaatgccatagacttttagtgtctcttggcagagatgccaaataaacagttggatgtatggttttggggtcaggagagaatctggggttacagttctaaatttagagtcattagaatgagaggggagttagcaggaatcagggcagtattccaagaaggggaggaatgtacaaaagcatagaagcatgagatagtgttggtctggagaactacaagatgaaaaaagaaaccagtattagttaagtataattagtcactgaaataaacacttataatagagaagacaaggaatctgcctaaggtgacacgattaggtctttaaaaataatacagtagattgttatttaatcaacgtggcttaaaatatatatgggttgggctagtagttgggagtggatgagagagattaatacttagaaaaaaggctgattcagaggcaactatatgatcagtcttacatgctacacagagtttttagattttatgttgtaacttcatttgcttgcacaaatgtcagaagaagcttgagtgatgatgagagaaacaaaataattcaaatccaacaaataacgattaagaacctattatgtacactctggatgatacaaagggctgtggcctttgagatgattatctggttggggaaatgagacactccaactaataactacagtacaaggtggaatgtgaagccagtggaatttaaagtcaggatacgtggaaagttaagatgttccaaagaagggtgggtgaagaatgaaaggcacaaagaaagcttttgtgaatatgtgagtttgttttctgtgcaaaagaaggggaaaggactgaaattgtcaggagagggtgtggtggaatcagaaagagatgaagactgaatttttttttttttttgagacgtagtctcgctctgtcccccaggctggagtgcagtggcgcgatctcagctcactgcaagctccgcctcctgggttcacgccattctcctgcgtcagcctcccgagtgtctgggtctacaggcacccaccaccacgtcacgctatttttttttttttttttttttgtatttttagtagagacggagtttcacgtgttagccaggatggtctggatcttctgaccttgtgatctgcccgcctcggcctcccaaagtgctgggattacaggcgtgagccaccgcgcccggccgaagactgaatttttgagcaaatgaaagacaccaacaa

SEQ ID NO: 12484 - DNA, 2300 bp, Homo sapien
catttatacaaattggggctattgatgggctggatgtgaaggggtttataccattcttgcacccatgggtggtgacattgctttggttttgttagaaagaaatgaatgttttgtgtattaagtgactagaaattcaacagaagatagaaaaatgtaggtctggttgagttatgtcaggagagaggtgggtggtgtgagtagaggggtgataattcaaaaaacatgcaggaaagagtttcctcgagtgtggtgattataaggggctgattaaagagatagagacctcacccagtgggcagcaggcaatgccaattctattcttgtctattctccaaaagacctattctttctgttatgggtcagattgtgtctccctataaattctgacccaagcctcccaaaaagagatgttggaatcctaacatctagtactgcagaacatgaccttatttggcgataaggtctgtaatcagtttaaaatgaggtcatgagggtgggccctaatgcaatatgattggtgtctttataagatcttaggggaaatttggacatggagagagagacacatgcagaaagaaggtgatatgaagacacacggggcaagacagccctccacaagccaaggagagaggccgggaacagatctttccttatagctcaaggaaagaatgaaccctgccaacaccgtggttctggatttttggcttccagaactgtgggacaataatatttctgttgttgaagacacctgtctatggtactttgttatagcagtgctccaaatgaacacatgcctcacacctgcctcctttgctgtttctcatccctgccctctcactccaggggcacaggcctttcttttctttctttttttttttttaatggtatgaaattagtttttatttttaactaaaaatgaatgcttaacaactttccaaaatcaaaactaaagatgaacacttagaaaaaagggtggaaacatatttttctttccctggggaaaccagtaaggcagacattctaatggagcttgttttttttttttttttccacaggactagtctatgcggatggaatctctctccagccttttctctatgtcagttttatctacctggcaagaaaaaacaaaaacaaccccaaaacaacccctccccacaaacacaacacaaaacaagggactcgaaaagttggagaaaaccttttaatgtgtttctgtaaaatcctttcttaggaggtttagtacaggtactacccatcagcaacttagccggccaggtgagttggtgcagaagggcttcggctgaatttataccagagccatcgggagtgacttggccacctctcccaattaccacaaggaagtcttaaaattgaatttcagtttcagcagatacttcagatttacctgagcaatatcatagacaatgtactcattatatagtagacaagtgtcattcacaccagatgaaatcccagtcccaagaggaacctctgcaccatccagagtaatactagctgaagggtcaggggtagttttgcccaaacctttgacactgtgcttgcccttgggtaacttgctgatatgtgaagcgtgcttcagttcatacattttccaagggcaacttctcccaacaggattaagcctgttgggcctccctgagatgtatggcagtagttggcactcttggaggccatgtcagcgaaatagatccctttaccaaacatgtagcccgtcatgggcacttcaggcggggctatccaaagaccctgggacaggatcccagcaaagctggtggttgtggacccggggcatgggcctttctatcttttgctcttggtttatattttcctatccaccagttcttctttaaaataaatgtatttgagtcaaaacaatagatcaataaaatatactaagtaaataattgtatagatgtcaagtagaatgtagcctagagatcagtgaaggaaaaaataaagaatacaataggacaaagacctgattgggataataaaaagagggagagagaattgattttaaaatctttcctgggaaagtttaaaatctgtccttagagaggagggagccaagatggccgaataggaacagctccggtctacagctcccagcgtgagcgacgcagaagacgggtgatttctgcatttccatctgaggtaccgggttcatctcactagggagtgccagacagtgggcgcaggccagtgtgtgtgcgcaccgtgcgcgagccgaagcagggcgaggcattgcctcacctgggaagcgcaaggggtcaggg

SEQ ID NO: 12485 - DNA, 2300 bp, Homo sapien
ttttttcctagaccaagtactcactgggctggggcatgttgtagtgttgggataaaagcttttagttgaccagggtagacgggcatgttttataactccatgaatggagtaccatgccacattcactgcccaatctcagggacaaagtcaaaggaagaaccttctcaacattctgccaaatacatatcatcactgtgctcattaggctcagcgtgattgtgctcatcttcaggatgaagtcttgtcactgccaatcactcttttatctgcacagatttgtttggctgccaccttcatactcaagcctcttttctagaagcaaaatataagttttcacatagtaattttgttatcacatattctaggtgttcaaggtaggctaaatgagaataaaattatataaatcacatgaagtcataggtgtcttcaaatgcttcagaatggcactaaacataaacaattcaacttccatattgcaaataaaacctcagctaaatgatctgtggttgccacacaggctgttcaccaatatttggtcctctcctttctgatacatggtaggattatacttctgacccccctgttgaacccagcatgtcatttgctttgaccaacaaatataagcacaagtgtcacttccaggaggaagccttaagagtcaataggatgtctcaaaattttttctccataaatattcaatttggcacgggggtagtacctcttcgtcatattcatttcttcctctaccatgatgatcatcaatattctcaatatgactgctctatcggcctagatccctgaataaagatgataacaatatacaatagagatacaatgtgagcaataaatatactcatttagcttcagggattgtttcttactgcaacagaacctgactgatacaccataacttgactgaaacaccatccctttataggaaagaaaggcttggacactaagcactgtgataaatgttactataatccaaaacagaagaaactagagactatacctattatatggcagcatatagatgatatgtgggtatatctattacagacttttctcccatctcacccctcatcaaaaaaaaaaaattctcaaacatttggataatctgaactcttcaaaatcaatgttcaaaaaatgaaagtgaaaaaaacagagttccgtcattttgacccatttgtcaaaaatcatttgcagagttccacttcttttctaagaccaagcacattaatcaaatacagagcttcaaagggacttcattttgagtgaccaaacagacaaataaattagctgcccatggctcctttgtaattgaagaggacccgtctgacccaaggggagaagactaaatcaaaaagcaaaacatccaagtaaaaacagcatcgagggccttaaacaaaccaaaaagccatcctataccctctcctgtccaagggtgttaagtatgagccaagcacatgtgtgtttatctactaataagagaatgcaaacatcccacatgtgattgatttcttatgtgctaccatcataaaaaaagtttgtgtctggaatacatattccagacatgtggcagtttataaacctgatcatacatattatacctacaacttacaaaactttttctctttgaaatgatgtgactctggaaggttttcttctttatttctgggaagaatcgcttaaagtttctcatttaagtaaagaactgctcgtttttagtttgcagagcttttaactagtgactcagtgaagagtgatgtcatatgttatcccaggactgccggtgtggttctctctgctcgctctaaccattccccctgcttctgtggcaggcagtaatccccgctttccatcctctagtcagcttcttcccagccagccacaagcgaacaggctcgcaagcagcggatgaaacaggaagtctgacagcttgagtctgcagtgggacccctagtgttttcccactccatgtcctggcatcgttccccagaagtacaaacacacacacacagagctcccattgttgcagccttcctcagcccactgatcctaatatggaattcagcaggaaacccatgatttcctgacactcggcaagctggaggaagcaaagggaaaaaaactccattaaaaagcccagctttcctccatgttagatgtgacttggaaaatgagaaagatttagcaaaattccaccgtatcttttgccaggctagagacagggagagcagagtaaaaccctcaggctgctgaaatttctaggctgttaggaagcccctcgaattctgtga

SEQ ID NO: 12486 - DNA, 2300 bp, Homo sapien
actttatttcactagttagttagtgtgcatcttcaatgtctctgcctacatcattatttactatgatatcaaaactcctaagggcaaagatgatgtctgcttcatttactttttagagcacccagaaaaatgccatgaacaagtatatttttaatccactcatatgctgttattgtagattgaaatataaactatatcccatactcataaaaatattttgttcttatttgaatcatttaagaccaaaaatctgtaaaacttctctatcagagcagcactgaatgtcctcacagacagaacaaatgcgtaccttttggtttattttaattttaaaacattgatattgactgactctttattacaaaagtctgcccaatgtagaacatgtgaaaaatgctgaaaaccatataaaggaaatgaaaagttttctttaattcccatgctggaagataatcacttggaacatcgtggtattttttcctaaatgattcattttaaggcgttattaatatcatctaattcttagctaattttaagactttcgacatgtttcttctcactgtgatttccatcttttcaggtagtgatcctgtgttctttccagcaagaattatcgttttgttgtttttcagtgcattgaaacatgttgtcggttaaaggaaagggtttgccatgagctgctagtcacttacccctgtttcaaaggaaacttgtggttaccatgaaggaaaatttaatccatctgccacaatgcatttgttctcctgagaaccaggtggaactacctctgactatttccttaggattatgccacccaccaaggtaactttctatttcagtaggtgatgttgagaaacaaaacaacaccctttaagttaatcagttttggaaaatagagactggctttctattccatggctttgatgtgtttagtagttcctgtaaggatctgcctctcttttgttttgattgacaagacttttcctatatatttgagcaatcaagcagcccagtaacagaaggtagagacatttacccagggcaaacttctaccattcattgtgacttcctgaaatcttagtgcaagtttcagctctaaaagaagagtgggctcctgcaagattaggtaagtgcttctccgtatttgtaacctcattccagaggaggggaagcccagagaacttgctacagtaaggtcagaagtaggaactgtgagaataatgaattcagtagggggtaaaggtccatgaatgccatatcctttatacttcaaaatccacgtgagttctgtctagtgggccaagcatgaagggggttgattctggctccggaaagagcacggggaatgaccaagacccagagagggtggacttgacggtggattgaggttatgttttaaataactcctatgctttccatcatttggatttaaattgaatcataagtagatgctgttgcagtggaagcctagagcagaagcaatttacagtgagtaggacacatttatgaatggccaccaactcaggtgataggtttcatgatatcttctgcatatccatgtttagtggtgagttggtttagtaacgatgcatatagggaatactattattaatatttatcaacccctccaaatcattccccatcatgacactgaaaatatagttttgagcaaagtatgtaacatggcacccaaataccctggacctgaataaaaataatttatatgtattcatgtattctgttggattatggattagttttggtgttactcatattttatgtttattttggaaagaccactgggacaaacttctttaacacacaagtcaactgcagcagttaagttacaataaggaaaagcctgagaatgcacttggaggatgggcatctagagagggccatggcatccacactggcaccagttacaggaatctctggatgcctgtgttggagtttgtgggcatttacaatttctgggctcattttccctgaaatgctaggagcaaggtccctttgatagtgacaaatgcatggttggctgtgccattgaaggcagccagatctgttaaactctgtcctttccctctccggaagagcagcatgaagctggcattcctcttccttggccccatggccctcctccttctggctggctatggctgtgtcctcggtgcctccagtgggaacctgcgcacctttgtgggctgtgccgtgagggagtttactttcctggccaagaagccaggctgcaggggcttcggatcaccacggatgcctgctggggtcgctgtgagacctgg

SEQ ID NO: 12487 - DNA, 2300 bp, Homo sapien
ttactaaaccaactcaccactaaacatggatatgcagaagatatcatgaaacctatcacctgagttggtggccattcataaatgtgtcctactcactgtaaattgcttctgctctaggcttccactgcaacagcatctacttatgattcaatttaaatccaaatgatggaaagcataggagttatttaaaacataacctcaatccaccgtcaagtccaccctctctgggtcttggtcattccccgtgctctttccggagccagaatcaacccccttcatgcttggcccactagacagaactcacgtggattttgaagtataaaggatatggcattcatggacctttaccccctactgaattcattattctcacagttcctacttctgaccttactgtagcaagttctctgggcttcccctcctctggaatgaggttacaaatacggagaagcacttacctaatcttgcaggagcccactcttcttttagagctgaaacttgcactaagatttcaggaagtcacaatgaatggtagaagtttgccctgggtaaatgtctctaccttctgttactgggctgcttgattgctcaaatatataggaaaagtcttgtcaatcaaaacaaaagagaggcagatccttacaggaactactaaacacatcaaagccatggaatagaaagccagtctctattttccaaaactgattaacttaaagggtgttgttttgtttctcaacatcacctactgaaatagaaagttaccttggtgggtggcataatcctaaggaaatagtcagaggtagttccacctggttctcaggagaacaaatgcattgtggcagatggattaaattttccttcatggtaaccacaagtttcctttgaaacaggggtaagtgactagcagctcatggcaaaccctttcctttaaccgacaacatgtttcaatgcactgaaaaacaacaaaacgataattcttgctggaaagaacacaggatcactacctgaaaagatggaaatcacagtgagaagaaacatgtcgaaagtcttaaaattagctaagaattagatgatattaataacgccttaaaatgaatcatttaggaaaaaataccacgatgttccaagtgattatcttccagcatgggaattaaagaaaacttttcatttcctttatatggttttcagcatttttcacatgttctacattgggcagacttttgtaataaagagtcagtcaatatcaatgttttaaaattaaaataaaccaaaaggtacgcatttgttctgtctgtgaggacattcagtgctgctctgatagagaagttttacagatttttggtcttaaatgattcaaataagaacaaaatatttttatgagtatgggatatagtttatatttcaatctacaataacagcatatgagtggattaaaaatatacttgttcatggcatttttctgggtgctctaaaaagtaaatgaagcagacatcatctttgcccttaggagttttgatatcatagtaaataatgatgtaggcagagacattgaagatgcacactaactaactagtgaaataaagtaaagaagttaaaccatttccactttctgcaaagaaaagtgttctttaaataaatgtactgctcattgtagatttcattttcaaaacagataacaatgcccagtgagtccatcaatttaccacccctctctctagagcagaattattatacatgttttatagaatattgaactaggcttggaaaaaggactttcttcagcgcttcagcctgtgagtagcataaccagaactggagtactctggggacggactgctcagctggcctgatcttcctaacttgctggccaagagctggccagtcggcagtgagctgccatcctgggctgtttctgaagacggctgcccaaccctttaagacctgaaacatacacacttgtgtctgcagagtcacacaataaagacagattacaaaggccaagagcatctttctttcacaatccccaagttctttataatgcagagatgtggcatcatgcattccaccctgtcagcattaactttataaaaacgacaatttggccgggcgcggtggctcacgcctgtaatcccagcactttgggaggccgaggcgggcggatcacgaggtcaggagatcgagaccatcccggctaaaacagtgaaaccccgtctctactaaaactacaaaaaatagccgggcgtagtggcgggcgcctgtagtcctagctacttgggaggctgaggcaggagaatggcgtg

SEQ ID NO: 12488 - DNA, 2300 bp, Homo sapien
taaattctgcattaatgctctaattttgtcagtggtaacaaatattgtcaaatggttttcttgtttgtttcagacaaaatatccgccaaatacccaagcctgaataatcatagtttgttagtcattccttcaagtaaaaatgatgtttcatgaggaggaaaaaaaaaaaaaaaaggctagtttgggttacagctcaaaaactattacacaaatgcttttccataagataaccattatatttcagtatgcagtggatgttactatgcatacttcccattgtatcatgtagaatatttttaaatgtgtgcttgagggtcaaaatgtaataaaattattaattttcactgtttcttcaaagatgttctcaagtgaaatcggcttttttacatttttaattacaagtacgtggcagtgaagaatactcaaccagtttgacacaagtgccttgattctcgttaaggtagcagcaattttaaccaccgccacttttgcaatgaatagtacaaacgtcaacacagtgaaaggacaaatcatatatacagcactgttataaaggtagttttgaccttgcaggacatggaaaatcaggtctcagagcccctctaagggtccacagataccactgatttaaatgtttcttctcacgtcagactctaatttaagacttaaattagggattcacgttagcattttacttccttataaaactatgtttttctccttggaactctctgaattcagaaaaatttctttcctaatgatccggacgttgccaaatttcacatgttattttgctagtcaaaataatgcccaagtcctaagacctcagagaattgttccttttctaatacactcatctgtcaactctcagttttacatacagaatgtcagccttattcaaatgaccccatcaagtgggttttagccctctttcgattgccacaaagaggggagattctcatcttctaagctggcctgtggactggcaaggctttccagcaagactggcaaagtgctctctcctctctggtcacttgaaagcagttatggtctaaaatgtttggtggaaacacttcagacatatttattaataagcataagtgttctctgcacttaagagaaagattctacgtcaaaatcaaaaatctcccttaagtttctaaagagaaagactgggggctggggaggacaaattacttttcaaggttacataaatgaattctccaaggaactttagtaagaagactagcattcctgtttgtcagtctcaaacggaaagcactaaaaacaaattcttaattgtaaatgaaagtcctataaaattgtattctactgaagacacacctaatttcagaaaatacataaacaagatactattttggataactgaaaaggttgaataacatacagagtagacccctttgacatatttgaactaaaaattattcttttgtctatttttaaagatcccaaaagatccacaatttgttataatcagtaatttttttacttttttttttttttttttttttggtgagatggtctcgctctgttgcccaggcaggagtgcagtggcgcaatcttggctcactgcagcctccgcctcccaggttcaagcaattctcgtgcctcagcctcccaagtagctgggattacaggcgtgtgctgccacgcctgtctaatttttgtatttttcatagaggcgaggtttcactatgttagccaggctgctctcaaactcctggcttcaagtgatccacccgccttggccttccaaagtgttagtattacaggtatgggccactacgtccggccaatgggtaattttgtgtatgccacaaatttaaatcaaaaaggtatgcaggagcagtcaattagctgggcaatgagcacagccaaccactcaacaaccacatctcaatgtcattttgttgttttgacctcctcccgtcaggtatttatactttcttccttgcaaaatgtgttccagaaaaggaagcgtactgctaattatgaagttaataaaaagtgaaaaggtctaaaactatgctgtgttttggtcagaaaaatagacagttggatcaactaaaaagtaaaatgttaaacttcatgataggtgactatgacatgaatgacctatcatgaaaagaaaaagagacttcttatacattcagtgactgccctcattagtgctaaaaccacctaacactgaaaatggaaaggtggctaatttgtgctataagaatatacaaaggaaacacaggattcttgagaccaagtcaggagccttggtccaaaag

SEQ ID NO: 12489 - DNA, 2300 bp, Homo sapien
tatagttcatacttagtggtgatgaactttatcacggcaaaagtgggcactagccatacagtggccaatcatctggagtcagtagggggagactgcttccatctaagagtcatcttttcgttttccatttcagttcaaagcaggaatatttttatctttcatggcacaaaattatttttccactcaagagccatttctgggagtgtgcaaagaaaatttcaaaactctagtgtttaacaacacaaacaggagaaatgcaaatgcatttttcgttgtcacttgtacatatggtacatatagttttatttatatatagctctattccctaaccgtatcgaaaagatgatataatgctgagggaaaaaactaggctacagatcgacacacattattaacataaagagaaaaaatactaaaaggaagtatgcaaatactgtaagtggttatctctgagttgagaaaataagaatgttaatttttttgtccccccccccaatttctaagttttgaacaactggtactctgacgtttgtagttagcattaataatttctttcttccttttttcctctcaaaaaatgtacgtagggtgcattcaaatacattaatccaagaatattatctggaaatgtaccatttggccgtctgcattcaccaagcatgcaaacacatctccaaatatctcatcacttgttctagatagatttaagtagtcttctccattaactctttcgggtccaacttgccaattaaaatctcgaaactcctagtttggagctgggtctttccgagctctgagcagtcggctgactggcgggttattctgaatgaatagactgcaaactgtggcgacagcgttcccacctgcattaattaaacgagcgctggcttcaacgctacaggggtctgatattcaaaacagacgtttaaggaaaaggagatgaggtgagagaaaattcgaagaaggttcagcggagagcgactgctgggggtttcaaggggcccatttacacaagcagtggcacaccggcacgggcgggggatcttattcctgcctacgcatcacagggtcccgtccagagtgggactccccaaaccctgaggggccacactagctgcagggcgggatcaagtctccggggctccccgacccttagacgacccgagcccttggaatcctccggtccaagacgaccgccgcccaaaggctccgcacagcacggaaagccagcccgctgatccgctagtcgcacacctcccggaattaaagagctcctctcaggcccagcggcttctcacttcagcttgccccactgccgggcggaagcggcggctgcaccgcccgagatcgcggctgcatccgggttcctcaagcttcggcccaatcctcgaccttctctcttcccaccctcccgtttctccgccctcctgccgccaatccctgatcaggtctcagccgaacatgctgtcaggggagtgaaggcggatactggccaatgaggcctcgcttcccgtttgaagtctccagtgggcgggcgccggaggcgggcgctgctggccagaaggttcggttgcgcgtgtgccatggactcagccgcccggtgatattgacaataggagagagaaaggggcattgactgggacccaccgcgggtagcgaaaggtggctctggcagcggcggctccagctcctgcggctcctcctccttattctgtccccttctcttgctgccgctgcagatccagtcttcctccctcccttccccccctccccacgtcgtcgccgccgccgccgggtccggggcaacgagctgaggcgccgcccgccaggaatgtgagcgaggagccaccggcggagccgcaacggggtcggtgccgatttgatgggacgggcccgcgggggaggatcgtgaggccgccgccgccaccggaacgctgaggttcgggtccggccgtgaggcctagaggctccgccgccgcggaaccggagggaccccgtaccggacagccgtcgccccaggctccccgcagctgcccggacctccccctgcacgtcccggtcccgccgcccgcccccgctgcggccacctcgcccgtctcccgcccctccaagccacagatcatctttggattcttccccagaagcttcaaggtaacttagtccctccagcaccgcggctcgcccgcttcccttcttcctcccggtcctcctggggaacctatggggcaccggccttgggaaggcctggccgggcaggcgaggggtgcggtggggtggggtgcgggagcgggagcgcccgt

SEQ ID NO: 12490 - DNA, 2300 bp, Homo sapien
atagtagttgaccgtaatgccttttagattaaaattaaatgtaaatatatttcctaatactttcttttactgcatccgaaatagattgtcttgcactattcttggagtaccgaaatccctgggatacatgggagaaattactggtccagagaacaatttctcacataggcaaggatgtttccattttaaaaaacctgctcatttcagttgctcagccattttatagaaagtgaaatgactttgaaatgaattgtctttatagagatccataatttgcaagcaaaatccccactctatgacatgttctaagcaacagctgtgagaatttcaaacgtgcactatgcttttaacagttcaactgttgccaagggaaattgaattggcttcaaaatcttccttggttttaattctgaatttaccctcaatcaaagattgaagaaaacaggtccttggctgggacactgaactttcatgaagactgtacaggatattgagatatggaaaatttaaggttcttgagggtaggaactagactgctggtattctatagttcatacttagtggtgatgaactttatcacggcaaaagtgggcactagccatacagtggccaatcatctggagtcagtagggggagactgcttccatctaagagtcatcttttcgttttccatttcagttcaaagcaggaatatttttatctttcatggcacaaaattatttttccactcaagagccatttctgggagtgtgcaaagaaaatttcaaaactctagtgtttaacaacacaaacaggagaaatgcaaatgcatttttcgttgtcacttgtacatatggtacatatagttttatttatatatagctctattccctaaccgtatcgaaaagatgatataatgctgagggaaaaaactaggctacagatcgacacacattattaacataaagagaaaaaatactaaaaggaagtatgcaaatactgtaagtggttatctctgagttgagaaaataagaatgttaatttttttgtccccccccccaatttctaagttttgaacaactggtactctgacgtttgtagttagcattaataatttctttcttccttttttcctctcaaaaaatgtacgtagggtgcattcaaatacattaatccaagaatattatctggaaatgtaccatttggccgtctgcattcaccaagcatgcaaacacatctccaaatatctcatcacttgttctagatagatttaagtagtcttctccattaactctttcgggtccaacttgccaattaaaatctcgaaactcctagtttggagctgggtctttccgagctctgagcagtcggctgactggcgggttattctgaatgaatagactgcaaactgtggcgacagcgttcccacctgcattaattaaacgagcgctggcttcaacgctacaggggtctgatattcaaaacagacgtttaaggaaaaggagatgaggtgagagaaaattcgaagaaggttcagcggagagcgactgctgggggtttcaaggggcccatttacacaagcagtggcacaccggcacgggcgggggatcttattcctgcctacgcatcacagggtcccgtccagagtgggactccccaaaccctgaggggccacactagctgcagggcgggatcaagtctccggggctccccgacccttagacgacccgagcccttggaatcctccggtccaagacgaccgccgcccaaaggctccgcacagcacggaaagccagcccgctgatccgctagtcgcacacctcccggaattaaagagctcctctcaggcccagcggcttctcacttcagcttgccccactgccgggcggaagcggcggctgcaccgcccgagatcgcggctgcatccgggttcctcaagcttcggcccaatcctcgaccttctctcttcccaccctcccgtttctccgccctcctgccgccaatccctgatcaggtctcagccgaacatgctgtcaggggagtgaaggcggatactggccaatgaggcctcgcttcccgtttgaagtctccagtgggcgggcgccggaggcgggcgctgctggccagaaggttcggttgcgcgtgtgccatggactcagccgcccggtgatattgacaataggagagagaaaggggcattgactgggacccaccgcgggtagcgaaaggtggctctggcagcggcggctccagctcctgcggctcctcctccttattctgtccccttctcttgctgccgctgcagatccagtcttcctccc

SEQ ID NO: 12491 - DNA, 2300 bp, Homo sapien
gtgtgtgtgtttagagacaaagtcttattctgtcacctaagctagagtgcgttgacacagtcattgctcactgcagcctggaactcctagcctcaagtgatcctctgacctcagtttcttgggtggctgggactacaggtatacgccattacaccgagctaatttttgtattttttttgtaaggacgggttctctttgtgatacccaggctggtctcagactcctggtctcaaagtgatcctcctgccttggcctcccaaagtgctgggattacaggtgtgagccactgtgcccaacctagaatgtttacagatgcccatttcctgacaccccatcagccttgatgttatcagtgtttttaatttttgccaacctgataggtgaaaatgcatcttatttcctcaactgttagtaagacggaacttttttttttttttttttttttttttttttttttgagacagtctcactctgtagcccaggctggaatgcagtggtgtgatcttggctcactgcaacctctgcctcccgggctcaagccattttcatgcctctcagcctcctaagcagctgggattacaggcgtgcaccaccacacctagctcatttttgtatttttagtagagatgggattttgccatgttggccaggctggtctcaaactcttgagctcatgtgatcgtgttctgcccaccttggcctcccaaagcgctgggattacaggcattaggcaccacgcccggctgaggttgaacatctttttacgtttcttgttcattagaattttcccttttatgacttactgcttcttttagctattattttttgtttggataaatttcttgcatagtaagggtattaacctttgatagtgtgttatgaaaattttcttccaatttcaattttaactatatttttaatacgttttaccttattttagttatgtttttgtctaatcaggtctctcactttttaccttcatgggtgggtgtggtggctcacacctgtgatcctagcactttgggaggccaaggtgggcggatcacgaggtcaggagattgagaccatcctggccaacatggtgaaaccccatctctactaaagatacaaaaattagctgggtgtggcagtgcatgcctgtaatcccagctacttgggaggctgaggaaggagaatcgcttgaacccgggaggcagaggttgcagtgagctgagatcacgctgctgctctcgagcctggtgacagagctagactgtctcaaaaaaaaaaaaaaagtcctcttctactccaaaattgtatgttttgcttctttgtgtttaaaatgtgattttccacattttctacaatgagcagttaaaatagcactaattatttatttgtacttatttattaaaatataactactgtaaggtctacaaatctagggtagagctcagtgaacttttacaaacagaagacatctgtgccaccaacactcaaatcggtaccagcacccaagaaacctcttggatgccccttcccagtcattcccactaaagataaccaccattctaatttccatcatcatacattagttttgcctatgactttttatgttttgtttgcctttgggcatgggagatcaggtttgttaaagtgtaatttacattccataaaatttacctttttaaactttgtaagtatgtagtttgatgaattgacatgtaagtatgtagtttgatgaattgtaagtatgtagtttgatgaatacacagttgtgtaaccagcaccctgattaagatacagaatattttcatcacccaaaaagtttccttgtgccccttaataatcaatggcctccccacaacctcagcccctaacaaccagttcctataattttgctttttccagaatgttatttaaatggaatcatacaatatatacgcttttatgttacatatatctctagttccttttttcttgcagagtcagattccattatatatgtatgccacaatttgtttttcccttcagcagatgacagatatttctcggggagggagagtctttgttgtttatttttttgtgcttaagcttacccgtatttctgtttttttctaggtatttggctattataaataaaatagtgatgaacacgtgtacaggtgtttgtacggacataagttgtcatttctcttgagtaaatacctaaaagtgggcttgctgggtaagtatgtatttaacttttaaacaaactgccaaaccagtttccaaagtggctgtaacattttaccatcagtgtatgaaagttcctgttgctt

SEQ ID NO: 12492 - DNA, 2300 bp, Homo sapien
ccctgtctccaaaacaaaacaaaacaaagagctaaatcggtaatgtttcctttacaaacaacctgaaaccttctctaatcatttagaaataagatacaaaaatgacaaaaataattcgatattttaaacaaaaatgcaataattacaagcatcagtaatgaacgcagtttttgcttagctttaattctgtaaagtgtacttaattttaatctagaagtgtagaagtattacatacatccgaaatcatgtttttttcttctacagtcgaaagtttgtattacatgtaaaataggaaaaaaatattaaaatttttcgaaagcgaaaagtctactcagcaagtttttggtatttattaatggttttacttttgctagacacaaaaatgaaataccgctaaattagctcacagaagagttcaggattctatagactcaggaaaagcctgtcctaaaactgttttaataaaggctgaaaatagacactataatacagtctttaataatatacaatgtgtattcctcctgatggtggtcttgcttgacattttaagcatagccctattttcctgtgaagatagcagccagttctgcttcatgtcataacaacacttgattcatgtaagcagctgctacctatgccatcacagtacacataattgctaaatgtagggttcaaataatcgtaaatggacactaatatgaaaatcagactgttttgttgtaacagcaaaagttttagaaacaaataattttagtatctacttagtacagtaagcatgaacatatagtatacagctaggcacagcagtaaattgttggaaacactaacatttattgtttacgaacatacatgcagtgtttacacatttcttaaatgttgtctttaatgctgctgataaacgaaaggataaaaagtccaacaaaccacaataaatgtcaatgggtgttattaacaacatgaaagaactcagtagcaacaaccacatttaaagctacaggactcgaaagttccggactacaaatcccagagttccctagagcccaggcggagctaccttcaaactgatcgctttttcacccaatgacagccagagaatccctaaaccacattcagcccggcctgaagggctggtttcttcgcgtgaaaacaataaggtattacgtagactttctgaacacgagtggtagtttcagggcctgagtctaactactaaattatttctccccgcattagtctcctagtcatcttaataactctctacccaactctggctcggtggaaactcggaacgtctaaatgctgaaactcacgtaaatcagtaccagcggatgcatccagtcagccacgaggaaggcggaatccgccttattcttgccctttattggccacgcatcccaccaatggggccattaaacttccgctaacgcagcgtacggcgtggtggtgtgagcgttgtacgtacgctgggtctacgaaggggcaggcgttctgctttcgtccaatcggaagctagcaagaattccccgggccgctatgccccacttctttcgcgtcgcgttacgggccgcctctctgcagccgaccaatcctcttgattttcttgtgcgcattacccaatcagagaggtcgaggcggggttccacttgaccgctctaagccgccgcgcagcctgcgttttctccggtacaggttgaggctactaaggtacattttgctgggccaggctgggcgggtccccgggatgggcagccctctcgacgagcggcgacgccgtggttgagtctagaaagctagagttgctggacagctatcgcgggagcgcggagggaagtgggaggtctggacggagtgtgcacgtgttggcagtctcgctccgccgtcggagccaccaggtcaaacctgtgctggccctggccaaagaaacttctgcgggtcaggctgctgttgccggtgcagttcccagtacttcctctggggcgtttttcaataaaagccaaacgcccttgctcattttcagggaaagacctgtttcctcctgctctttcctctccacggatactctccccaccactaaaagggtttagtataatccttttgtaggccagaaagcagattttcacttgggaagagacgacccgtagtatgggatgtggtatgataccagcaactggtctattatatcatttaaaccacatggctatctaaagaggtaggtactgtgagtgttctcattttcacgcgaagcagtgttagacattactcattcttgtgttttctttagcttgtctctgacaaattgt

SEQ ID NO: 12493 - DNA, 2300 bp, Homo sapien
gtctacacaaaaaatatggccgggcgcagtggctcacgcctgtaatcctagcactttgggaggccgaggcaggtggatcacaagctcaggagtttgagaccatcctggctaacacagtgaaaccccgtctctactaaaaatacaaaagattagccgggcatggtggcatgtgcctgtagtcccagctacttgggaggctgaggcaggagaatctcttgaacccgggaggcggaggttgtagtgagctgagatcgcgccactgcactccagcctgggcgacagagcgagactccatctcaaaaaaaaaaaaaaaaaaaaaaaatctgggcttggtggcgtgtgccagtagtctcagcaattcaggaggctgaggtggcaggctcacttgagcccaggacgtcgaggctgcagtgaaccatgatcccacctcctgccagtgcactccagcctggatgacagagcgagaccctgtctccaaaacaaaacaaaacaaagagctaaatcggtaatgtttcctttacaaacaacctgaaaccttctctaatcatttagaaataagatacaaaaatgacaaaaataattcgatattttaaacaaaaatgcaataattacaagcatcagtaatgaacgcagtttttgcttagctttaattctgtaaagtgtacttaattttaatctagaagtgtagaagtattacatacatccgaaatcatgtttttttcttctacagtcgaaagtttgtattacatgtaaaataggaaaaaaatattaaaatttttcgaaagcgaaaagtctactcagcaagtttttggtatttattaatggttttacttttgctagacacaaaaatgaaataccgctaaattagctcacagaagagttcaggattctatagactcaggaaaagcctgtcctaaaactgttttaataaaggctgaaaatagacactataatacagtctttaataatatacaatgtgtattcctcctgatggtggtcttgcttgacattttaagcatagccctattttcctgtgaagatagcagccagttctgcttcatgtcataacaacacttgattcatgtaagcagctgctacctatgccatcacagtacacataattgctaaatgtagggttcaaataatcgtaaatggacactaatatgaaaatcagactgttttgttgtaacagcaaaagttttagaaacaaataattttagtatctacttagtacagtaagcatgaacatatagtatacagctaggcacagcagtaaattgttggaaacactaacatttattgtttacgaacatacatgcagtgtttacacatttcttaaatgttgtctttaatgctgctgataaacgaaaggataaaaagtccaacaaaccacaataaatgtcaatgggtgttattaacaacatgaaagaactcagtagcaacaaccacatttaaagctacaggactcgaaagttccggactacaaatcccagagttccctagagcccaggcggagctaccttcaaactgatcgctttttcacccaatgacagccagagaatccctaaaccacattcagcccggcctgaagggctggtttcttcgcgtgaaaacaataaggtattacgtagactttctgaacacgagtggtagtttcagggcctgagtctaactactaaattatttctccccgcattagtctcctagtcatcttaataactctctacccaactctggctcggtggaaactcggaacgtctaaatgctgaaactcacgtaaatcagtaccagcggatgcatccagtcagccacgaggaaggcggaatccgccttattcttgccctttattggccacgcatcccaccaatggggccattaaacttccgctaacgcagcgtacggcgtggtggtgtgagcgttgtacgtacgctgggtctacgaaggggcaggcgttctgctttcgtccaatcggaagctagcaagaattccccgggccgctatgccccacttctttcgcgtcgcgttacgggccgcctctctgcagccgaccaatcctcttgattttcttgtgcgcattacccaatcagagaggtcgaggcggggttccacttgaccgctctaagccgccgcgcagcctgcgttttctccggtacaggttgaggctactaaggtacattttgctgggccaggctgggcgggtccccgggatgggcagccctctcgacgagcggcgacgccgtggttgagtctagaaagctagagttgctggacagctatcgcgggagcgcggagggaagtgg

SEQ ID NO: 12494 - DNA, 2300 bp, Homo sapien
tgagccactgcacctggtctctatggactattgtttaccaaatacatttttgcatatccctatcttccttcactttctcttcctaaaatgggcttcttcacctattcatattttgctctgtaaaacaatccagctctacaggatcacctcctaacacctttcttcctgttcctagtcaaacttgtcctcctttctgaggcatgctgtttatgtctgttttacacttgccatcttctctatactctagaagtagtcctgtctttctttatctcccctaaactgtgaacaacttgagagcatgggtgatgatttattcctctttctatggccacagcctagcaagtggagtgggaggaggagagtacctgtccctgcgaaatgaaattttttttttttttttttttttaagatagggtcttactctgttacccaggctggaattgcaatggcacaatcagggctcaccgcagccttgacctcccgggcttaaataatcctcccgcctcagtcccccagttatctgggactacaggtgtgggccaccatgcccggttaattttctttttttttttttgagacagagtttcactcttgttgcccaggctggagtgcaatggcgcgatctcggctcaccgcaacctctgcctccctggttcaagcaattctcctgcctcagcctccgagtagctgggattacaggcatgcaccaccccgcccggctaattttgtatttttagtggagacggggtttctccatgtgggtcaggccggtcttgaactcccgacctcaggtgatccgcccgccttggcctcccaaagtgttggggttacaggcgtgagccactgtgcccagccctgcccggctaattttgttcattttttgtagaggtgggatctccctatgttgcccaggctgttgtcaaactcctggactcaagccatcctccctcctcgacctcccaaagtgctgagattataggcatgaactaccacgcctgaaggaaagtatttctactgttttaagggcatgggacaatttcaagcctgtttcttggaagtagttcacattctttaattacagacattcacctgatcatggcgggtgtggtggctcacgcctgtaaacacagcactttgagaggccaaggcaggagaatcacttcagcccaggagttggagaccagcctgggcaatatagcgagaccctgtctcatctctctctctctaggtatatataaaagacattcacctgacctgaggagttcagagaccttataaactgctctagctagaagtcaagttggtaacttgtgagacacggaagttaagcgtctaaattaacgttaccaaactcaaaaatctatacactgcattcattctctacatttattctgtgcaagccctctaggtattagaatctaggaaaaggaaattttacacttaagaacacctgtgctcccttaacatataccaaaatatttgataaatgacacagtattttgaatttgtaggtggctggcttttcttttgcagaccacacctgttaatatcacctggccctgtcttgggatctacatgtagtcttgtcaccactggtcaattggcacatggttttccgaacatcagtcgcctgggacagctctgtaattacttgttaattacttgagtcgaatgattccgaactcatggtagttgcttcgccttcattgatcattcaccatttggttctgtgccagcaggatgcccggctgcttggtcacaggcattgcgcaagctggcaccgggatcgtggcctctttaagtcaacttctggctgagggaatccggcgacactagcccgcggagaagaagggctgaaggtggagcagggggacacgccgcgtcccaccagacgtacgccgcgacgcctgctggtggatattacccgggacctcaaagcggccgcccgccgatcctcagcgccaagccacggccggatgcgctcagggcggacccgcgcggcccggcccctcagggagcccgggtgggggcggggctgggcggggcggggcgcggcgcgcgcggggcgggggcgcgcggcctgtggcgccgtcacccggcagactccggagggtagagcgctgtgccggttccgctgccgctggccaggagcgcggggacagttcggggctgcgccggaggccggcccgccttcccgggggttccgttatcatgtcgctgaggcagcgcctggcccagctggttggccgtctgcaggacccgcagaaagtggcccgtttccagcggctgtgcggggtgga

SEQ ID NO: 12495 - DNA, 2300 bp, Homo sapien
atgattttgcaggatttactgtaaagaaagcaatagacatagaatggaaatgaatagaaccgagaagagaaaaatagcagacaatgctttgtatacagctccacaaatcctagagcccaacttctccctaaaattggctctccagcttgcaactctccaacccatcaagcaaagtggttttaggaaaagacagcatatggccggatgcggtggctcatgcctgtaatcccagcgcttggggaggccgaggtggatggatcacgaggtcaggagttcaagaccagcctggccaagatggtgaaaccccatctctactaaaaatacaaaaattagccaggcatggtggcgggcgcctgtaatcccagctacttgggaaggtgaggcaggagaatcacttgaacccaggaggcagagtttgcagtaagccaagattgcaccagtgcactccagcctgggcaacagagcaagactctgtctcaaaaaacaaacgaacgaacaaacaaaaaaacccagaaagttctttttggtttatagagctttgttgtgactcaagccattgttaataaatcatgcaaagctaggtagtctgagaagtgataccattggaaggataatctaggaatacaaggaactctgcatttgtgaagagttgagctactgaccattaataaaatgtgcatttcaaataatttgcctgaatcatcctggtagtcacagaggtaaacgtttttgaaacaattgttccaaattgtgggtacaacttacaactaatttttcccattaatatatgtttgctgaatgcattatcaaacgtctaatctctgctctttgccatctagtttgagtcacttaaataattcaggcaagattctgtagccacagacatatatatgaacttggagttttaagaaaagttaaggccggttgcagtggctcatgcctgtaatcctagcactttgggaggctgaggtgggaggatcacttgaggccaggagtttgagactagcttgggcaacacagccaaaccccgactctaaaaaaatgcaaaaattaccggtgtggtgtcgtgcgcctgtggtcccagctactaagcggggggggggggggggggaatgaaatggatgaaatggggggggggggttgaggctggaggatatcttgagaccaggaggtagaggctgcagtgagtttagatcgcgccactgtactccagcctgggcgacagagtgagaccctgtctaaaaaatgaaaaagttaaatttgattgtgatagaaactcaatagagaaatattgaaaatccgctgctttttaatgtaataatagtgaggtgcgccttttatttggaacttcaagtgccttagtaatacggtaatcacagcgctagaggtaagtgggtgtcaagtggcatcatcctgggtccaaagggactgattatgggctggaaaatcaaactggcacctgcaagacgcagttccaaggatgcagttcgcagtgagttttcagacctggatgatgtatgtcaggtcggacgactgagacagctctccacttcccctcatccaaggggaaggaggaacccagttatctgcattaacaaacgcctccccttctctccaggtgaccccaagatccggaccacactacgaaatacggatccagattttaaaggccttcgaatccaaagtcctcgttttacaaagagcccgcggggtgaaatgacttgctcatggtctggtagctaatcgcagatctgctctctaactcctacttccaagacccaggaatctacgggtgttggagaagacccctcctgaaatcctccagaagagctttttgagggagcttgtggctcctgttcacccagccccgggtaagaaaagggtcgcgaacctgcattgcgaggtggtctctccctcacaccacctctgatgtcccaaaagacggggagaaagttgcccgccccgggctgcggcggggcctgctgctccgccccggcgctggcgggcgcgctctacactggccgccgaggggcgagcgcgggacccggaggcgggcggcgggcggggaaggcgcggggcgtggtttgccgctttccgagcgccaaggagcggagcgcgctcagctgcgcccagagccttcggccggacctgaaaaagcgagagggagagcgagcaaaaggcgcgatccagagagccaggcaagcggggcgccgacctcgggcggccccggcccgcgcccttgcccctcggccgggcggacggtgggtgagcgcggccgcggggccccagcaccccggtgc

SEQ ID NO: 12496 - DNA, 2300 bp, Homo sapien
cttagtagaacttaaggtctgccaaagttcagaggccacacagtctttccactgtctcttttgggcatgaattcgaccaagtcacataaactctatgggcattgatctcttcatttctgaaatgagagtgttattaggaccttgtatacataggttgtgtatccccagcatatattcctatattgataggaaaaaactgaggctcagagtctatatattacttacctatggtcacacatttcaatttattatcagtagtgcctattctttggaccccattatatttgtaatatggaaatataacaaattattcaataattaaaataattatgaggtttcttagttgtcaaggtgaagttaagttacaattctgtttttatttcaaaagagaaaggcttagtatgttttacaacaattttccattcagtgtggtatatattacactgctaagaatactttggggccaggcactgtggctcctgcccataatcccagcactttgggaggccaaggcaggcggatcacttgaggtcaggagttcgagaccagcctggtcaacatggtgaaacactgtctgtactaaaaatacaaaaagaagaaaaaaagaatacttggatattgggatgctttttggagtgaaaggagaaatcattaatgataccaaaacagctggagttgtctggcccagtgggtcatggttaacctagctctgctgcctcttactaaataaatgtatgttgaatgaatgaatgaataaatggatagatggatgaacaaataaaagaatacttggatatagcaaccaattcattctttggcattttgaatcgatgggtttaggtattaatgtgataatgtgtatgtatatatcattgtatgtctgtttattggataattattttctgttcttagttcagtaattgtgttaatcagtttcataggatatctttctgctgtgttttcccctcatgtctgatttaccttgcacccagaatggaatctttagagacagcactgcggcttgtgttacctgtagagaaggcatcacttcttctctgtggctcggacctgcctctccataaaatggccatccagggatttcatctcattgatgctgatcgcatctatcaacacctaagggtaagtatataagttctcacagtgtatttacagaataatcgagtcttttgagatttataaatccttatggatttttaattattcatgatagcatagattaagagtataagccatgacagtttttttttcagtaatttagacttgttttttatttcttaactctttaattccttgcaaatttggaggtgggcaccgtggagtgcatagtgaggtattttctttgaattcaaaatgaagccttgtttatgaatgccttcttcagtgactgaattcctaaatatacgagactcatgcttaaatgccgtattctaccgttttcttattctaaatcccatcttaactaaaaatatttgttcatttttcagattataaaattgttctctgaacagtttaacatctaattatgtactttgaagcaatagatttatgtgcttgttttctttttgggattgaaacatgagctggcacattgatcatttgtaattaaaatgtttccttaggtagaaactgtcaccttttgttaaactcaaaagcatttttctagatcaaatctagtcatgcagtttggggctagtttctcacatgtagcctttcttttttccacctcagtgttttagcttttcttatctttattttagaatatccaagattccatagcaaaacagattgaaatatgtaaccgcttagaagagccaggcaactttgtattaaaggagttacacccatttgatctacacgcaatgcagaatattatactgaaatacaaaacacaatttgaaggaatgaaccacagggtgcagaggagtgaagatactctcaaagctctggaagactttttggcgtctctcagaacagctaaactctctgctgagcccgttacagacctttcagcctcagatacacaggtggcacaagaaaatacgttgacagtaaaaaataaagagggagaaattcatctgatgaaagacaaggccaaacatttggataaatgtttgaagatgctcgatatgagctttaaagatgctgaacggggtgatgacacctcctgtgaaaacctgcttgatgctttttcaataaagttatctgagacacatggctatggggtacaggaggaattcactgaggaaaacaaattactagaggcttgtattttcaaaaat

SEQ ID NO: 12497 - DNA, 2300 bp, Homo sapien
gtatggtggcacatggttgtaatcccagctactcaggaggctgaggtacaagaatcacttgaaccagggtggcgcaagttgtaatgagtcaacatcccggcactgctctccagcctgggtgaccaagtgagactctgtctcaaaaaaataaataagtaaaataaaataaaattgggcagttagtgcatctatttttattttgtgattttctgttttgctaatgtctgtaattccaaagaagctataggttctacgtagaaattctctacagaaagatagccattttcaaaaattacagtgaactggtttgtaatcgtgactcatactgcatctacatgcagtgccttctagtttagaaaaggacaaatctgactcttatttctgttttcctcgtagtctctgttgagctcagaacatttttaaaaatttgttttctgttttgtttttagaggtagtaagatataatggaagaattatggtgtagagggaagaacaccaaataataactaacatttatgtagaacttacagtgttggagacactgtgctaaaaatttcatgttgaatttttatagcaactctgtgagatgagtgctattattagccccgtttaaaaataaggaaattgaagtttagaaacatgaagatttttctcagagtcctgagaacagtaacagaaccagagcagggagcatcacatgctcatggtccatgggccaaatccttcccgcagtgcctgttttttataaataaagttttattggaatatagccatacccatttgtttttgtattgactgtatctgttttcatgctatagcagcagagttgagtaagttgtgattatttcctcacctctgttggaaagtgacgccaacacactcccttcccttccttttggtagagtggatatcttaggcatcattgaaattcacgctgtgctgaatgtaatgccatacatagtgttttcagattgatcacattaaatttttagaagtggaagttaactcccttttctaattcaaagagttattatgagatactatatctggaatattttgataggtgtaaatgctatggcaatgtaaagtattatgaacctatattccttaaatagttttgtaataaatgagtaatttgagtatttctccacttgaattttaatacagtttcaggaaacaatgtgcataaatcccaaaaataataggattagaactgaactggaagggacctttatttatttcaactatttgttatttcaatgagatgactcaagtctggagacattcattcaatgatgtacctaaactaaagttagtgcagagaaattagtttaaaaacataaaaggtctagagattttgttttcttttcatttgttcacaaatactgattaaggttatatacattaaatgtaatccattgttttatttaatttgtagtctagtacaagagttccaaagcaggaagatacattaatagacattattcttgagatgttattttgaatttagattatttttcttattaaatctgaaaataactttttttttttttttttttgagatggactctcactctgtcacccaggctggagtgcagtggcgcgatctcggctcactgcaacctccgcctcccgggttcacacgattcttctgcctcagcctcctgagtagctgggactacaggcgcgcgccaccacacccaactaatttttgtatttttagtagagatggggtttcaccatactggccaggctggtcttgaactctggacctcgtgatccacccacctcggcctcccaaagtgctgggattacagttgtgagccaccacgccgggcctggaaacaacttttttaatacaatgttatttgcttaaaaataatagtgtaatattgtcaaactgtaaaatgagaatgctaactcttataagactcagagacatgtatacatatgtaacaaacctgcacattgtgcacatgtaccctaaaacttaaagtataataataataaaaaaagactcagagacatattatctatgtaccacgaaaacttaagaatgacaggaattccaaaagtttgacaattttgtcacagcatttaatctcctattcactagaatgtcttgaatgatgcttatgaaaatctaacacgctataaagaagcagtcaccagggcagtggagagcatcacttccctcgaagccatcattataccctacagagtagatgttggtaatccagaagaatctttagagatgcctcttcgaaaacaagaggaattggaatccacagtagcacaca

SEQ ID NO: 12498 - DNA, 2300 bp, Homo sapien
cacgcctataatcccagctactcaggaggctgagggaagagaatcacttgaacccaagaggtagaggttgcagtgagctgagatcatgccattgcactccagcctgaaacgtccatctcaaaaaataaaaataaaaaatgtaactagctgtataatattctaccatgaagatatgccataatgtgttaaaccaagcccctaataaggaatctttaaattacttttttttaattttcataacaacactgcagtgaatattcttatgccagaatctatattttcatctgtgactaattcattgagaaagatagtgagaagtagaatcactgggtcaaagaatatagtagttttatggctagaggtgctctgaagaaaaagcaaacttgttttttctctctacccttacacaccatgcaacaaagcacttctgacaccatgttggttatgggggttccccacacatcaggcagttctccagcagacaccaattcatttctcacactatccacccggagacagcatcagatcacacaggctgggggctcaatccatcccacaagaggacctctacttcagatgccaatcatcagtagtaggttgctacctatacttctccttttttttttttttgagacagagtcttgctctgtcgcctaggctggagtacaatagcatgatctcggctcactgcaaactcggcttcctgagttcaagcgattctcctgcctcagcctcctgagtagctgggattacacgcatgtgccaccacacccggctaattctttgtatttttagtagaggaggggtttcaccatgttgcccagggtggtctcgaacgcctgacttcaggtcatctgcccgcctcggcctcccacagtgctgggattacaggcgtgagccactgcgccccgctggtacacttctggctgataggctataaatcaagggatcctttgatacctttcttgggttcaattaatttgctagagtggctcacagaactcaagaaaacactttactcatgtttaccagtttattaataaaggatataatgaaggatacagataaacagccagatggaagaggtgcctaaggcatggtataggaaggggcctggggcttccctgctctctctaggtggtggaacccccaggctttcagcaatccagaagctctctgagccctgtcttttgggtttttttatggagacttcattatgtagtcatgattgattatgtaattggccattggcgatcaactcaaccttcagcttctgtcccctcccccagaggttgggggtgtgtgttggaggtaggggtggtactgaaagttccaaccttttaatcacatagttggttcccctggcaaccagccctcatcctgaggctactcaggatcccacctagagttgccttcttagaactaaagatgctcctatcactcaggaaattacaaagggcttaggagctctgtgtcaggaactggtcaaaaatcaagtattagaacaaaagactctcctagctagcactcctatctacaagggtattaagagctctgtctcaggaactacagcagagatcaagtatatatttattatatcacaatatcatagatacttaccaaataaccctcaggaaagattttacccacttcagtgcctcttctgatatttgctgcatccatagcaaaatgggtcagcttaagagaagaagcccagtgggattgtctgtccccaagagcccacctgtgattccattcacacctctaagtcattttcatgtgagctcaaggattacgtggagaaaaagagaggacagaaatgtcagttacagtgtaaagtgtgaaaagagagtatttgaggcgaaagatttggagaggtttttgattaagtggtagattttgtacctgtttttatatgtggtacatccattattgaaaattgttactttttttcttagaggaaataaccatcctttagtagctattcaggcatttcattaattgttgcaataaaactgtttcattttattcatagaagagcaggataaagaaacaattatattttgacgttctcttttaggcttcttcagaaagttcagaaaaataaagaattggtgcagactgaaatccaagaaagacattccttcacaaaagagataattgctttgaagaatttctttcaacagaccacaacttcattccaaaatatggcattccaggatcacccagaaaagtcagaacaatttgaggtaagtgaggaatgaattagtgaatgtggcaggtacaggcccacagtcttg

SEQ ID NO: 12499 - DNA, 2300 bp, Homo sapien
ccctcaggaaagattttacccacttcagtgcctcttctgatatttgctgcatccatagcaaaatgggtcagcttaagagaagaagcccagtgggattgtctgtccccaagagcccacctgtgattccattcacacctctaagtcattttcatgtgagctcaaggattacgtggagaaaaagagaggacagaaatgtcagttacagtgtaaagtgtgaaaagagagtatttgaggcgaaagatttggagaggtttttgattaagtggtagattttgtacctgtttttatatgtggtacatccattattgaaaattgttactttttttcttagaggaaataaccatcctttagtagctattcaggcatttcattaattgttgcaataaaactgtttcattttattcatagaagagcaggataaagaaacaattatattttgacgttctcttttaggcttcttcagaaagttcagaaaaataaagaattggtgcagactgaaatccaagaaagacattccttcacaaaagagataattgctttgaagaatttctttcaacagaccacaacttcattccaaaatatggcattccaggatcacccagaaaagtcagaacaatttgaggtaagtgaggaatgaattagtgaatgtggcaggtacaggcccacagtcttgtatccaaagtccttggggtagagataactcagtggctgggtttgggggagcggtctggggagagagagagaggcataggcaaaggccctgtggcatggtatgggcagaaccaagggagaagatcagtgtggctggagagcagagaacagagttgaaacaaggctggaaggtaggccagtctggaccaagcagccttctttcaactatgtttccagtgtgtttggtgaacaagggcctcagaccactcttaagtagtatgttacattactcctttagtaggacatggcgccttgtctctgacagggtctatgtacaccctacaggtcatctggaatctcatttcttcagaagaatctcctctttcattccagtccaatagtgacagcccaaaagtatgtttggaagtttattcaaaagtcacgtgttggccggacatggtggctcacacctataatcccagcactttgagaggtccaggcaggcagatcacttggggtcaggaggtcaagaccagcctggccaacatggggaaactccgtctctactaaaaatacaaaaattagccaggcatggtagcgtgtgcctataatcccagctactgggatgctgaggcaggagaatcacttggacccagtaggtggtggttgtagtaagccgagatcgtgccgctgcaatccagcctggctccatctcaaaaaaaaaaaagtcacatgctgtctaaacagaacttttggttattatattggaaagtaaagaagcagtcttcatggggaagccttctaagtgtacctctgaatgaaagcctgtactcctggactaggtgtagataaaacgggatgacacttacttattaaaccccatctttgaatggcattgttctctaactttctctctctagatttgtcctctgctgaggattaagaaaaggaaaacaatgacacattacagagtcatttaaaattgtaatcattcttcagtacagtgactcaatccatgaacacaaataatgctactgaacagctactgtaaaaacaaaacaaacaacaaaaaagccacagtcaagtcaagaagtatttttccacttgatctttgggaaactttcccatacaaatgagtttctcctttataattactgcaggagaaggtagatcagatttggtttctaggccacaaccaatagactatttgttcaggtttcttttatctcctaaaaacctacattctttgtatggaactggaaccttcccttttgaaagcagttgagctctgcagggctgtctaattacatgaaagtagacacttctgctccaagtgtggggcttttagtggccttaaatcattgtgatgataatggaggaagaagtagaaatagcaacacgttaaaacaacaacaaaaaacttctttgaaacttttttttttttttttttgctgcttgcagctttttagatcaggactgcaatggagatacaattaaatcctaaaggtactttagaagcagggggtgttgtaatgtcttttctagataatggtgtgacactatgaagagatatcaagtttaattcttacaaattagaaagcatcatctgactaaactgagtgtctctggggcttaatcagcttgtatca

SEQ ID NO: 12500 - DNA, 2300 bp, Homo sapien
aaaagcaatcacagaaattttgacttcagacagaataggggtattggcatagaaatgtgtgcagtacagccaggagaaagcccaggcctgtgctctgctgtgtgctagttgcagctttggacaaatcaccttctttctctggcctttagaactctctcttgcaggtggagacagattacgtttctctgttttgtaagaaaattattgcttctatgactatctgtaggatgggtggatggatgaactgacagcaagaaaggaagacataacaaggaaagaataggggtctaaggaatatattaggaacaaatttcaaacacatgaaggttttctaaaaaggagcaggctgcttctgatgcagtactcacttcaggagctcaggcaagttgaatgacatctctcagaggtgctagagaggaggatgttagtgtatttgtcacctgctgtttcttccaaagctaagaatctataatcctatagtcatctcagacatacagtgggcatctgcatatctgccatgaataagaaatttgatctgcacatatcaataatataaatgttaaaagtaacatcacgaagcttgagatcatctgtccatcattcccataataagatatactacatggtacctttatttgtttacctattcctatttagtaggaagattttactgtagaaaaagtaaatgattgagcaggatagactctgcttaaaaaaaaagtaaatgaatttagtaataccaaagaagccttcaaagatgataataaaagaatgagatttctgtcttcattttctctcagtggttcccaaatgttagtctgcttaagaatttcctggagagacatgggaacatgtctcctggggacatgcatttttaatatgctttgggacacaatggaaagtctgcataaggcacttatgcagtgttggttagtgtgcagactccggggccctgccccgtggatcctggttctctcagtcctgtagctggccactagagcggtagctcccaaccctggccgcacaccacagtcacgtgtggagcatgttacaagtttccatgctttggctcaacccgcagagattctgattcacaaggtctctggtaaggctgaggcatcctatagcttataaaccctacacaggacctttggaattgtatccaggatggaaaggagctataccgtaccagagactagcttctggctttgtaaaccaaatagcaaagaaaaatcttcagcccttgtaccaaaggaagcaggctgctctgggcctgcagaggcctcagacttctcaaacctatgcaaacactctttctacacagggagaaatcgaacgtatggagaaacagattctgagtttgaaccagagaaaagaagacctgttggtggacttgaaggccaccgtactaaaccttcaccagcatttgaagcaagaacaagaaggagtagaaagagataggctgccagctgtaacatcagaggaaggtggagtggcagagagggatgcttctgagcggaaggtgggtatgactttaggttaatgctggccccacactccacaagagcattaatgggtagtgttttccacctgaacgacctgtggcatctatgtctatggcctgtagtaaaggaattttttaaagtggaaatactcaacctgaggttgtttactagtgaatataaatcctcagggtgtgcctgttctggactccacccagaattcttaacacctgaattactttaggacatgcttataaaatttcacaggcaggtggatcaagcctccctttgaagtatcttcgtacagaaaagtcagccctttgcagactcaagaagggcccagtgcctaagtcttctctgcattcacatcaatgaatcacattctttaatcgtttatgaaggggcacagggggccatgaaaataacaagacctaaggtttgactgactccggatatctggctggaggagctgaacggaccaggagacaggcttcttgtgggggtgggcatcttggataaagtaagtaaaaaattagctacataaaaatgcagctggactgggatcttggtgatgttgactggcaagcagactgcaggtattcttgtgctgtgcctttcagttgaacagaagaggctccatgtcttacctggcagcagtcgaggaagaggtggaagaaagttccgtgaagagcgatgtaagggaaatgattttcttgttaaagtttgttagaaccagatctctaaaagaagtcaatgaaaagatcttaaagtgaatggaaacctaagaatttttaaaat

SEQ ID NO: 12501 - DNA, 2300 bp, Homo sapien
gctactaaaattatctaatgaaaaagaaatgaaacccaatactatttatgaatgaggcttgcccataaaaatcaagcctgaatctgaccaagctgctagaatccaagtaaaacagacacaagaaaagaagaacaggttaaacagcacactgggagtgcagtctgccaaatccagcctgtgggaaactgtactgaacaaatgacccattttttcacatacacacattcaagaaacaaaaaaagtggtcagggattctgcaggttaagagagatctaagatgtatttatccatcatgacatgtggacctcatttggatcatcattgaaacaaatcaaaaagaaaaattataggcaattagggatatgtgaattctgtctggatagttaaatcatattaaggaattattattgatggcaggggaggagtatgttggagtaaagagaaggatctttatcttttagaaatatatactgaaacgtatactgatgaaatgacttgagacctgggatttgcttcaaaatagcctgaaggaaaggagattaggtacagttgagagctggagggaggatgtagagggaagaaggtcagccatgaatcaataattgttgaagtttaatgatgataaaatggggatttctctatttttgtatttgtttgaaatttctagtgtcacaaaaattataaaaaccaactaaatataaaaaaagataatgaaggcctaaatgagattgctcagtttccgacatttatcttacagaatgaaataaagagattatatcatcagctcattaagagtaagacatctttacaacagtctttgaatgaaatcagtgggcagagtgttgctgaacagcttcaggtaatcaagtcaaaataattcagactgacttaactttgaaccacagagctttgcatataagccgtgcttctgaactactttcctttgtgagcagcagcaaggcttaagtaaataaataaaaaatgagaactatttatgttgactttttaaaaacatctcctaattttctgaagcacaatgtattaaaacaaaaggaggccattttcacttatcaaccatgacaaaatgtgtatgtccagtgttggtaagggtattggaaaatgagaccctcatcctcttgccaggggagccctggggatcctttgtctgtatatcagaattttaaacatgaatactctctcttccagcaataatttgacttcatgtatttagcaaatattaattgaggatccactatgttccagcactgtttgaagtgctgaacttgtactcctcctaaggatataagacaagtgcataaagataaatattttggccaggttggtggctcacgcctgtaatcccagcaccttgggagactgaggcaggtggatcacttgaagccaggaatttaagaccagcctggccagcatggcaaaccccatctctatcgaaaatacaaaaattagccaggtgcagtggcacacggctgtagtcccacctactccggaggctgaggtgtgataattgcttgagcttggggggcggaggttgcagtgaactgagattgtgccactgcactccagcttgggtgacagagccagacttttgtctctaaataaataaataaataagtcataaatatttaaggatggacccagcagctctgcttgaattaaaaactgtatatagcccaaaagtccattgagagctgactgataacaaaagcagggtacacccttacaatagcatgctgtgtgtctgtttcgaaggagctagatatgtgtataccaatgtgaagagatgctgaagagctggtgagtgaggaatgctaaccgcaggacagaatgctgtggtgcagttcattgagtttagggatatgcatgtctacccctactggtatggagcatgttaggaacttgggacctctggcaagattgttaaggagagcaggaggtgagggagcgggagctgggatttttgcttttcccttcatccctttctgtactatttaattctttttagataactatgtgtacttctctgacttactgaagggttttcttttcttgtattgtctctcacttagaaagcagatgcatatacagtggagctggagaacgccgagagccgagtggccaaactaagagatgaaggggagaggcttcatttaccttatgctttactccaggaggtttacaaattagaggtatgcctgagcagaaaacattgactcagcactgtgattgtgaggagccagatccttttcttccaccagcagagtttagatttgtctttcagt

SEQ ID NO: 12502 - DNA, 2300 bp, Homo sapien
ggtcattgtcattgttttggggtcgcttattctaagtttgaatgctgggtttgttttttttttgagtaacctgcataattatatagcaagaccttttatcaaaccagatatcatctttagtgatgctctgattcattttgttaactgcaggcaattaaatggaaatcattttgttcttacagcttcaaatggagaaattgccgtctcgtaaagcaatcacagaaatgattagctggatgaacaatgtggagcatcaaacttcagatgaagactccgtgcattcaccaagttctgcatctcaagttaaacatcttcttcagaagcacaaggtaattatgcaaaaggagcagaagtcttttcattgaaacaagaaggctaatcagaggggtaatgctggacaaagggacacataggatataatttcaaaaaactaattctaggggtaggaaactggggtggtggatgattctggagagatgttagtagacttgcttttgttccacttaaattccttttgccagcccccatcaccacaggacaatccaagcaagcttttaacagactgtggtctcacctttttatccccatcccaccacccccaataaccacagactctgcctgacagagtgattttgattccttaactgttcttggtgctctcccttatcatcctgtgtacatgctgcaccctctacctggaatgccagggcccacgtttaactgtatacgtcctcttagtcatcttccatagtcagctcgagttgtccttgtttgcaaatccacccctgactctcccagccagactaggtgactttcctggattagatgtctccatgatgctattagtagctcctatcatgcattattataattattggtttatttgcctgtctccccaccttgactgagcttctcgagaccaggggccatccttcaccttgctaaaatatagcacgcctatcccaatacctgccttcctctaacaggtgttaatgaaatgttctttgagtaagagaatgagtaagaaaatattgagatccttctacaaatagatataaatgtggccttctctgtgatatttaatttcaagtagatttaattaacatttcatgagccacatgcaaacgtgtattgtgtgctcagcactatgctggccactgggaatacaaagatgagtgacaagtgtggtcattgctttaagaccatgcaggctgatggaactagcttctggtaggcagaagatgaatggcttaatcaccaagcaagatattagcagagaattttgtttttatgtaccatcacatcctaacttcagtgtgtagtaaaatcttcgaaaagtctacacgtgtatattctcacaggctctagcaacctagcacataccacatgactgtcacccccgggtgtctccaaaagaggtgctagaacttgcagagataaaatcagtaagtgacaggtttggcagaaatgttgttggccctgggtgggtttaggattgctgtacaacttaaagccacccaaactttctaaagccacctgagaggccttaactatccccgaaggaacagggaagctgcctaaatgacagagttccttaaggtgtcctgggttttctgaaagagactttacttcctatttcccatctggttgtttccgtgagccctcaggatggcccagaattccagcacagctgacaggcagcctcccccaggaagctttgtcatatcctgggtcgtggtcagggttcagatgatagcaactgccatacatagtgcccctttgacttttcagcctatttgaaagcagtgcatctctgtgtaattccccaaaagaatccctactccaataaagccaactcctggtgtaggttggggagggtagaacagaactcctgacaggtgccccttgattaatggacgggagcttggtgccccctcgagcacataaagggaaatccatttgatctgaccaacattcatgactgctttggtgtttaactttgcttattttaggagtttagaatggaaatggactataaacagtggatagttgacttcgttaaccagtcattacttcagctaagcacctgtgatgtagaaagcaagcgctatgaaagaacggagtttgcagagcacctgggggagatgaaccgccagtggcaccgtgtacatggaatgctgaatagaaaggtgtgttcctgcgtcacaactggatgtgtggtttgacctttatgaaacacactttctgaaaaatcaaaaaagacgttcaattagttgactgattattaagcctaataatca

SEQ ID NO: 12503 - DNA, 2300 bp, Homo sapien
ggatgaagagttatgctatcttaagtgtccttcctgattattcctgtatgcagtttcagcctctcttgtaaatcaacttcgaacaagtaatgaacaagggaccccaaattatataccctgcagtggtgcccttagctcttgatccagtctttattggaagacggggaggagacagactaagaggaacctgcaaatgcatctgactccacatacaatatcagggctaccgtcaaaacgtatggcagggcagtctgttggtaaaggaactcagttgttacgctgcacgtacacattcacttgttggcacaagaatatgttggaaggcatgttgaaaaacatgcataacaaaaagactgaagagaagaacactaaaatgctaatagtagttacctctagataaatgagatgtcaagcattttttaacttcctcatggattggtaagtaggtaggatagatagataaaaagaaaaatatctggagggattttgtttgctttttgacagtgaatatatgttgtatttataattagggaaaatcttattttaaaagacagttctgataagatttttgaaatgcataaaagtaaagcagtgtgctattttccacctttgattctttaatcagcagggtcgaggatattgttgaggatattgtggagcaaacattctcatgtatttcatgttagaatgtaaatataatgctttcagaaaggagattgaccatttattcccaaagccttacaaatatttacatctttatattctttgactctgtaattctcccagaaatctagtctaagactaatatcttgaaatacagaaaaaaagccttttgaataaaactgtatctgagcattatcataatagcaaaaattacaaatatcttaactatccatactaaacaggaattaaactaaggaatttagcaattaaactaaggaaacaaagaaaaaaaaacccacagaccatttgtacagccacttaaaatgaggtttacttattttcttttattactaacgtggggaaaatattttttaaaagttaaatgggccaggcatagtggctcatgcctgtaatcccagcactttgggaggccgaggtgggtagatcacttgagtccaggagttcaagaccagcctgggtagcatggtgaaaccccatctctacaaaaaaacaaaaattagccaggcgtggtggcatgcacctgtggtcctagctacttgtgggggctgagatgggaggatcacttaagcccaggaggtcaaggctacagtgagctgagattgcaccactgcactccagcctgggcaacagagcaagaccctgtttcagaaaaaaaaaaaaagtagggaagaaaggcaagatactagagtctgtatatggaataataaaacaatttcctttatttccacttctatgtaaggaacatttgtgtaaacagataataaattttatttgatataaatacaaagttaaaacctgtttaaagatagcatatctctataaactgggagcctcttcatgtggagtcattttatcaggcatacagttcagtgttttctccatctttgccaaagagacattcataggcggggcgcaccatggctcacacctataatcccaacactttgggaggctgaggcaggaggattgcttgaggttggaggattacttgagctgcagagtttgagaccatcctgggcaacatatcaaggccctgtctctacaaaaaaaaaaaaaaaaaagtttgagctcccttcatcactcccctctcttaaaaaaagagagtgaaacattcataacatcataggtatttgttgccaatcatacattttgtagtttttgtgcaatattataaagtcaagtaaatagcctaatttggatttatttttatataatggtttctataatggtgatgccactaattttaaaaaccatttaacagtgtcttcttaatgatccatctgctagtaacttaccagtagagtgtgtgcattgtactttcgctacaagagaaaggagagaatgagggttatgttatttgcgttgcactgacaggtggactcaggtgaaccaagccattgcagaccagttgcagaaggcccagagtctgctccagctctggaaggcctatagcaatgctcatggtgaagctgccgcaaggctgaagcagcaggaagcaaagtttcaacagctcgcaaacatcagcatgtctggaaacaacctggcagagatcctgcccccagccctgcaggacataaaggtgggtacaaagcccatttggaaaaccaaggccaagt

SEQ ID NO: 12504 - DNA, 2300 bp, Homo sapien
atactgaagcggtagggcttggcacatgttctctgcttactcagagaggagggtcccatgagaggccttgtggaccaaataccaccaagtgaaccaggcgtgtaacatctttaatctcccagggtagatcaccggctgctgcagtctcaggcatacccacggcagaaactgggcagaagtcaggagtggttattttcacttaggaaaaaatggcatatcttctcacctctggagccccaggaagatgaactgggtctcaggggctctcactctgggaatgataggacttccatttgcatgggtggattaactctcagtccttttgaaaatcaacagaggcaacagccttgcaaagcttcacatattctctgagaactcgtatctggtgacatgagagttgttctgatataaaatcaaagcaaaatagattcttttttaccctgcaatgctcttactggcacattcttccaccactaagtattgggcttttgttttccatcactggtttttttttgtttcgttttgtttttctgcaaatatgtgtagggtgaagaagctgaaggagacctttgcttttattcagcagttggacaaaaacatgagcaaccttcgcacctggttggctcgaattgagtctgagctttccaagcctgttgtttatgatgtctgcgatgatcaagagatccagaagaggctcgctgagcagcaggtgggacaatcagaaatgagctcttgcaagagtacggtgtccgcgatatgcactgactgaggccttccccgtatatctatgtgttttcacgtgctcacattccataacattggtttgctttttccagagaaaactgaccacctttccatgttcttatatctgtctcttgagtgctccctcccacattcatgtagctttttgtgaaactgtgtgaatactgtttaagatgcaaaccttaatcttggtggttaatgagatttttttaattatgtctttttttaactgatctttgttgtgttttgttaatatagttttgaaaggcaatgaattgaaagaaaagcaacttttctaaccaaggaaggtttttatgggattatattctgtgtgtctggtacagcttttttaaaaaattaaaacaagaaaaggtgtgataaggaacatgcttggaccaatagtttaggaagcctcttaagagctgcaatgctctgtgcatttttgttatcagatatgcatgctctgagccaaccctggaaattgggcagtttgaaagctgctgagttctgccagtgtttctcattgtacccacctgacaggtgctctttgatgtcactggtttatcgaatccactttcctgccttccctggtctcatggccacatgctcattctcacttgtaatgcctggatatgtctttactttttttttaaatagctaagtttatcttattctttctttagcttttgttcacctgtttttctcagacctatgggcagattctgtttcaaccatagaagcagtatgattctcagacttgaatctgttttcttcatgttaagcctccaccacacaccacataccacaggtgcttggagaccggattgggggtgaacctttttcaccagatttaatatttgatactactgttgacatttttttaagagatggagtctcactatattgccccggctggtctttaacttctgggctcaagtgatcctcccaccccagcctcctgagtagatggcactgcaggcaggcgccaccatgcctggccctccctgctcttgacttttctaagtgctattacaattactgtttaaaagatacctgttatctggctttcaaagtgatatgatttagtaatgctacaaattaaaaatactggtttttccacttagccttggaactttaagcatgtctttttcatggaggtcatctaggctctgtctttgctttgtgcagaaaagaatattgatataagtattatggaattttaatggacattacagagattttaatgcgtctctcattggagtcacagctactgaacacatcagttttacttacaagtgtgatccactaggatgaatgtctttgaacagactgtgaaaaggcaaggccttgcaaataacaatttaccctgagtggtgagttttttcaggtagattatatggaagctgtcagtatctttccccttaaagaatggctggctaaattttgcaggggctgttgattgtgtgttaattttttataaatccgaagtgtgacagaacattaaattgcagagaatttgttcccaaaagcatacagtt

SEQ ID NO: 12505 - DNA, 2300 bp, Homo sapien
caacgtggagcacttctcagagagtgacgccgatgacaagatgcgccaactgaatgtgagggctgctgcttccctagctcttctcaaaagaacacacctttgcgtgggagagctggccaagtgcaaatttcacacgatactctgagagcaaatttcagaattcttaaagcagccaggctacatcccacctgtgtactaccagattatcacgtgcaaggatactgttctttacggtccaggagtatgggtgtcaccagtggggccaagaacagaggtccgctctcccattgtttctgatatctgtatgacaggctaatctcactgtaattctctccttggccagattttggaagaggttgagaaatggaaatttgccttccctagtataacagcaccagtgaatattattgtgtcagcaaaagcaaatgcccattcgtggcttattatgggaaatgttctgttcccaacaagttttgccatggcaagttctttctctcacacctaataacagtaaatgtccacccgtgtcaaacttttagaattattttaattggaaaagccagtgcccgtgagggggaatatagacaatcacttaaaattcttaaaatgtcattgtcacttagttaaaaactaaagctagagtagtaggtgaaggaaaacaacaataatgacatttggatgcttttctatggccctgttagaagaaacaggcagtggaagctcagggtaactttctttgaaatcctttctttctcctctctcaacagggcttccaacaggaaattacattaaataccaacaagattgatcagctcattgtgtttggggagcagctgattcagaagagcgagcccctggatgctgtgctgattgaggatgagctggaggaactccaccgctactgccaggaggtgtttggaagggtctcccggttccaccggcggctcacctcctgcactccggtacgggcactgctgcctagaaatggcacctgggctgctcagagtttacgtgagaccaaatttttaaagaattaggggacctgtcttataatggttaattatggtttattttttggttgaaaagaaagggctatatcaaaacattttaatttccacttttattaatatagagccacagtaacttacaagttcccattccccagtggaaagcatggcacttctgaggcgcatgctccacgagtcgcttttaagtattcctcagggctgggcttgtctggcatgcgtcactacccctagaattcttgaagaactcttctggcttttattacattagtaacttaggaatgtatttgcccttccctctttcttagaggctggaagcttttagtatttgtgcctttctgatgctttgttctcaccttggaagagaaaacacaagagtttcaaaagcaactttgatgtttccccagacgaaaggcccttttgggaagttcaggtggagttaaggccactgttcaaagcgtactgcctttgtgtgcctgaagcttgaatgacaaccattgaccgatacgactggccactctttctttttttgtgtctccaactggccacattcaaatgtagttatttcatcagacacagcctcaaaaattaccccacaatttctcatttttaagtacagccacttagagtcatttttcttagactgaaagagacgttatgacacaagcagaatacagacactgagcaattaagttggaggataagaaagaaagaacctggtgcatctggttgaagtttgagtcttacccagaacattcaaatgtccttttcaaaaatagtctgattcttggaggaacctgccattaaccatcaatgaaactttggccaccatttccttatctcctagataaagttgtttaacttagattatcaaacttcagcttttttttcctaagaaaaaatagctggaggtttgggaaaataacagattttaggccccactccagattgtctaaactggaataaccagaaacaggacctgggaacctgatctttttaaagctgccttagaaatactattggcagttatttttggaaactgctagataggcagacttctcatgctcttctaattgcagaagcctatgagttgattaattctaacaactggatactgtggtttagggcttggaagatgaaaaggaggcctctgagaatgaaacagacatggaagaccccagagaaatccagactgattcttggcgtaaacggggagagagcgaggaaccgtcatctcctcagtccctgtgtcatctagtggccccagggcacgag

SEQ ID NO: 12506 - DNA, 2300 bp, Homo sapien
tacattagtaacttaggaatgtatttgcccttccctctttcttagaggctggaagcttttagtatttgtgcctttctgatgctttgttctcaccttggaagagaaaacacaagagtttcaaaagcaactttgatgtttccccagacgaaaggcccttttgggaagttcaggtggagttaaggccactgttcaaagcgtactgcctttgtgtgcctgaagcttgaatgacaaccattgaccgatacgactggccactctttctttttttgtgtctccaactggccacattcaaatgtagttatttcatcagacacagcctcaaaaattaccccacaatttctcatttttaagtacagccacttagagtcatttttcttagactgaaagagacgttatgacacaagcagaatacagacactgagcaattaagttggaggataagaaagaaagaacctggtgcatctggttgaagtttgagtcttacccagaacattcaaatgtccttttcaaaaatagtctgattcttggaggaacctgccattaaccatcaatgaaactttggccaccatttccttatctcctagataaagttgtttaacttagattatcaaacttcagcttttttttcctaagaaaaaatagctggaggtttgggaaaataacagattttaggccccactccagattgtctaaactggaataaccagaaacaggacctgggaacctgatctttttaaagctgccttagaaatactattggcagttatttttggaaactgctagataggcagacttctcatgctcttctaattgcagaagcctatgagttgattaattctaacaactggatactgtggtttagggcttggaagatgaaaaggaggcctctgagaatgaaacagacatggaagaccccagagaaatccagactgattcttggcgtaaacggggagagagcgaggaaccgtcatctcctcagtccctgtgtcatctagtggccccagggcacgagcggtctggctgcgagacccctgtcagcgtggactccatccccctggagtgggaccacacaggcgacgtggggggctcctcctctcacgaagaggacgaggagggcccatactacagcgcactgtcaggtaacagctgggttcccagcaccctggaaagtgacccgtttggctatgtttttagccccttagcaacacggccagctctcaatgaccaagagtccatcttgtggccgaccctgacttctgtggtttcctgtgctctatcctgcccatctcttaacttacctgagaattggctcactctcatcacaggtggaatgaaagggggaaaaaaaatgaaattcacattcagacactaaggttactcagtgatggctctggctgtctgggagactcatcagtgatttttttttgatacagggtctcacactgtcacccaggctgaggtgcagtggtgcgaccacggctcattgcagcctcaacctccagggctcaagcaatccttccacctcagcctcctgagtagctgggactataggtacacgccaccacacccagctagtttttaaattttttgtagaaacaaggtcttgctatgttgccagagctggtcttgaactcctgggctcaagaagtcctcccgcctcagcctcccaaagtactgagattgcagacatgagccactgtgcctaccctccctttcagttgagtttctcagagtgtctgcagactgagcttctccctttgatacccagtgtcctgctttggacagtcaggagttggctggaaaaaaaaatctttctggttttcaaaatccttttaattaaaaaaataaagggtagttttctccttccagctgacaatgtttctactgtgtgttaatacttgggcattaatcttcaggcacctccagtgaggcaaatgacattgttctttttcagatgtagaaatccctgaaaatcctgaggcatatcttaaaatgaccacaaaaactttgaaagcgtcttctggtaggcccccgcccatgcatgtgtcaacatggcagcatcctgtggcgcacactgcatcctcaacctcgctcccatgtcgtgtctacctctgccttctgtggacaccatgcgccttggtccttgtgtcatggtgtatttacactgccgtactcacccataactgcgtgctccttacaaaaccccatccaagccagagccgtctcgatgccaaccccctctcctcccttcaggcctgtgcagagggaatttttcatggtgcctgttttgatgatttttt

SEQ ID NO: 12507 - DNA, 2300 bp, Homo sapien
ctactattacctccaggcacggatggtggcaaagaaggcccgcgagtcctgaatggcaacccacagcaggaagacgggggactggccggtatcacagagcagcagtcaggtactgcctgtaactggcagtcgtccagagaggcagagtatggtatttaagtccttgctcaagagaacattcattagatattaaccaactatacgattcgccagaactgggggacttaccctacaacaaccaatgttatttttaaatcagcgattggcattcacgaacaaattcctaggctgttcagtgtaatttgaaaactattctttaaatgttggtaaaataagcctcctgaggaagtgcaggttttcactttctatatttgtgtgtaaagatcagacttgaggatgatgatcagtgttatctcaagtgtctcttcattcgaccagcccagtaattataaaagtaattactcaactaaatctaaagctgacagcatcgacctggtcatttgtggaccaaaggagaaaactgaaaaaattcagcaggaactgaactgttgagcttgaaactgtagcacatagaccttccacttcattccagcctctgtgggagtgtacgcctcagatcatgtgctattccacattccaggagaagagagaactcccaaaaccagacccttctgtcaggggaatcccctacagtttttttgttttttttttttttttttttaaccaccctgacccctaattagctggaggcagagaaatctgttgcattattgctttttttaattggcgattttttaattccaggtgccttcgacagatgggagatgattcaagcacaggagcttcacaataagctcaaaataaaacaaaatttgcaacagctgaactctgatatcagcgccatcactacttggctgaaaaaaactgaagcagagctggaaatgttaaagatggcaaagcctccctctgatatccaggaaatagaactgagagtgaagagactgcaggtgagttagaggtgtggtggggaagagggattcagaatgtgcatgtgaacgcattgctatgctggacgagcagatcccatgtattcgtggcataggcgcagcttgcagatggtgtatgtagaggtcactctcttccatttcagttccatagttggcaaggacatagatgcagatttttgttttcacatggaagagtatctgcaaatgatcctgatcccagagtactggggaggtgtggctcagatctccagagatggaaaaatctgacatccgaggcatttctagacttttctggaggtgctagtggacactgtcaggcagtgtaaaaccactcttccaaactgtatgctgcacagttacacgaaagactagtggtggaatcttccttgaaagggcttgggaaaggaccggctcacctactgatgaatcccgtggcctgacctcattacccttttatgcaattaggatgtgtcacttacataagtcctgaccccactggaactagcccagggagctgcaaagggacagtttgagccctgcgctttaagggtgccatgagcagtagcctgagacccagggcaggggttttggaggatccaggtacctttcatatttgtacttttattttactatctgtgttaatatattaggggttaccattcctcctaaggaataacatttctggcatttctaggagcaaatgcagaataaccacatatactttatctggaagacctttagtcggtccagaaacattaagccagttgcagagcggggcctgtagaggtcagcagggtctcctccctccagcaggcctctactttggggccctgttggccaagttcacagaccttaaggcagctccctcacctgatgctttccagccagtcccaggcgaggtcactctcatttctgtggccgcagcttggaaaagtgtgtggaaaatttgttccctactgaggttcaaaatgagcccctcctccctactttcagagctcctaacctcatcttttctctctctggtaggagatactgaaagcctttgacacttacaaggcattagtggtctctgtcaacgtgagcagcaaggaatttctgcaaaccgagagccccgaatccacagagctccaaagtagactccgccagctgagcctgctctgggaagcagcacagggcgcagtggacagctggagagggggcttacgacagtcgctcatgcagtgccaggtacgctgactcagcagcccgcctcccagagccggtacccaggcccacgtggtaggagcagcagat

SEQ ID NO: 12508 - DNA, 2300 bp, Homo sapien
tgtttaaccttcctgaacattcattttctcaagtataaaatgggggtaatagaatttgccttataggcttgcgtataaaataagaattattgagagaaagcggggcataaatgtccaataagcggtagctgtctatgaagccactgttgttactgggttcctttctcactaggtggcttcaggtagctgacagaagctctgtgagcctcaatttcctcactggaaaagtggagtcaatatctcactgagctggtgtgaggattaaatgagatgctgtgcaggtgcttagcacagcgtcaggtatgatgttaatattgatagatgcattttcttcaccctcacctatctttttctgcctgttggcttatggttgaaattccttcatgacggtttccatttccagagatatcttgttaacaagtatataccaccaaatgaagctgatttttttttttttttttttttttgagacagagtctcgctctgtcgcccaggctggaatgcagtggcgcgatcttggctcactgcaacctccgcctcccatgttcaagcgattctcctgcctcagcctcctgagtagctgggattactggcatgtgccaccacgtccagccaatttttgtatttttagtagagacgaggtttcaccatgttggtcaggctggtctcaaactcctgacctcgtgatccacctgcctcggcctcccaaagtgctgagattataggtgtgagccaccatgcctggccatgaagctgatttttttaaaccatcatttaacattttctccataaggtggcaaggaggaagagcatatggggactgggtactttgagagaccccaggacaggagacagggaggctgagattggcatgttgtctgctgcagttatttgccagcgacacactcttcccgtccaaactaacttctctgcctcaaggacagggagactctgcctttcaacctgagagaaaccaggactctcagctttaatgaaaattggacttagggtggggcagtggagacttttcacagctattgtttagctgatgaagcagatgcttctccatctttggagcctgtcttcattacctgtggacctcatctttatcaacccagagcacacttgcgtctctctattttggctaaacaccaaacagctgaggctggtactgtaaaactttccctccaaatgccccccctcgtcttcctctattagagatctggatcacaaccctcaaaaaccatgtcccttatgccacctgagtagatggtttgatgattaattaggcacagatgtgacactggggggttctcacaatggcctgtgggtcacatgctactttccttttcattttcatcagcaacagctgccttaaagccagttaagactgtggtcctagtctcgcaccctggggctcctgctggggtgggtgaggggaacaccccattaagctgggggaactggggctgccaccagggggcgcgaggggccttcgcccgagaagaggggtgggcaggtgcctccagcggagaagggcgccgtggccggaggcacaggtctccccggtgccacttcaagtgagttcgaggaagtacctgggatctttgatctaacgcgaaaggccttcccagtgacctcttgagagctgagaacccactccctccacctctagtccacggctttgccactccagggcccgaggttacgtttgctgctggggatttgacaaacccaaagcctctctggtttcaccactggctccttagaatcagacatctgttctgaatgacacttatgtgagtcaggggctgaggacgtgatcctcgaagtgtggtccccagactggctgtatcagtgtcggcatcccccaggacctggttggaaatgcatattctcaggccctactccagacctcttaaatctgagactggggctgcggggagcgccatctgtgcgccactatccttgtgggtggaccaggagtcggttcgagggtgctcccacttagaggtcacgcgcggcgtcgggcgttcctgagaccgtcgggctccctggctcggtcacgtgggctcaggcactactcccctctaccctcctctcggtctttaaaaggaagaaggggcttatcgttaagtcgcttgtgatcttttcagtttctccagctgctggctttttggacacccactcccccgccaggaggcagttgcaagcgcggaggctgcgagaaataactgcctcttgaaacttgcagggcgaagagcaggcggcgagcgctgggccggggagggaccacccga

SEQ ID NO: 12509 - DNA, 2300 bp, Homo sapien
ggagggggggcggtctgcggggagggggacggggcggcctcgcgggagggaggacagtttcgcgggttcgggcggcgagtctcccggatgctcctcagctctggggacgcggtgcagaagtgtgagggcgcccggcttccaggcagtaatgggcgggtccctgcgcgggagcgtggcgggcgctggactctacagcagatgtggaactggagagcttggcgcgccttccgactttgtcacacacctgcgccgccagactggggtcgggcccctccgcgttctgctctggagtgcctgggtctgggcccagcaccgcgcttttagaatctcctcagctgaatctgacgctcagcagtgggtgaagcgcagccccctgtttcaggccctgccgagctggaaggagtgtcagagctggagcgcgcgtggccccctctgtgttggggtcaccccggggttgccagggctcagggagggtcgtagtctggattttgtcacccgcacgtccccaccccccagcaggtctggggttggagaatccacgcgggcttcataagctagatgccagttaactgtcgagaggggacgctccctcctcgtaggcgtccacactggagaaggaataagatgggcgattgcctgggaagcctgacagggcggcggcagctgggatgctggagaggactggccccttgagttactgagtccgatgaatgtgcttgctctgctggaggaaccgcgctcaggttacagtcatcccaatatggttctgaaggtgcgtggttcaggtcacttaggacttgaccagataccgggtttcttttacaagccgtttctgacggtggcctgtttcaactactggcagagctcatgtaaaacagacttttaaaaaaatttggggggcttttagtatttttttcttattcctatattctgaggatattttatagtagtcccacatatggaattagataatctcttttttgtttgattaacagttttatcaagtataatgtacataccataacgttcacccattttaatggattcaatgatttttagcatatttacagagtggtgcaaccatcagcataatagaattaaggaatcgtgattttttttttctggtaattgcttttacagttctcaaagtttgcacaagcggatattttagaggtacagtgtaatataagagcttctgaaaatgtccacttaagttgttttatacctgagcaagtgaaattaagaagggaattgaagcaaatattcctggtaagttgtagggagtgaaacttttgtgtcttgtaataccaagtagatattgaccatttcaactggtttttatgctgaggaaatgcataaaccccattttacagatgatgaaatcgactttgaaggataagttgcctacagctgcatacctgtgcctgggctaggccccaaacccagatgctttatctctcaatttgttacccttgctacctcaacagcttggttttcaaccatggtactgatgagtgtgaacagtacaagccattcatttactgagcaaataattattgagtgccactctgtgccaagaacactgctataggtgctagagatattattgaatcagataccgtagtgaactgttcctgccctcagctcatcttctggtggggaggacaatgatcaagtaaagaaatatatagttttagagattcatctatttttttaataggtaaattaaaagggcaaggaatggcagtgggaggcagaatctgatgagaaaaatctgaatgaagagaggaagttaggatataagaaagaaagcaagggtttgatttgagcaagcgcaaaaatagagttgtgatttactgaattgaaataaggtgatactggaaggaccaggttttgggggtacaatcataagtttggctttaaatgtttttaaataccttgcctcttagacatccaagtggagatatggcatttaaattcatgagattggatgagatcccaccaaaggaacaggtttaggtggagacaaccaaataccgatgcctaggacactgcagtgtttagaattcaaggagatgagaaggaaacaggagggaagattgaaaagaagagtccagtgtgttatgaggaaaaccccaagagcatgctgccttacaagacaggtgaaaaatgtgttctgtgaaagaaagagtaattaactgttaaatgttacagactgatcaaataaaatgaagactgagaatggcctgtttgtaaggtaataaaaatacataaaatcttatgatagaaatatttataca

SEQ ID NO: 12510 - DNA, 2300 bp, Homo sapien
gtgtgcatattctatacaaagacatttacaatattactaacggtggcattgttcattattgccggaaactggaaactacccaaatgaacaatggtggcttaagtatggcaatcagatccattagttaagcattcgatctcatttggggttggacagggagaggtcaactggagtgctgaatttttctgaggccaaactagaaagtaactctaggagctgggcgtggtggctcatgcctgttaatcccagcactttgggaggccaaggcgggcagatcacctgaggtcgggagttggagaccagcctgaccaacatggagaaaccccgtctctactaaaaatacaaaattagccaggcgtggtggcgcatgcctgtaaatctcagcaacctgggaagctgaggcaggagaatcgcttgaacctgggaggcggaggttgccgtgagccgagatcgtgctattgcactccagctgggcaacaagagtgaaactctgtctcaaaacaacaacaacaacaacaaaacaacaacaacaactactactctaggaccaggactgggagatggcaaataggggagagcatggagttccactaataaaatggtaatacactaacagtggagaaagcaatgggcttgtaaggagaacttggttcttgttgaacatccgtcactaatcagtcttgcaacccttgatcaagtcttgtcacctcactaaactcgaattttctttatctcaaaactagaaagaaatcgtggcctggatttctgaattatggggtttcaggcagccacaagtaggctggcagaaatgttttctggtcaaataaaggagtctgttgccccagaacaggagccaggggcacagccaacagtaaaattctgcttggggccccattcctcagctgcaaggtacttgtcttcaggtgtggcaggctgagatctgcctccttgttcccggcctatcccgctgggcccctcccctgcaagtgttcgcttccatacagagggaccattagggcctgtacatcgtacttcaggtcccctcctgtggtccaacattccctaggggcaagtgcaactgtttatgcggagaccacttttccgtgcagcccaactgaaggtgcacgttccaccgcaacctggtgcttacaacagctcgggaggccgcgctaccgcgcctgcgcccctctgaatatggaagcgcgcgcgaggtccttaagggaaaaggaagtaagggcggggacggagggagacgacttcaacgtagggagttgctgctgctacactgccggccggagaggacaaggaaaacgtggaggaagtcggtgatgactggctgaaggggatgattggcgggtgaaaagagccgggccagaaagcacctttgcatgtggctagaaacccgcctgaagaggggctgaaacccacgccggaacccgcccgattcgagccaatcagggagaggagccgggtgggggggcggacggggcggcctcgcggggggtggacggggcggtctgcggggagggggggcggtctgcggggagggggacggggcggcctcgcgggagggaggacagtttcgcgggttcgggcggcgagtctcccggatgctcctcagctctggggacgcggtgcagaagtgtgagggcgcccggcttccaggcagtaatgggcgggtccctgcgcgggagcgtggcgggcgctggactctacagcagatgtggaactggagagcttggcgcgccttccgactttgtcacacacctgcgccgccagactggggtcgggcccctccgcgttctgctctggagtgcctgggtctgggcccagcaccgcgcttttagaatctcctcagctgaatctgacgctcagcagtgggtgaagcgcagccccctgtttcaggccctgccgagctggaaggagtgtcagagctggagcgcgcgtggccccctctgtgttggggtcaccccggggttgccagggctcagggagggtcgtagtctggattttgtcacccgcacgtccccaccccccagcaggtctggggttggagaatccacgcgggcttcataagctagatgccagttaactgtcgagaggggacgctccctcctcgtaggcgtccacactggagaaggaataagatgggcgattgcctgggaagcctgacagggcggcggcagctgggatgctggagaggactggccccttgagttactgagtccgatgaatgtgcttgctctgctggaggaaccgcgctcaggttacagtcatcccaatatggttctgaaggtgcg

SEQ ID NO: 12511 - DNA, 2300 bp, Homo sapien
agattggcaggcaagattactgtagacaaagaacagagaaataagacttcaggacagacagtacaaggaagtaaagacctcttggagaagaataccttgtttgtaacaaagtgaaactctttgaagaggaactgtctaaactacttgtttttaacatatataacagaaatgtgtacatattcttttttaaatttttaaattttattatttttttggagacagagtttcgctcttgttgcccaggctggagtgtaatggcacgatcttggcttactgcaacctctgccccctgggttcaagtgattctcctgcctcagcctccagagtagctggtattacaggcatgcgccaccacacctggcttattttttgtatttttagtagagacagggtttctccatgctggtccggctgatttctcgaactcccgaactcaggtgatctgcccgcctcagcctcccaaagtgctgggattacagacgtgagctacctcgcctggccagaaatgtgtgcatattctatacaaagacatttacaatattactaacggtggcattgttcattattgccggaaactggaaactacccaaatgaacaatggtggcttaagtatggcaatcagatccattagttaagcattcgatctcatttggggttggacagggagaggtcaactggagtgctgaatttttctgaggccaaactagaaagtaactctaggagctgggcgtggtggctcatgcctgttaatcccagcactttgggaggccaaggcgggcagatcacctgaggtcgggagttggagaccagcctgaccaacatggagaaaccccgtctctactaaaaatacaaaattagccaggcgtggtggcgcatgcctgtaaatctcagcaacctgggaagctgaggcaggagaatcgcttgaacctgggaggcggaggttgccgtgagccgagatcgtgctattgcactccagctgggcaacaagagtgaaactctgtctcaaaacaacaacaacaacaacaaaacaacaacaacaactactactctaggaccaggactgggagatggcaaataggggagagcatggagttccactaataaaatggtaatacactaacagtggagaaagcaatgggcttgtaaggagaacttggttcttgttgaacatccgtcactaatcagtcttgcaacccttgatcaagtcttgtcacctcactaaactcgaattttctttatctcaaaactagaaagaaatcgtggcctggatttctgaattatggggtttcaggcagccacaagtaggctggcagaaatgttttctggtcaaataaaggagtctgttgccccagaacaggagccaggggcacagccaacagtaaaattctgcttggggccccattcctcagctgcaaggtacttgtcttcaggtgtggcaggctgagatctgcctccttgttcccggcctatcccgctgggcccctcccctgcaagtgttcgcttccatacagagggaccattagggcctgtacatcgtacttcaggtcccctcctgtggtccaacattccctaggggcaagtgcaactgtttatgcggagaccacttttccgtgcagcccaactgaaggtgcacgttccaccgcaacctggtgcttacaacagctcgggaggccgcgctaccgcgcctgcgcccctctgaatatggaagcgcgcgcgaggtccttaagggaaaaggaagtaagggcggggacggagggagacgacttcaacgtagggagttgctgctgctacactgccggccggagaggacaaggaaaacgtggaggaagtcggtgatgactggctgaaggggatgattggcgggtgaaaagagccgggccagaaagcacctttgcatgtggctagaaacccgcctgaagaggggctgaaacccacgccggaacccgcccgattcgagccaatcagggagaggagccgggtgggggggcggacggggcggcctcgcggggggtggacggggcggtctgcggggagggggggcggtctgcggggagggggacggggcggcctcgcgggagggaggacagtttcgcgggttcgggcggcgagtctcccggatgctcctcagctctggggacgcggtgcagaagtgtgagggcgcccggcttccaggcagtaatgggcgggtccctgcgcgggagcgtggcgggcgctggactctacagcagatgtggaactggagagcttggcgcgccttccgactttgtcacacacctgcgccgccagactggggtcgggcc

SEQ ID NO: 12512 - DNA, 2300 bp, Homo sapien
atagtcaatacctatttgatagtataagacaaaagattcactatctgcaatttaccagaaacatttccttcaattttcttcttaatttcacttgtttaggtacaacacaatatgagacaatgtgttttagggttattattataatgacattatattactaagtctgtgcctttaacatatcacttgtgcaaactttaagaatagtaactttaaggccacgcacggtggctcatgcccattatcccagcattttgggaggccaagggagactaatcccttgagatctagaccagtctggtcaacatagtgaaaccccaactctaccaaaaatagaaaaattagccggcgtggtggcatgcacctgtggtccaagctactcggggggctgaggtgggaggatcatttgaacccgggaggcagaggctacaaagagcggagatcatgccactgcactccaccctgagcgacatagcgagactccgtctcaaaaacaaaaaaacatatattagaaataattaccagaaatagaaaatcacaagagattatctaatcccgtatatggggctactataaataacctcagaatttagaaataagaaaaaaatattaaaagccccaaaattaataaaaaatcagttttaggccaggtgcggtggctcacgcctgtaatcccagcactctgggaggccgaggcgggtggatcacgaggtcaggagttcaagaccagcctagccaagatggtgaaaccccgtctctactaaaaatacaaaaattagccgggcgtggtggcgggctaattaggtggtgcctgtaatcccagctactcgggaggctgaggcagagaactgcttgaacccgggaagcggaggttgcagtgagccaaaatcgtgccactgcactccagcctgggcgacagaatgagactccgtctcaaacaaacaaacaaaaaaagttttagatgagctctgccagtagtaaacggcttgtaaaagaaacccggtatctggtcaagtcctaagtgacctgaaccacgcatcttcaggactctactgggatgactgtaacctgaacgcggttcctagagcagagcaagcatattccttggactcagtaacacaaggggccagtcctctccagcatcccagctgccaccgccctgtcaggctccccaggcaattgtccatcttactccttctccagcgtggacgcttaaggggagggagcatccctcctcgagggtcaactggcatgtagcttacgaagaccgcgtgagttctccaaccccagacttgctgcggggcggggacgtgggggtgacaaaatccagactacgaccctccatgagccctggcaaccccggggtgaccccaacaccgatgaggccacgcgcgctccagctctgacactccttccagatcggcggggcctgaaacagcgggctaagcttcacctacggctgagcgtcagattcagctgaggagattctaaaagcgctatgctgggcccagacccaggccctccagagcagaacgcggaggggcccgaccccagtctggtggcgtaggtgtgtgacaaagtatgagggcgcgccaagctctccagttccacatctgctgtcgagtccagcgcctgccacgctcccgtgcggggacccgcccaaaactccctggaagccaggcgattcagaccccgccaccgcgtccccagagactgggcggaaaccggagactcgcctcccgaacccgcgaaactatctcccgcgagactgccccgccccaaccccgccccgcaactctactccctgattggctggaattacggccggattccggagtcctttccagctccctcttcggccgggtttcccgccgaatacaaaggcgcactgtgaactggctctttctttccgccaatcatttccgccagccattcatcaccgattttcttcatcttcccctccctcttccgtcccgcagtccccgacctgttagctctcggttagttaagggactcgggtccttccgaactgcgcatgcgccaccgcgtctgcagggggagaagcgggcaggggcgcaggcgcagtagtgtgatcccctggccagtccctaagcacgtgggttgggttgtcctgcttggctgcggagggagtggaacctcgatattggtggtgtccatcgtgggcagcggactaataaaggccatggcgccagcagaaatcctgaacgggaaggagatctccgcgtaagcacctgacattgttgttgagtgtggggctgtggacgagggctctgagggtgtgc

SEQ ID NO: 12513 - DNA, 2300 bp, Homo sapien
ttttccatgttggtcaggctggcctcgaacttttgacctcaggtgatctgcccaccttggccccccaaagtgctgggatttacaggcgtgagccactgtgcccggcctgttcaagagttttatacacccctaacaccttacccagaggttggtgggtgggactgaaagttccagccctctaatcatttggtctttttggtgaccattcctttcctgaggctgtctaggagacctaccataagtaacttattaccataaactcaggtgtgatcaaaaggagtttgtaatgaataacaagacactcctatcacccttggaattccaagagctctgtgagccttttgtcaggaacccatgacaaaggtcaaatatatttcctattacactacacataccaaaagccagaactgagggtacactaaaatgttaacagtagttagtcctgggaggtcgttagttggttagttgcttggtctttgccatgttttttgtggttatataattggatagatattctgtcatcagaataaaaattctctctgctaagtgtgctatgtttcctaaatttccagaccaggcctggcacccagcgtgtttcaaaagatatttgcacttgccctgatttgatggctcctgcatttcttacggtggtggaaagtcaatgagtcatcatcccacagaacaacaacacaaacctcagtcttttgaaaaaatgtagactgctctgtttttcttatatgtggaatatgctttaaaatagattccagatttctagttaactgtttgaattctctagatgggataaaaccaagccattccacattcctttgctgtaaaaataactcctgtgtatttatggtatatgaacatcatttcttaactttaacacatattctagctttgccatccattttgaaatattgatagacaatcatgaaattagacttattgctttaaaactctgctgcttcctttaactttgtggtccttttactcaaaatcgttctatatcttgcctgtctgctgtagtgttggataccaatgatagattcctgaggaagatcacgattggacaggctccaacggagaagggtcacacacggacggtaacaatttgtccctttccaaggaaattagttcagaggcactagatcttgctgcttctctcctcctccatcctctctcatacgactgatactgccaggtgttgttctgccttctcccttttaaaatggaagtgagtaggtgtgtggcattgagcactcctgacagcttttgcaataaatcccatgtgtcacctgtgtgtttttcccccggcattttttcctggaggtggagagccccaagtgaatatccttgcatagaaattgattaaaattgcttcttttttgtggccatttcactgtatatctccttggtttaagaggtaccatattattcccttgtatatgaaagaaacaataagcgcatgattataagcggccttcatagggataaaatcatagctttttggtcctactataacatttattttaaaaaactgacaactcagggctgggcgtggtggctcacgcctgtaatcccagcactttgggaggccgaggcgggcggatcacttgaggtcaggagttcgagatcagcccggccaaaccccatctctactaaaaaaatacaaaaactagctgggcatggtggcacgcgcctgtaatcccagctacttgggaggctgaggcgcgaaaattgcctgaacccaggaggtggatgttgcattgagccaagattgtgccactgcactccagcctgggcaacagaccgagactctgtctccaaaaaaaaaaaaaaaaaaaaaaaatgacaactcagggtcttggaataattaattaatatatttttttgctattagaggattattttcattaagtattttgggtagtattctgttattctatccttttaagctatttgtttaagcctcagatgtaaaagaggatcacttttgcaattcacacttctggtttaacacaaagtttttgctagtacctcttttccctgcccacaggcccagtttgatatctctgtggccagtgaaattatggctgtcctggctctcaccacttctctagaagacatgagagagagactgggcaaaatggtggtggcatccagtaagaaaggagagcccgtcagtgccgaagatctggtgggtacccagacacgccaggcttggcgacatatctgtgtctgttgtcctagggtctttcagcagttattaataacaaaatgtaatgctgtacttaaga

SEQ ID NO: 12514 - DNA, 2300 bp, Homo sapien
tttaaaagaaaggcaagtgaaggccaggcatgggggctcacacctgtaatcctagcactgtaggaggtcaaggcaggaggatcacttgagctcaggagttcaagaccagcctgggcaacatagggagacgccatctctacaaaaaaaaaaaaaagaagaagaacctgggcatgtggtcgcatacctgtggtcccagctgcatgggaggctgaggtgggaggattgcttgagccagggattgtaccactgcactccagcctgagcaagaccctgtctcaaataaaaataaaaataagacagctattttaccctgtcttcacctaaataagctcatcttattttttgcctgaaactcttgcaaactcccaggtctgctagttttgagaaaccttggatctcaataaggaatagttctcaattgcttataagcataatggatttcttttggcttaaagttcaaaactggcaacaagcagcgctagcaacccatagagagatacgcagaccatttcgatagacgtgtttgctgagtgaacaaggctgactgaatttttttttttttttgaggcagggtctcactttgttgcccaggctggcgtgcagtggtgcagtagtggctcacagcagccttgaccttctgggcccaagtgatcctcccttctcagcctcctgagctcctgagtaactgggaccatacgtgcaccaccatgcccagctaattttttagatttttttgtctccctatgttgcccaggctggtctcaaactcttggactcaagccatcctcctgccttggcctcccaaagtgctgggattacaggtgtgagctactgcgcccatccctgaattcttaattacaactaaactagatgcttatggattttcctgttttacaactcttgcctcttttatctgtaattttaagatcttgacagcttatatttggctttgcttttgtgtctcaagagttctttccttgataagcctctgtggaaactacagaatcttacaaatataaaacatttccggaaaaaatacaaaaatggacacctgacatttacactccctaaggtcgtgatcctgttgaagaaaggagatgaacgcggctgcttttcagtagttcttcacttcaccttaccaggttcttcatctggatgctatgctatgggggccagaggaggaggctgggattgtgatggatcctactagattttacagctggagctcccaggaatgccctcatagggaatgtcctgaagggaatcatgggtaacttgtaagctacctcaacttatttttggaactatgtaaggtataagatggatggagctgggttcctgtgcctttctcaccttgtccgcatagagatgcagctgctcctgcaggccaaagttctgcaccaatcacctccacctgcttcccactgggagacaaaggtttgaaagcctgtttggcgatgaaccacgatgatctgacactcaagccactcctgagaaagtcgggtttctttctgtttccatttatatatgtaattttcgcttcaaacaaacatgacctcgctattctatgcacagttttgaatcctgcttttaaaatgcgatgtctgccttgtctttaaatattctgagggggaggagaggagatgtgtaatgcgactgtctataatttgaaaccggacctcactatttagcgtctcagaaaacgcggggttcattgccctggtcccccccgccttcccccgccccccgaaccttccggctggctctcttgcggtccccgcctcggcgctgatgtggtctggcagtggagattggcgcccgggcggagcacgatgggcttccccgcggcaggcaggcaggctgctgctgcaggtgggtcccggcgcccgcgccgccccgcgcctccggcggtcgccccgcccctgcccgcccgctccgctccgctcgcattggcgctgcctgctgtctgtccccgcgcggtggggagggggcgcacccggcggcgggctctgcagagggcgccttgctccgggtgcgaccgcggctccctggaggcctgggcggcgggccccgcgagcgcgccgccacctcgggagcagtgttggccaaggaccccgacgccctacgtaagtaaaggcagggcggggagcctgcgggggaggagggtcgggggcaatgtccggtccgcggaccgcggagtgggcaagaggtgcccactggatacggggtatccgagccctctgaggtgctgggagtaagaacgcgggaggtcgcttgtccgctggaatccgcggccaggg

SEQ ID NO: 12515 - DNA, 2300 bp, Homo sapien
ctctgggcaaccacaggcgccaataaatcagccacaggcgattctctcattcccttcccggctgaaacaggagcaagatataatgcaaaacagcactgattggacttgagagataagcgatctaggcttaaattctactgcgaatgactgtattaccacagcccaggtaatgagcctgtttcctcaggcttgtaacatgaagacagtaccatctcctttttggtaaagacacaaagttcatctacgaaagcagctagtatgatacttggcccactgcaagtactcagtaaacagcggccaacttgagcagaatccatctctactacatgcaaataagacattcaaggtaggactggacaaaaaaggtgttagcaggttacgtgggttcctttctgttttcttcctgaccacaccttgatatttcactgactgccagctctcagaattaatctgttccatgtcatatcccatcagtgttctgttccctattaaggagttgatgtccgataacggattcacgatttacccttaactaaaatatatccagattgttaaagaagactttgatgccttaacataaggaagcaaccaatgctgcaaataatagagaacagcaatgaaactttcaggggtggctggggggtgtaggcttttagttccaaaaatacaccataggcggcctacctcacctagaaataccatcaaacccacacagtggccatgcctgacttctccataacctgaatcaagccaagtatatataatgacctccgccggatacattctctacaggtgagtggggtaaactggcactgcggtcctggcatggtggagagtgcaatcaccaaggtgtctggagccttggagtcttagctatcaagaggtgtagctagctccagctacatcacgctcttcaggcctggtgtcttctctgtaaaacgagagggatgaaacagattttctataaggcacctctcggctctaaaatttaagattccaaagtgtactttacatacatgacagaatcttgtgagaggatcaacagctctgccaggacttgagtctcaagagaaagaatgccaaatttaatcccttggggtgatgcgggcgctaactgttgaaacatgctaggtgccgtcaggttccaggtactacgttgtgctatgcgctgcctccgcaactggtaacaactgattactccaaatactgagtgccagagaagacggtgataagatgggtcaagcttcaaaaagaaaaaccggatatgcttagaacaagataaacataatttgaagatagaaaagggggggatgtcttcttgccctagaaacgaggtaatcacaagctgggagtggaaacagtagccgcagcgtcctcccagcatctggaaagtcgcccgctcgtaagaggggtcggcgctacccgagggaggccgcaggcctactggggtttcctgctgggggtcgcacccggacccgcggccgggacggctctgcaccttcgcggcaccccgtgtgccaccctgaatcaggccccggcagccgctcctacgagcagcaaagggtggttctgggtattgtcggcccagcgctcactcgcggatgtattttcctcctgtgccctgcctgacatctcaatcggaccaaaaacacccctctccccagctacttgcatctgtcccgcgactggtgcagctgcaggccgccgccctgggtggctcgcggcaggagggactgagcccggggcagcccacaggggcaggaccgcgtcgcttacccagatgccgccgcggcggcaggccgactcctccgtgcaggaggggcgggctcccaagccgcgcactgcaagcagtggcgccggctcacgcacccctcggccgcctctcgcgcggcttcccgcgccggcagcccgcgatggccccacgtgaccgcgtgtctggtagcaggggaaagaggggcgccagggccggggtgtgcgtgcgtgcgtgcgtgcgtacgtgcgcgccctcccgcccgcccgcctcagtggccgggcgggggtcggcccgcgctctgagtgccgccgccacagttcgcagttgtgactctgtaggcggaagcatagggacaagcctgagcgtcacaggctccccacaaacaaccgcgtgacccggggactttccccagggtgtgcaaaagcacaggcaccccctcagttctggggtgaaggtgggggtggggaaggatgcgcccgcgtgttcgctggggaagggatgagggcgcggggccagggaggccgagccgcgggagcctgggtggaga

SEQ ID NO: 12516 - DNA, 2300 bp, Homo sapien
ccatgcctgacttctccataacctgaatcaagccaagtatatataatgacctccgccggatacattctctacaggtgagtggggtaaactggcactgcggtcctggcatggtggagagtgcaatcaccaaggtgtctggagccttggagtcttagctatcaagaggtgtagctagctccagctacatcacgctcttcaggcctggtgtcttctctgtaaaacgagagggatgaaacagattttctataaggcacctctcggctctaaaatttaagattccaaagtgtactttacatacatgacagaatcttgtgagaggatcaacagctctgccaggacttgagtctcaagagaaagaatgccaaatttaatcccttggggtgatgcgggcgctaactgttgaaacatgctaggtgccgtcaggttccaggtactacgttgtgctatgcgctgcctccgcaactggtaacaactgattactccaaatactgagtgccagagaagacggtgataagatgggtcaagcttcaaaaagaaaaaccggatatgcttagaacaagataaacataatttgaagatagaaaagggggggatgtcttcttgccctagaaacgaggtaatcacaagctgggagtggaaacagtagccgcagcgtcctcccagcatctggaaagtcgcccgctcgtaagaggggtcggcgctacccgagggaggccgcaggcctactggggtttcctgctgggggtcgcacccggacccgcggccgggacggctctgcaccttcgcggcaccccgtgtgccaccctgaatcaggccccggcagccgctcctacgagcagcaaagggtggttctgggtattgtcggcccagcgctcactcgcggatgtattttcctcctgtgccctgcctgacatctcaatcggaccaaaaacacccctctccccagctacttgcatctgtcccgcgactggtgcagctgcaggccgccgccctgggtggctcgcggcaggagggactgagcccggggcagcccacaggggcaggaccgcgtcgcttacccagatgccgccgcggcggcaggccgactcctccgtgcaggaggggcgggctcccaagccgcgcactgcaagcagtggcgccggctcacgcacccctcggccgcctctcgcgcggcttcccgcgccggcagcccgcgatggccccacgtgaccgcgtgtctggtagcaggggaaagaggggcgccagggccggggtgtgcgtgcgtgcgtgcgtgcgtacgtgcgcgccctcccgcccgcccgcctcagtggccgggcgggggtcggcccgcgctctgagtgccgccgccacagttcgcagttgtgactctgtaggcggaagcatagggacaagcctgagcgtcacaggctccccacaaacaaccgcgtgacccggggactttccccagggtgtgcaaaagcacaggcaccccctcagttctggggtgaaggtgggggtggggaaggatgcgcccgcgtgttcgctggggaagggatgagggcgcggggccagggaggccgagccgcgggagcctgggtggagaggcggactgggcgaggtggggcatggcgggggaagtgactcagggccagaggcagcaggcccacggaaggtggggtcgggggggcgcggggactgggcgaccctgaaccgacggggcagggcgaggttgccggagcactcgaggcggaccgcgagtgacggcccagctgctgggcccaacgggcaggggtctgacatctggacggagtgggaaagcagcctcgcatcctgccctggggagtcgggaggagcccagttccatccagctgtgcaaacaggaggaggaggaggtcccaagcctacccttgagaggggcaagaggggtggtcaagccgccgccgccgcgacggcccccgcggtgcgggttgcgccagcctcctcggagctcgacgcagaaacttgttgcaacaaacaggcgaccgcgggtgcccctagcagccagcggcagagtgggtgggcgggcgagagggaggggaaggctggcggacgccgcagcgaactggtgggcagacccggagtcgccgcgtaagcggggccggctcagtgcggtgcggcaggcgcggctgtgcggcagcggaagtcctttgttgcagcacagtccctggcagagccagagcctctccgcgcagcccagcccgagcgccgagcgccgcgcgccgccgccactgcagctcgcggccccttcgccttcgcccgcctttcccgcggctgatttgcct

SEQ ID NO: 12517 - DNA, 2300 bp, Homo sapien
tgatcctacgttgcctcaaaaagcctcggaccactccttgggttcgagtgtcaaagggaacactatttcttgtactgatacataccgtatggaaatacactaacaccaatgaagaatctgcgtgcactgccacactgaaattcgacttaagaacgttatcacacacaaatgtcctatccccagaaaacgtcaaggattttcatcaacctcttcctgattcgcccaatttagaaaatgtcatgtcaacccttcagatcatgtacacgcgttgcttaggtagaaagggagactgggtggggtggctgagctcagaccctgcctacatactttagtagtaacgactcccgatctgcatccaacacatttaccgaacttctagtaagcgcccaccgctgcaagcgaaagcactcccttcccaagaaacagatcttttccacttaaaattcccaaactcagaccttccactttttactgaacaaaaagcgtgtgtgccggcgagagggggtgggaaacagcgtaacaagaatttgcacggatcttacgcctcctccctcggagcgcgcccaagtctgcagcctcgggctccgggacacttcccctcccacccgccgccgagccgcagctgtaagttgagagaagcgggctctaggcacgtcaatcaaccgggttctcccgcctcccgtctacacctcccctcccccctcgaaaaaaataaaggcagagaaagaaagaaaagaaggtaactaatttgggaactagtctccgtaggggcttcgcctccgactcagggaggccgcacgcccgggacctgacgcgccggcaacaagcaggcggcctggcagccgcccgtcaccgggtcctcgcagcgcgtccgccgcgctccggctccccgcacggatcggcgcccctccggccccgcactccgccaggcccgcggcccgtcgccctccggcctgggccaaagttgcgcaaatagccccacaactggcaaatacttaccggccgcaacaggaaccagagctgcggagattttagggagtttaaggcaaatcagccgcgggaaaggcgggcgaaggcgaaggggccgcgagctgcagtggcggcggcgcgcggcgctcggcgctcgggctgggctgcgcggagaggctctggctctgccagggactgtgctgcaacaaaggacttccgctgccgcacagccgcgcctgccgcaccgcactgagccggccccgcttacgcggcgactccgggtctgcccaccagttcgctgcggcgtccgccagccttcccctccctctcgcccgcccacccactctgccgctggctgctaggggcacccgcggtcgcctgtttgttgcaacaagtttctgcgtcgagctccgaggaggctggcgcaacccgcaccgcgggggccgtcgcggcggcggcggcttgaccacccctcttgcccctctcaagggtaggcttgggacctcctcctcctcctgtttgcacagctggatggaactgggctcctcccgactccccagggcaggatgcgaggctgctttcccactccgtccagatgtcagacccctgcccgttgggcccagcagctgggccgtcactcgcggtccgcctcgagtgctccggcaacctcgccctgccccgtcggttcagggtcgcccagtccccgcgcccccccgaccccaccttccgtgggcctgctgcctctggccctgagtcacttcccccgccatgccccacctcgcccagtccgcctctccacccaggctcccgcggctcggcctccctggccccgcgccctcatcccttccccagcgaacacgcgggcgcatccttccccacccccaccttcaccccagaactgagggggtgcctgtgcttttgcacaccctggggaaagtccccgggtcacgcggttgtttgtggggagcctgtgacgctcaggcttgtccctatgcttccgcctacagagtcacaactgcgaactgtggcggcggcactcagagcgcgggccgacccccgcccggccactgaggcgggcgggcgggagggcgcgcacgtacgcacgcacgcacgcacgcacaccccggccctggcgcccctctttcccctgctaccagacacgcggtcacgtggggccatcgcgggctgccggcgcgggaagccgcgcgagaggcggccgaggggtgcgtgagccggcgccactgcttgcagtgcgcggcttgggagcccgcccctcctgcacggaggagtcggcctgccgccgcggcggcatctgggtaagcgacgcggtc

SEQ ID NO: 12518 - DNA, 2300 bp, Homo sapien
aatggagaaagcctgcttgctcataaaacgaatgtaagaggttaactgaagactctactgtagacgttatgtttattaacctttggaaaagcatttcacctctactatgcttcagtttcctgtttttgttgttgttgttgtttgtttttttgagacagagtctcgctcttgttgcccaggctggagtgcagtggcgccatttcggctcactgcaacctccgcctcccaggttcaagcgattctcctgcctcagcctcctgagtagctgggattacaggcgcccgccaccacgccaggctaatttttgtacttttagtagagatggggtttcgccatgttggccaggctggtctcgaactcctgacctcgggtgatccacccgcctcggcctcccaaagtgttgggattacaggcgtgagccactgcgcccggcccagtttcctgtttctttaagaggaggaaccccctttctagctcccaaagtcatccagttattattgagactttattagatatccagcaagtgattcaaaagcaaagttttgaggttctgagcaaatgttggccagccatcattcaagcctcatctttttgtactcaattttccccgtttctccacatcatatctatctgcactgacaaaatttcatagaatctaatttctccgtttcaaagaaggctgtgattgctctgtaaattatgagacctgcatccttcaccaaatctgcttcagagacattgatcctacgttgcctcaaaaagcctcggaccactccttgggttcgagtgtcaaagggaacactatttcttgtactgatacataccgtatggaaatacactaacaccaatgaagaatctgcgtgcactgccacactgaaattcgacttaagaacgttatcacacacaaatgtcctatccccagaaaacgtcaaggattttcatcaacctcttcctgattcgcccaatttagaaaatgtcatgtcaacccttcagatcatgtacacgcgttgcttaggtagaaagggagactgggtggggtggctgagctcagaccctgcctacatactttagtagtaacgactcccgatctgcatccaacacatttaccgaacttctagtaagcgcccaccgctgcaagcgaaagcactcccttcccaagaaacagatcttttccacttaaaattcccaaactcagaccttccactttttactgaacaaaaagcgtgtgtgccggcgagagggggtgggaaacagcgtaacaagaatttgcacggatcttacgcctcctccctcggagcgcgcccaagtctgcagcctcgggctccgggacacttcccctcccacccgccgccgagccgcagctgtaagttgagagaagcgggctctaggcacgtcaatcaaccgggttctcccgcctcccgtctacacctcccctcccccctcgaaaaaaataaaggcagagaaagaaagaaaagaaggtaactaatttgggaactagtctccgtaggggcttcgcctccgactcagggaggccgcacgcccgggacctgacgcgccggcaacaagcaggcggcctggcagccgcccgtcaccgggtcctcgcagcgcgtccgccgcgctccggctccccgcacggatcggcgcccctccggccccgcactccgccaggcccgcggcccgtcgccctccggcctgggccaaagttgcgcaaatagccccacaactggcaaatacttaccggccgcaacaggaaccagagctgcggagattttagggagtttaaggcaaatcagccgcgggaaaggcgggcgaaggcgaaggggccgcgagctgcagtggcggcggcgcgcggcgctcggcgctcgggctgggctgcgcggagaggctctggctctgccagggactgtgctgcaacaaaggacttccgctgccgcacagccgcgcctgccgcaccgcactgagccggccccgcttacgcggcgactccgggtctgcccaccagttcgctgcggcgtccgccagccttcccctccctctcgcccgcccacccactctgccgctggctgctaggggcacccgcggtcgcctgtttgttgcaacaagtttctgcgtcgagctccgaggaggctggcgcaacccgcaccgcgggggccgtcgcggcggcggcggcttgaccacccctcttgcccctctcaagggtaggcttgggacctcctcctcctcctgtttgcacagctggatggaactgggctcctcccgactccccagggcaggatgcgaggctgctttcccactccgtc

SEQ ID NO: 12519 - DNA, 2300 bp, Homo sapien
aagtatctgatatagctaattatgatgttctcaggtagcttaagatgtgcacaaagagaattagctaaaattcttattgccagatcctgatttctttcaatatagaagaatgatctgttactcagcctggaaagtagtgccaagattatagctcactgtaacctcagacttctgggctcaagggatcctcccaccttagccaccctagtagctaggactatagattcccaccacgatgcctgctaatttttaaaattttttgtagagatggggtctccctgtgttgcccaggttagtcttgaactcctgggctcgagtgatcctcctgcctttgtctcccaagtgctgggattacaggtatgagccactgcatctggcctggatttccttcttaatacacaaagaaataattatttataaatatccattgataaagtgtttagctctttcagaggcttaattcatttttcaagtaaacacaatttactgtcagagaaataactactttgccagtataattcatttttttttcagtttaagaattaaataagtattaacaataattgcatattgaatctgattctccaagtataggacagcctcacttcttccagattatttcaatctattccacaagggtctataaggttagcactaaaagttgaagtaggtataatttgtctgctgttgtcatagattaacttctcttttggaaaaagccttccaggttcaggtctcttacccttccataccaggcatggaaatgtcttaccccagcctactgtgtatctacagcttaagtgtaacttcaagactgaattttttaagactcaaagaaacaaatggcaagttttttcctgtagtgataggtgaagaaatattttaggacacagcactttgtaagaattataaaatggcagtatttatagagatcttaaagataatcattagttgaatttcagtttgctcaagggccctcaaattagaggctgttattccatcttttcttcaggccaacattatctccttaagataatctacaacccttgtgaaggttgttcctgggtagagactgagaggattttaggaaaattcacgagttggggtttttttccctagtaattctgcaaaaatgtattattgctcagtctccttagggcaggtctaacacccaggcacatagttttaggccgtatcttattcacctttgtatctctagtacaaatattttcagatatgaatttgtttcaacttttggtctctgcagtgtcatttagtacagaaatataagaggtaggcagtgtatcttcctactataaagaaaaaaactaaattttttttttgttaaataatgtgtctcaggtcacttttaataaatactaagctagtgatttactactgctttccaggcactcttctgggtgctaggaattaattacagaggatttgacatatgttaaagctcttgttttttccaccatttaatctgtggagccttagtctttggattttaaaaatactttgaaacaccctagtatttataatctgccaaagagagagttcacttgttgaaaatcagcaataatttctatgtaagactaatagactttgtttcaactgttgatatggtttggctgtgtccccacccaaatctcaccttgaattgtagctcccataattcccatgtgttgtggtgaaagataattgaatcatgggggcggtttctcccatactattctcgtggtagtaagagctgatggttttataaggggaaaccccttttgcttggttctcattctctcttgcctgctgccatgtaactggtggtagtgagtaagatctgatttttttttcagcatccaaaatctttttattaagagggtaggatccaaggttagtttttgtagcctcggctggcctgtcggcctctgatgcactcgaacttccagcccttggagcagacatagggtttggtgtggctgtgcggggttcccgggccttgctgaaatgctggtacacctttcggcccttgcaaatactggagagcaggacagtaccgcagccctcgggggagtccaccccttttgcttggttctcattctctcttgcctgccgccatgtgcctttcgccttctgccgtgattgtgaggcctccccagccatatggaagtgtgagtccactaaacctttttttcccttatagattacccagtctcgggtgtctttatcagcggcgtgaaaatggactaatgtagctgttaatagtcaagttctcaaaatcaattgtaaaagcacagtaa

SEQ ID NO: 12520 - DNA, 2300 bp, Homo sapien
tggcgctttgctttcagcgcttctcccaaattatgtttacctgtttattagactctccacctctgaagaccaggccatttcatttggctttttactgccacgtagtaggtacctgttcaagcttgatggaaggacttccccagcctccccacacatattatgtaaagtgatcgctgtctttgcttcctcctggagaccatttattttatttttttgagacggagtctcgttctgtcgcccaggctggagtgcagtgtcgcaatctcgactgactgcaacctctgcctctcgagtagctgggactacaggcgcgcgccaccacgcccggctaatttttgtatttttagtagagacggggtttcaccatgttggccaggctggcctcgaacttctgacagcaagtgatccacctaccgcggcctttcaaagtgctgaaactacaggcatgagcctccacacccgtccaggagcccatttatatgggagcctgcttctaaagattattacctggtgccagggtattttccagacctgtcctcacattcctgttaaacaggaggaagtgaatcgcgctccttttcatctaccttctcggagggtttatgcctccaatattaacctcagcacagccaaagaaaatcattccattccattgagcggagtcagaaacatgactaggtcacgatcacaaccccgtgtgtgccagggtgaccgagactgggtgactttatggtgtttcaacgtgtgggttttgactgattatattatgggttttccagtcaaaaactcaaagcagtggataaagcacttgcgacctaaaataagcaatggaatgaacaggaaggcgaaaccagagtttaaagcggcaggacaaacaggaaaaaggaagagtgaggcaggaagggtttaaatgcaggctcctcggaggacaagtcgccgccacacccctgtctgccgtcccgccagccgccctcacgcggcgcgggaaaacggtcggcctcgccctgggctcaggttctctccgcccgccaggcagtggggtttttttttgttttttttgagacggagtctcgctcagtcgcccaggctggagtgtagtggcgtgatctcggctcactgcaacctccacctcccgggttcaagcgattctcctgcctcagcctcccgagtagctgagactacaggcacgcgccaccacgcccagctaatttttgtatctttagtagagacgggctttcaccatgttggccaggatggtctcgatgtcttaacgtcgtgatccggccgcctcggcctcccaagtgctgggattacaggcgttagccactgcgcccggccccagccaggcagttttaatcgagcgctcacaaccactgagacgcagtgaagcacccaccataaaatcccaggaggccgaccgccggttcagactttttcttttctttaatccccgtccaagggatccgccctcaccccccaccccagccaccccaattccctattccctccccttggacggcgccggggaaaacaagctgctcgagctttatttcttcggtgcaaccaactcagaatgaattcctccgcccctgcgtgctcagtgagtcggcaccctagcagtgaactgcatttaaaacctcaggaattgagcgaactctcccagtggctctcctcaccgggatccccttccacgcctcctccccgtgccgcgcctcagtccgcactgctcattggccgcgtgccctgccaatccgatgcacgtcggctagggcaaagaccgcgaaaaagcgcgtacacctggctctgggagcgcgcgcctaacgccagccagcagcaggaggcgcgcgaggcaccacggcctggcggccgagagtcagggaggaacctcatttacataacggccgcccctctgtctcctggcgggggccggagtcccgcccctcgtccaacttgaaatctgttgggtcacgggccagtcactccgacctaggcaagcctgtggtggagctggaagagtttgtgagggcggtcccgggagcggattgggtctgggagttcccagaggcggctataagaaccgggaactgggcgcggggagctgagttgctggtagtgcccgtggtgcttggttcgaggtggccgttagttgactccgcggagttcatctccctggttttcccgtcctaacgtcgctcgcctttcagtcaggatgtctgcccgtggcccggctatcggcatcgacctgggcaccacctattcgtgcgtcggggtcttccaacatggcaaggtggagatcatcg

SEQ ID NO: 12521 - DNA, 2300 bp, Homo sapien
ccgaggcgggcggatcatgaggtcagtagatcgagaccatcctggctaacacggtgaaaccccgtctctactaaaaaataagccgggcgtggtgggggctcctgtagtcccagctactcaggagactgaggcagaatggcgtgaacccgggaggcggagtttgcagtgagccgagatcatgccactgcactccagccggggcgacagagcgagactccgtctcaaaacaaacaaacaaaaaaacaaacctgtccattatcttttttatagaattagcatgaattatattcagttaatgtcttggacctaaaatctgggaccagcaatttagttatatattatatgctcttagatagttatatgaccttaagtttctcttaattaggaaaaaaaaaaattccctcacaggacacttggagttatcaaatatttagaagttaccttcatccctactaaatatcatcaattgtgtttattcttctttacagggacaatcatatttccagttttggttgtgagtttctaatgtcatttaaaaagaaacctaactggtgaaaaatgtaccttaggaaatcggtgggtcactttttaaaataagtactgtaatgattaagagatgtaaaaacaatcttttcttcctccttttgtttggggtaaagtgatagagaagtataagattgtcccttcagagttactgaaactttcctttaaatattatgtccctctatcacatgcgaaataacttctcctttaatttttaagtagttattgttttgggctctcaacttttatttttacctaagttttgtacattagacagcctaagtttattctgtgataagatatatagatcttaagttttctatcagcacttctccacacattattgggatgaactgaagaggtttactgaccactagtgtggtcttcccggtaatgattatgtagtgattggatgccatccagattccttggtctgtctgcatcttttcttgagctttacctcattatttccctgtcctgtccaccccaagttatgttcgctacttggtgaaaagctcttggcatatgggatagtctccttttcaagcgtgtcatcttgtagtaagaaagccttgcctgcggccagtatataagtgggtttccatatacctggaccaactgaacagctgccagaatggactcaagtgagcagaacatgaatctagatgattactatttaatcactgtagccagtgattgtgtattaccaagtagtgagactgggagggtgggaatagaagaagcagtgggatgactactgacataacttaaaagttaatgggagtatatatccactacttatgagcctctcataccaattaagctgtggtgatacaaaagaatatactaggcattcccaatcatgttgcatcatctagcattgctcacttagagctgggaggaaaaaaatcagccagaatcagcattatcaactccgttgcaagaaggaattacaagacacatgatttgaaaagtgtaaatgtaaaaatatcaattgaatacccattgacactaagcaagtttctttgtttttgagcaacactaattttgagtacttaagactggtgctttacacacaccactccaaaaatccacataacccctgatttggtgttttcagaagaaagatcagaatagtcttgtcctagattccacagcttgttaagcagcacaactgttatgaaaaccttatttccgtacccatgttctcttccacgaggctaccctgcttccccacctcaaccctgctctccccatcaacctaggttcatcctggatttgaacttaataatagtgctaatcatgaaagttaggaagaaatggatctttcttccctataggactgaatgtagttactccaattaaaacagtaaagtgaataacttcatgaagttcaaggttggaatgccatgaagaattatgccctgggcggctttacaatggataggccaatacgtcgccacggcttttaagactgggaaacggggcaccaggctgggctttagaaatcgctggagaagcctgggtgcggccgcagcccgcgcggcctaggacggaagcgacgccccgccccgctccgcgccccgggcagccgtgtgcaggcgcctgcgggcggtatcctcggcgacgccgtatggcttccagggcgaggccatgtaccgggtgcccgagttttatgcgaggaggaagcggttaggtgggcagaccccttacttgatggatgtaagtgcagccttggtcgcccccatacccgggct

SEQ ID NO: 12522 - DNA, 2300 bp, Homo sapien
ctccctgactcagcctcccgagtagctgggattacaggcacctgccaccacgcccggctaatttttgtatttttagtagagatggtgtttcgccatgttggccaggctggtcttgaactcctgacctcaggtgatccgcctgccttagcatcccaaagtgctgggattacaggcgtgagccactgtgcccagccttaccttctcttctaatgtctaaaaaaagaacccagaaagaaaaggaaagaaagtgtgtttcctgggcaatcactctcatttcaaaaccatgctaagatggtgctggtttgccttgtgctgatgtgagctctgctctagatctcccagaatacaagctgactttattcccaaaacagactttggctagttttcttgcttcagcttggcaggtgttcatggtctctggtttcagctggcagaagatttacagttagttatggaagaggagctttgaaagggtggaaatttcacatcagcacacccctcaggtggaggcctcaggtggcacagagaagaaatgctgaggcttgctctgaaaagtttccgctgagctctgttgttcagtacgtttatctgcaaactattttaaagaaaaaagcttattctcctcacagtccagttatgaggacagacgtgggtatctgacaggcccgagttttagtacaggatctgtccctaattagatatatgtctttggacttaagtctcaactttagtttcctcagttgagaagtgggaataataatgttgactataccatagggatgttatgaagaccagatatgataatacatgtaaagggcttagcgtggtgcaggatgttataaagactagataggatcatacatgtaaagggcttagtgcagtacccggcacatagtccatacttagtccatgttcactctaattgctattgccgtagttctttattgaagacttgcacatgaagaaaccaatatataatgaagagagtctgtaggaggggaggggcaggccccagtaaccacctctttggcctcattccccaagtggagggctagtttgggcccattcagaccaggaagtccctgtgagaaggccgaaggtcctgtgaggtttgggtcatctttcccagactgtgggagttcaggatggttctggagagcctggtaccaaggccaatcctcagagtcacagttcctccaaggaaggccccaacaaaagcagaagcaggccgggcaccttggctcacgcctgtcatcccatcactttgggagggtgaggtaggtggatagcttgagctcaggagttcgagaccagcctggccaacatggtgaaaccccatctctacaaaaaatacaaaaattagctggtcatgttggtgtgtgcctgtagtctcagctacttgggaggctgaggtgggaggatcacctaagcctggggaggtcagggctgccgtgagccatgatcatgctactgtgctccagcctggatgacagaatgagaccctgtctcaaaaaaaaaaaaaaaaaaaaaaaattagccagtgtggtggtgtatacttgtggtcccagcttcttgtgaggctgaggtgggtaccaggctctccagaaccatcctgaactcctacagtctggtgggaggattgggaggtgggaggattgcttgagcccagaaggtcaaggctatagtgagctatgatcacactactgcactccagctctgtcttaaaaaagaagcaaaaccaggatcagccttgaagtgtccagggtctggccttggccgctgtgactgatcaagtgactgcaggtgcataaccccctcagtcaactctcaagggctccccagaccaggcctggtttcctaggctgggagtcagaatcagaattgttaggaggggaggccatgttcactaattgcgcccatgccagtatagtattctttttttttctttttgagatggagtcttgctctgttgcccaggctggagtgcagtggcacaatctcggcttactgcaacttctacctcccgggttcaagcaattctcctgcctcagcctcccgagtagctgggattagaggcgcccgccaccacacccagctaatttttgtacttttagtagagctaatttttgtacttttagtacttttagtactttaacagcgtcaccatgttggccaggctggtctgaaactcctggcctcaagtgatccacgcacctcggcctcccaaagtgctaattacaggcgtaagccactgcatcttgccaagtatagtattcttaacattgaatttgtgttgcaag

SEQ ID NO: 12523 - DNA, 2300 bp, Homo sapien
tctaccacagggagattacaatctttttaggaagtaggtgatataaattaaaacaattattaatagaaacaatatattataatcaagtgaattgggcataacaagtgtcagaaagaaactggaagcagtgatggtgaagggcagaattccctgttatgacttccaggtctaccacccactagctgtgtgactttgcctcagtttccttttctgttactgcaattgtttttgtaaagtacttagaagaatggctaatacatagtaagcacactcatagtaagcacacacccatctaggcacttgcccgacactgcttttgctggttgtgtaatctttgccaagttgctccttgcccctaagcctcagtgttctgtctgcaagatggggattaggatatctcctacctcgcaaggtggctgtgaggatccagggacacagtttgttaagagtgtagcacaggccctctgcatggtaagcattcactaaaggacagttatgactgccactaacactgtaacgtgtcctggctaaggagtgaagggtcgctcacaagtggctaagtcagggggcttctttggaagctggaatttgaagcggaccggaaggcattcgtaagattcaggtgatcagataagaaagcataaacaaaaaaaggtgaaagcctgaggttggaaggggtgaccacaagtcctggaaggccagaagggggacttgtcacttctcccctggccggcggggtctagcggagccccaactaagttgatctatttccgagcccctcttctgcaatctctgctctcaccttcacggtccgcgagtctggggctctgcaagcctccaacacaccctccctccctaaggaatgtgggccccgctttctgggcctgccagaccgagcgcctaccgcttcctccgcaggcaggagccgggacgctgccttcaccccaccctccgccaggatccagtttcaaagtcacctgaaagccatttccttccgcgcctgccccgcctctcccctcccagtagatcacctggagcttgcatttgcccagagcagcattttggggcgggcgcttgttttgttttaaatgatacctctagaaatcgtttgctgtacacctggataacaaatataccccgtggttctaatatcagcgtcctattcctcctcccaaggaactagtgatagcgcctaaccagtgggcgttgttcctcttccggagccccactctgggcttccctcctccgggcttgttgttcttcaggatctttactgatgaattattatgggtttttggatttatgctcttgctcaaaatgtattgaatgtctctgtcccccatcctcaccccttgccccccagtttccaggtgtgtacctttccatgcatacacggtcatatacagagacataaagacaaacggttctctttgttttataaaaacgggtcctctatcatccaggtttctgtgttttatttttcctatttaacagttccttgtggagttgccttcacgttgtctcctttatctctttcccgtcagcttctcagaggtctgcatttaccactgtaaagcgtcacagggaccgagttatggtgaggaattcaagacatgcctttctgacttggaaaagcggacacggccggctctggtaggattaggatccccagatcgatcccggctggtcactcacttgggaaagccctcagcccccttcgcagggcccggtgttccctgtccatacaaggggtacgttctggcagtccatgctgtctcgggaggcggtgatagcaggtctgtgacaccagggtgaccccaccacgtgcgtcttggtatcctagagcatctaggctgcccgggggtgcgcgctcatcaccctgcgggcgttaatcgttaaccgcgcccaggcctcgccgccgccgcagccttaccccggctctggctcgccgcgccgcgaaggttgccccggcccccgcagagccgccaattgctggactgcagccgcgagctggagtctccacccacaggaaaaattcctggcccgcccctccctcgctccctcgctccctcgctccctcgctccctcgctccctcgctccctcgctccctcctgccctcccgctgcagctccggctccgctcgacttcctgccgggcgctggcaagccgcgcgctgcctggggtctccgggggccgcgcttgcagctggccgagtccgggccagctgaggggctggcggtgggcgggagcggtcggcggcctcagccccttcagagagcgactttcaaactcgcgcccg

SEQ ID NO: 12524 - DNA, 2300 bp, Homo sapien
atgtgttggctgggttggctcccttcagagcctctgagggagtaggcattctatgcctgtcatccagcttctggggtcctggcagtctttgacattgttggcctggagatgcggcccagcaccttcccatcacctttttctttgtgtctctctgtgtcctccttctcctcttataaggacagcagccactggatttggggcccaccctaaatcctatctgaagtcatcttgagatccttaactaatggcatccacaaagaccttatttccaaataaagtcacattctggggttccaagtggacatgaattttggggtggacactgtctcacagtaggcaatgtccgtgaagtggtgttacagcagggccgaaacgaggtgtggctagggaaggtagtgggcagggttgtgccgggggctaggttctgaccacctccctccacgcaggactacctcttgaagatcattgacacacccgggctgctgaagccagaacaggtcagcgccctctttgggaacatagaaaatatctacgcgctgaacaggtgtgtgaatgggcctgacactcaccatgttctgcctgcgaggcccacctcagggcctagggaggaaccctggatgtccctggtctcatgggcctgtgacatgtgggcctggggcctgatctctgaggacagggaagggttgtccatctctgtgccctgggctgatctgctttctctcaagggcagacggggaggtaatttgaggttgtgtgcatgttgggtccatcctgagccggtgccccctcaaggggctgctgggccctaccttgcacactggttctcttccctgtggaagagaaccttccctgtccttctcatcttcattttccatttgcacatctgttaatttcttatcctcctttccactgaccccaagggctccctggagatgatctgacctattagtggattgcacaacccaggcaagacacatgtgggaagccaaacaaggcctgaccaggggctgtgtcagggcaaaaggcatgggtctcctgcctgggaccacagactcccccgggaaagtgcactgctctggaggggcagggcttgagggaacagcggtgctaggacaggaagaatcgtatcccaggccccttaagatgggcagagggagctctggctgtgtaagctggagaagtctgggagggcagggtgcagggaggacttaggccaatggtgaggggttgggaaaagaggaggagcacagagggaggaggcagggagcagtgtttctaggggtgccaggactcacctgtctctccccatgtcccacatcctgggcgccctggctcctttgctagtccccattctctctccttcaccctttaatcctctgcttttgtgtgtttgactccttctgcctgcagaggagctgtgtcccctcccgaggtgggtatgggggtcccctcttcatctccctcttgttgagcctgtaggtctccctgacttcctgctttgtggctgctttgtgttggatactttctgtggttgctgcctggggcaggactccctctgaggctagaagccccagttctttagcaaagcaatagggctggctgtcagtcagggtttgggaggttggggagggggcagtgaggggcattgtcctctgactgcagagggtacagtggctgctctcccctcacccagccagctcctcagagacctggacagctgcaatagtgaccccgtggctgtggccagctgctttgtggaaagggtaagaagggctgggtccttgcctctgtcctaccttgctgagagctcagagagacaagaactgccagcataagaggacatctgagtcctggggattcctttccagggaaagtcctgggtgctctatcttgaatgagaagggtgttctgaggggagccagggctgctgggtggatgggatgtccttgacaaataggtataaagatggctctgtaggcatttgggaacaggggacagagggtgctctgggggccaggggcctatctgctaccaccatctttactgtcaaatgagaatctccctgaaatcactatttttgatctcttcttagagccaagagtttgatatctacactcagtattgcaacaattaccccaagtgagtaattggggtgagagggaaggcagagccatttggtgagtccagagccccccacttcctcatccaggccttccccaggtggtgactggcccttctcccactcccagctccgtggccgccctgacggaatgcatgcgggacaagcagcaggccaagtt

SEQ ID NO: 12525 - DNA, 2300 bp, Homo sapien
ttgatacagatagtgtatgtatgttgtgtgtgtcagcagaaaagaggttcttcaacaggcctgcctgctgaggaacagcaagataccttggtagactttccttctgactccaggtgtgtagcaaatcatggcgatccctgggcctcccacttaccgccagctgggcaaggatatggataggcgaaggccgaggctctgtagaactggaccttgagacaaggtcctcttattcctgccctccagtctcaggtgtatcctcaaaaaggctggggtacacggtgatgacaccattggcctaatggatgtgttttgtatcctgtccccagagcctggtcactctccgtacagccgggcaactctccccagcggtcagcgaggcttcgtgatgcccagccttaagggccgtagaaagtcgggtgcgacctctgctttccagctgggatgctgtgaggggcttggcagtgggtgtagctgatgcgctgatatgctcattgccagggaggcaaggggcttgaggtggagccagggacctccggagatgttgctagttggtctgaagggggtagcatggaactgagtcccctccctatggctcctgcgcgagggccctgggccaggtgccctaatgcattgcatcatgggtggtactgctccggcagggctggtagtcacagcgggggtcctggagatggatgggcccgcctccctgtccgtaggtgcaagggggctcgccgacactgtggaaggcagcttccctggggcctatgactgcagggggccaagccagagtggactttgagctggtgatgggctggtggcgctgtgagcttgggacccagccaggcacagcagtttcctggcccgcgctgactctgctcatgctttcctcctcagagccaaccaaacacctgctcaggcaactcaacgagaaaggtgagtgtgtgaggtggccagccattcccagtgagcgggggaggaggagggaggaggggaagcagccgacaacctggggtgtgacctgagggtggaggattgtcagaatagtgtagagggaactctgcctccattccccccagaagagggcctcgcccctggctggctgaggagaggggctggagctctcccccatgcacaggcctcatgccctttcctccggaaacaatgagagccgagcaacaggcacagacctgcgctgctctgtggcccctgggcccctgctctgtcagtcattcttttgaaagcccaggagactaggtgagggttctgggagcaggagcccccagtgaggacttccccagggagctgtccagaggtctttttcctgcttactgatctcttcccctcccctcccctgcccctcgcccgtgtgctgggggacccggtggtgatgtctgcagcccgagcagcaggaatgaaggtaaaggccagtgggaggaggggactggctgacagaggagggtgggactgcccaggtcagcccccggccccttcagccctcattgtcttcattcattcaacaaatgcctactaagcacccactgtgtaccaggctgtgtggcttagggccacagagatgaataagacatgggccttgccctgggggcccttctgcaccctctgcctagaacagcaccctgctgggggcctgcccagtgtggacctactcagatttccctctccctagggtagacaagtaggcaggcctgtttgggttctgaagttttgaccaggtcccagcctttccaccatgagaatgcccacccctccctggaccccagtggcaacctgagttgggcatctaggtgtggctttctgtgtgaaggctccccccccgcagctgcctgcaggaggacgggaggttgcccaagaggctggtcacgagggggtcttgtgctctgaacagcatgcaggcagtgctggaaccctcctggactttgggcagccctcccgtactcggggcctgcagccagaggctgaaggggctacccaggaggaggaagaggaagaggaggaggtggtggaggaggaggaggaggaggaggaggaagagcaggcctttcaggtctctctggaggacctgacagggcatgaaggcaacgagaagggggctgggccggagcccccaggctcagaggaggaggaggaggagcaggaggagagcctggcggtggcggagcaggtagccgactttgccagctccctgctggccgccctccactgctggcactatcgggccaacgctttacttttctcccggggcgctatggtgaggtgtctcttcgatctcccctcctccttgc

SEQ ID NO: 12526 - DNA, 2300 bp, Homo sapien
ctatgactgcagggggccaagccagagtggactttgagctggtgatgggctggtggcgctgtgagcttgggacccagccaggcacagcagtttcctggcccgcgctgactctgctcatgctttcctcctcagagccaaccaaacacctgctcaggcaactcaacgagaaaggtgagtgtgtgaggtggccagccattcccagtgagcgggggaggaggagggaggaggggaagcagccgacaacctggggtgtgacctgagggtggaggattgtcagaatagtgtagagggaactctgcctccattccccccagaagagggcctcgcccctggctggctgaggagaggggctggagctctcccccatgcacaggcctcatgccctttcctccggaaacaatgagagccgagcaacaggcacagacctgcgctgctctgtggcccctgggcccctgctctgtcagtcattcttttgaaagcccaggagactaggtgagggttctgggagcaggagcccccagtgaggacttccccagggagctgtccagaggtctttttcctgcttactgatctcttcccctcccctcccctgcccctcgcccgtgtgctgggggacccggtggtgatgtctgcagcccgagcagcaggaatgaaggtaaaggccagtgggaggaggggactggctgacagaggagggtgggactgcccaggtcagcccccggccccttcagccctcattgtcttcattcattcaacaaatgcctactaagcacccactgtgtaccaggctgtgtggcttagggccacagagatgaataagacatgggccttgccctgggggcccttctgcaccctctgcctagaacagcaccctgctgggggcctgcccagtgtggacctactcagatttccctctccctagggtagacaagtaggcaggcctgtttgggttctgaagttttgaccaggtcccagcctttccaccatgagaatgcccacccctccctggaccccagtggcaacctgagttgggcatctaggtgtggctttctgtgtgaaggctccccccccgcagctgcctgcaggaggacgggaggttgcccaagaggctggtcacgagggggtcttgtgctctgaacagcatgcaggcagtgctggaaccctcctggactttgggcagccctcccgtactcggggcctgcagccagaggctgaaggggctacccaggaggaggaagaggaagaggaggaggtggtggaggaggaggaggaggaggaggaggaagagcaggcctttcaggtctctctggaggacctgacagggcatgaaggcaacgagaagggggctgggccggagcccccaggctcagaggaggaggaggaggagcaggaggagagcctggcggtggcggagcaggtagccgactttgccagctccctgctggccgccctccactgctggcactatcgggccaacgctttacttttctcccggggcgctatggtgaggtgtctcttcgatctcccctcctccttgcatgctccctgggatgtgcatgcccacccgagggccccctctgctgccctcctcaccccaccctgccctggttttactcctcccctcagcacttaacaccatcgctcgctgtcacaccctggtgagcccctggcatgctctgttccagtactgggcactaatcaatataacgcccaacaagcatgacaagtggggtggggtggtgggggcagggagaagctagcacacagtggggctggaaaggtcaagtccactttggagggacagaaaggtgggctgaggttttttgaagctgcatgcctgacaaggctttccgcagccccaggcctggcagttcaggttggctctggaatggctcaggtccaagactggctctcagctcagcccagccccttggggcgtgggaggcactgcccgtgttgggatgcagaagggatcagcttccagttgtcttggagttgatgactgacctctacctctgcagggaaaggggcgcagggagtctgaaagctccaggagcagcagaaggcccagtggccggtctccaaccagtactgagaagcgcatgagcttcgagtccatttcttccctgccagaggtgagcgaccagcaggtgggatggggatagtaggaagaacttggagtccagattttcaagtctgcaaatagggctttcaggcacaggctctcccactgggcccatgggaacagagattccccacctcccaggactctcagccctgcatgaagcctgtttggccta

SEQ ID NO: 12527 - DNA, 2300 bp, Homo sapien
tcagccctgcatgaagcctgtttggcctagagtatatggtttggtgagcagaccacccctttctatgaagtagagaaaggctcccctttgggcagatgcagtcccatgtcaagggcacgcagctagtggaaatgaaccaggtattaggctcctttcgttaggccaccttgtatgggttataaggccctgtccctgccagcatgccagacattgaaatcacacctgtggtcacctgggcaaagggtagagaactgatatctgttggacacctcctctgtaactgatgtgttatttcttcctactcttccccacaatggctctagaaggaaaagggcactgagtggttgatggcgtgcctaacactgagcagcttctgaggcgcggggctgagatcagacctggggctgggactcagaggcccactctcctcctcctgctgccctatgctgtctgtgggttgtaggaagcagcatcctttactttcccaaagttataagggaaagatcgtgagctacagcctggaccccatgttggaccccacagccaggactgagaagcctggatgatactggacaggaatgtagcatgatgtcttagcttgagctgctgtaacaaaatcccttactgctacgtgggtagcttagttattgctcacagttttggaggctggaaattctaaggtcaagatgccagcagaccctggggagggcttgccctctgcttcgtagatggtggcttcttgctgtgtcctcacatggcaaaggggcaaggaagctcccttgatcctcatttgtaagggatctgaccccactcatgaggatggagcccttgtgacctaatttcccaaaggccccccctctcattcccatcacactgggtgttagcctccacatggcaattttagagatacacagacattcagagcagagcaaattggggtgtcaaataataatacaatgagaaccacccattacaaagtttaaaagaagcagatgaaattaattttagtagtatattttatttaacccaatgtatacagagtattattctaacatgtaatcaacataaaaagttactgatatgttttatccctttttttatacagagtctttgcaatctggtgtgtattttatcccaagagcaggtttccatctggcctaaccccatttcgggtgctcagaaagccacagtggctggtggctcccatgttgaacagtgcaagtctagatcatgggtcttgctctgcagattctgaactagaacagaaggaattatgtccgatcttataattagtgtttgctcttatctccttaaagactgctctggaaagccgcgtatgtcatcagttctgtggttcaaattactttcaaggtggtcaagagggaattctcaagtttgctttcttccttgcccatttcctgggcatatgcagttgtgctgggcccacaggtactgggaggagccacattcctggtcctcatcctctgacgagattccagcatgtggctgtgttgctctctagaccctaatccacatgggaggccctgtcccctgaggaaaatgaaatggcctctcatgttgtgcaggtctgggtttgaaccctagaacctccaagtgaggagcctctagggctttggggagctgcctcaccatcagccatgctggttccatgacactgtgagaaccagcccctgggaacctggggccatgcccaacccactgttgtgtgttcccaccttgtccctgtagctcctaggctggctgccatcaaggtgttgccatcctgacccatctgcattcttactgttttccttggttttgaggacatgggcccagcacccccactgtacggtgactaaaggacacagtcatgttcctctaaggacccatcacctactcctaagtcgtgctcattctgattgccttgagtcctaaactacaggtccctgtcattgggccttgagcaggccatgctgtccccttgttccccggatcccatgaaggaggctttttactcatgtgagccttttctgctatgtttcaggttgagccggaccctgaggctgggagtgagcaagaggtattttctgctgtggaagggcccagtgccgaggagacgccttcagacacagaatctccagaagtcctggagacacagcttgatgcccaccagggccttctggggatggaccccccaggtgacatggtggacttcgtggcagctgagagcactgaggaccttaaggccctgagcagcgaggaggaagaagaaatgggaggtgccgcccaggagcctgaga

SEQ ID NO: 12528 - DNA, 2300 bp, Homo sapien
aacctgccggtcccttagtcacatctcagccacatgagtagccagcatcgcccctcctggtgctctctgtccatagatctcgcctcctgtcgggtaaggcagtccccacctcagaccatggcctgcttacaggggggcagcctcccctcatcccctcttattagccttgaggctcaggggaggtgggtcctcctgccaaaccatgctgctagcctgacccagggcccacggttggcatgggtggatggttcagctggtgagctgggaggtccttgatggatctggcctagaaagaggcaggactgatccaacagggccacaggcctcccactgcaggttcgcagccagggggtcatgggtgggtccctgcccagctacttggctccctgcctagctacttggctccctgccttcccacaccacctgtggtgccctttccgatttcagaggcattgtgtggataggaagcagggccatggattcttgcctcagctctgctactgacttgctgtgtgctctaatctcagcccgtcactgagcttttccggaacccagttttctcatctgagataggagaggctgagtcccatgaccccaaggcctctttccagctctagaattctgagaatctcttttctcacatcagcttcatctaccccatctccagcctcccccacccccttccctgataaggcccccattgttgattctacctacatacccctcccagaggcatggctagaaataaaaggccccagagaaattccttatctcttatgaattgcaaaagatctttacatacacatacacactcacatacttgcagggctgtgtcaggctcccacacccctcctcccccgtgagcaaggagcctgccagcagcatctggccatccctccagcttgctctctgctgtttgtgcactttccctgggcagatgggaaccccaagagtaactatttaaaaaatggttctgcttcagaaaaggatttgacctcttggatatatatctagacacaatcttcctcgaagtcttttcttgacaaagttgtgagctgtttgtaaaatccacttgtgaattaccagagccctccactcagcagcacgccgttgtctttggccggacctggggcctctgcctttggcttctggggcccctccacctcagtgccccactccaagccttgaggcagggcctcaggccacttctgcactaccctaaaggggtggggcctcaggccctcctgcactgcttacctgttcacatggcttctcccttcctgtctcaagcctcagaatgttccaactgaaactggccgagaaaggaggggctgaggccttgcctgccagtggctgagattcccattccccatttctcagtcctgagcatctgctactccaggaacaagagggtttttgagatccttacaccagccccacaggacactggccacaataattgctcggcaaagccccagggaggcaggggtggatagggaggggtgaaggatcataagaaagccaacatttacagacatgatctcactttaaaaggctgcaaaccacctgtgaagtaggtcatgggctcactcccactaactgagtcaggaaggttctctcccttcccccagatggaattccagggactctcactccaggcctgtctgacccaacacctgggaaggggtgggcttctcaggaggccctctgctgttggtcctggatgggagagcaggaagagggctgagggaaggggccagctccgtctgagagctcatcggtgtctctgctcacagggccttctagaaatccctgtcctccttactccctcaccccagtgcctcttggttcttcctccttgtccccctccagggagttggccagcctcctgggagctgaggaggggaagaaaggattgtccccaaagccccttccccctctcctgtacccaccttcattacacctcacctttctcacctgtgtccgctcccccctcccagagaggaagggaagccctgccaaagcccagttccttcatctctcaccctcattcttggccttggccttcagggtggagagtacaagatgcattttaaattgtctctacaggagcagtcaggaacgccaaagaaatctttgcatacattggaaaacccccattttccaaagccaacctgtgacctggccacataatttttgatcgcactggcatagcctctgaatgtccctgccaaggaatgtgggccaggcacccattaagaggaaacagaagaaaggtgggattaagttgggagtcagtc

SEQ ID NO: 12529 - DNA, 2300 bp, Homo sapien
cacacacatacacactcatacacaccacacccccacacacacacacatgcacacaccgcaacctccacacacacacacacatacatgtgcacacaccacacccccacacacacacacactcacacacacacacaccccaatcactcagctgtcccatcccacctgccccaccacaggcatcttcagtggtgaagtgggggtgcccatccttgtaggcgattctttccccctatgcagagccctctcctctttccaccgatctggcctgaggcctgtgggtcagtgagtctggatatggagctggttctggggcaagaacagacttgaaggaagcctgcaaaattgaggagaatcccagggctttgagtaacagaggtcagccccccaacttgtcggaaaggaggatgagccagaggcctggctcaagggacagggagagcccaagacagcagctgccagaggcctagggcatgcgcctcaggaccttacctggagcaggccccttaggactccatggggtctgtgcagggagcctgggaggctgtcacccaggcttagggagctgctctggggagcagctgaccgagaagaaagcaagaattcagcacacggcttgcacggcttccccctgcatgtccccgctgtggcaggctgcactgggggccaagggagccacagatccttcctgcagcccacctctccaggtgtcccgtgagcccgcctgaacctgggggtgaggttaggaagactggcattccacatggaagtttctggtacaccagtcacacccagaaacatatacagatagtgaggcctccctttttcagcccttctcaccctctgagagagacagatgccctccccacccacccccatccaccacccgcgcgcgcgcgcgcacacacacacacacacgcacacactcctctgtggcctccagcctggccagaggcctccctttcctagctgcaccagcccaccatgcccagcagagggcactgctgggctcctgctgaagggtctctcccagaagttccctccgaagctcccgtcatcgcatgtggggtcgcctccctgtctgtggtggactgtgtcccagcccctttttcccagcaacagcccctgccggaaggagagcgaactctggggggccggcacagactgcggacacgggctagggccctgcaccctgcccccgcctgcttctgccatgcgtccctgtgtgtctgcatgtggcggtgtcctggtgtgcgggctcctctgtgagcaccagagcgactccatccactgtctgtgtcatctgtgtctgtgcaaatgtaattacttgtgcatcagagccgcctccagccaacacctgaatgtcactgggttggggggaataaaacctgtttggacctgatgatctctttgggggaagaagtgagcccacatttgagaccctttccggagagccagccactccagcagatgggaagactggcttgtgcccggtaccggaaagaaaccagatggtgactcaaacgaacacagacccaaggcctcacgcacagatttcctgctgctgctcccttctgagccttttgttaagttctcatggggatccacgaacctcagagggagggcctaataccccatccaccttcgatgcaagaaagaggaggacagagcctgtcgggaaagcccaacctggctctagaaggctccttgcaagcccagtggctggtccttccagcctgcctggaactaccccttcacagaaccgcaggcctctcccaggaagggatggccaatggctgcgcctccccttggggatagtcctgggggatggtggctctcctgctggtcctctgtgtgtggtctggtgtcggtgccctacagaatagatccatgcggtgttgcttcatgtacaatccctcactgtgcatgtcggcttcctgctggggggaactgatgggagtggaccaggcacccctgctcctgtctggacagctgcacaccacagggtggcaccccaccccagtcctccccttccccacgtgtgtgtgcacgtggtgactgaagctgccatcccacacatcagcctctttctcaagcacatcactgcacggtcccaccgccttccctcacctcttgcctttttacattagagcacgttctggtaaaggccaatccgttcatacaggtaagtgcatgggaggccaggcagaagaaacaagacctcactcacgaaagacaaaactgctggaggggaagtcaggacatctgggttctagtccttaattctgttggtaacttcctgc

SEQ ID NO: 12530 - DNA, 2300 bp, Homo sapien
gcaaacacttttgctaagccctggctgggaaatgccctctgtccccatgcaccatgtcctttccccacctgccctcctgaaacccttctgattgaggggaacaaactgtgctccagtcctttccccagctgccctcctgaaacctgtccgatcaagggggataaactgtgctccagtcctttccccacctgccctcctgaaacccgtctggtcaagggggataaactgcgctccagtttggcctttggtcccagccgcagtcattccaccggatgaccctggggaggcctcctcctgcagcaggccttggtttttctcccaaggcaattagggtgggtaatcctggctcctatcttacctcacaaggatgtggtgggatggattcatcaggttggggaaaatgcagtctgaagtgagtctgtatctgaaaaataaggctgtagccctgctgccatctcacacttgggctggtgaatgtgcttcagtgcctccgtgatcatgtgcctggtggatgtgcatgtgtgtgctggtgtgtgtcagtgtgtcagatatgagcctgtgtgtgtgccgtgggtgcacacacccacagagggagtggtctccctcacagctcactggctgtcaacccccatcacaggtctgcctcacagcctccctgcctcccgctttgctctcttggttgtgaaggctctgggtcccctattctcttacagacttgatcttggagtcccttaagatccctagaaagaggaccaaatgtcaggtacagatgaagaaagctaatagttttcctagggtccagggcattgaagaccaagcctggctcccctggccccctcctcacttttctcccctgactccacccctgccttcccgttacttcttaaagttctcaaagctttctgtgttctttcttaccttcaggactttacacctactctttattccctttgcttggactcttgtcctttcccacctgtcccttcatgggtacctccaagcttcctttaggaataagcttcaacttcccctccctgataccagtccccgccgagtccccacctaagccagccatgacacacatcacaccttcttgtagttgcttgtttaattgtgtgtctctgccaccagattccaagctctgtgaggacatgactttcctgtcttacttgcccctgcctagtacagtgcctgccacctagttggagcttggtacatatttgaattaactgtaaatgaatgaatgagtgagtaggaatgactgatgacgggtgagggaggacccagtgctcctgatgcgctggttcatcacatggactcacaatgcacggttccattgtccatgggatgccccgactgccacgtgcttgatgggacagcaggctcctttgggttgctcagtctgtcctggaattcaacaggagacctcatctgagcacctggtcatgctccaaagaagccctaaaatgcgaggtcagctttctgaataccaactgctgggaaggaactcagagggctctcagaaagcctccgggaggagtgaagtccccccagtgcagctgccccgggctggtggcgtcagtggcggcttaactctctcatccatctctccccatggttcccatatgggtcagactcagcctgtttccagcctctcccttcccctggcctgtccccatctcccccaccaggttaggtcctggcctagtcctcagggtgagggttgctttccccagcttgtgccctgctgcctctggctcccaggagagcttcctctctcccggggtgctccccgcggcggggcggctggtctggaggaagcagctggctgcgactgacgtctccacctgctggccgtcctgacccttgctacgtgcagctctccatccctgccactgctgccggtactgttgctgctgctgctgctgcaatattttataacaaacgacccagagaccctggtaggaagcacgcccaggcagatgacatggcgttctgcttctgtcaggatctactcacgttggatgctccgaataagtttccccggagaaaaagtccgagggggtagagagataaccctctgactgtgttgctgtcccccagggatccttccatgaagactgaggcaggcggagctgctaagagcctgctgacatgacatcggccacagagtttgaaaatgtgggcaaccagccaccttacagcaggatcaatgcccgctgggacgccccagacgacgagctggataatgacaacagctcagccaggctctttgagaggtcccggataaaggccttggc

SEQ ID NO: 12531 - DNA, 2300 bp, Homo sapien
gttgtattgaattatttagctttcagctaaagtggagataactaaagcagctgagctggtttgtaaaatgttggggtaatctgtctgctgatttggagttttatcatattaattttttcttatggttgaaaattataaattttaaggctacaaagaaaaatatgtatgcaactattcagttcagtgccacagacctatagctaaggaattatctggcttgcatagtatataattacgtagctgcagaaccaccattctagagaaccatgaatttatctaataagtttattcatacaagcttttaaaaaaccataaatacataatttccctccatttttttctaacaaaaatagatgaaggatttcttcttgagatatataatagtctcagcttttgaagttggcctgtttttcttgagctttccttgccagaatttgacttttaaacattttttttcacaaaacagaactttctctttttaactcagtaatagaaaaatgcattcttaaatgttgtcaacaaaggggaggaggggatcactgcgaatctatcgatgaccatgaatgtttttgtatcctctttcccatattactagtgtctcttggaaaattgagctgtaataaggatccagccaagaggagggtggagtgaagaattctgtggctctgtaatacctggggcgtttgtcccactcagcacatctcagtgtctaaatacccaccctcaagaagtgggactgcagcaggaagtgaagtatctttgcatatgttcaatatataaactaaactcgaacatctggcaaacacccctttcctgggtgaattctggaaaacagcacaattataatcccaagcaaataactcaggagtaagactgttcccttgttaagaacaccaggcagcatcagtaaaagttaaaacttcttctgcatctatgcgcttttaatctccacggccatttccataatacctgagattacctgcgttgatagctggtgagaaatcatcccaggcaccgcaggtggagaaaagagatgaaagctacctcaaggcgtacacgtaaaccttactgaacaatgaccttgatcgttagaaagtcaagaaaatgtactgccttgcaagctgccggtgttctattgagtttctctccgggggcaactcggagatgcctttttggcaccatcggttctagtatttcctctggcctgctgcgccgcgcctcatccaggcttgtagtgaggcacccccactcgcccggagacccgggccggccaggaggtgccagtgggcaggtgtggcagcctgcctgttgattacagtccctacaatgtgcgagctccttgggactgcaggctgcgcgccgccagctttgcctggttcgtcctgattacactaggttttcgggcagaaacagcgacactgagctcgggctgggggtggggccctcgggcccagtgcccgccccctgccctcccaccgccagccgagagaagcccgcccgggagcgcgctttctaatgcaccagcccccgggaacaatctgtccctcccaaacccgccacggcgggggttcacctcccgggtacccgccgcgcccaccctatggcctaaatgtcttttcatatattttaaaaactgaactgtgtgcagtggggatgcagggcgggaaaggctggagggctcattttcgccaccaggcttgcctctccgggcgcacgaattaggcccgagctagagtccaacccccttcccgcctcagggggctcggggtggcgcggggttaggggcaatgaacgacgatggaggcgccccaggctcagcggcgggcggggaggcagaggcgggttccaggagccgggctgaggcccggcaggtgcccccaggcgcggaggctgattggcaggtgcgtgagtgggtggggaaggcgggggctgggcttggcgctgcgggaggctgcggccccgcctccccgcccccgccgcgggactatctggtcccggcagcagcgatgtcccccggcaggaatgtccctcctcagataatgttatttatatctctgggcgggtccgcggctcggcagcaccaggcgcccggcggccgctgtgccaggagccccgcgctgccctcctccccctgcgccgccgccgccgccacccccgggctcggggtggcccccgcttcagtcccagggcaggtgagtcccaggagggcccggcggccaagggagctgggtgcgggtgcgcaaggctgggacgcgcggcgccagctcaaaggagcgctgggcccagggggcgcctgacgc

SEQ ID NO: 12532 - DNA, 2300 bp, Homo sapien
ctggtgtgcagaatgtactcacagcacaatctcagttcaacttgccatatttaaagtgctttatagccataagtggctagtgctactgtattagaaagaaattgagataaggatagcaacagagtcctagccctggctgactactgagtagctttgttaccatagacaagacctttaaccactcacttctgtggtttccttatctgaaaagaggagacatatttttcttaccaaccacataggattgtaatagcataaaattagaaactgaaatgaggacacttttgaaaggttgaaaatgtcatacaaatgggaggtattataattattctaagaataaggtaaactctgatggctctagttcttgcagtgtttcttagcacacctatgatttttaataacagttgcagatacttactagaagttgaaatactaaaggttacaacttcagtgcttccgtggaaaaataattcccatattagcaaacccatttaaactggtgtgctttgaaatggttattaatctcttctttaaggaatctggatcccagagtctcccaggctccccaatctttcttccctgacatgacagcaataaagcagggctgagggaggatgttgatgttcccattggggtagaggagtgtgataaagacgcattgttcagaaacagagacaaacttcggagattcgtctgcaagttaattaggtcgttgcgaataaataagatgctttcaatacagagagaaaggatgaggcggggcaacaagcacaagcattttgagacccacaggattgggaaatgatgcaggaacaactgacctggccatttttctttctttctttcttttcttggaagcacatatgtttattggttttttaatctgtgaaccaataggtcatttataaatggatgtgcaaatctgaaatcaaaatatctgcagtcaattcaattagataatttttgaaatctatttatttttaatatactttaagttctagggtacatgtgcacaacgtgcagatttgttacctatgtatagatatgccatgttggtgtgctgcacacattaactcgtcatttacattaagtatatctcctaatgctatccctcccccctccccccaccccacgacaggccccggtgtgtggtgttccccaccctgtgtccaagtgttctcattgttcaattcccacctatgagtgagaacatgcggtgtttggttttctgtccttgcgatagtttgctcagaatgacggtttccagcttcatccgtgtccctacaaaggacatgaactcatccttttttatggctgcatagtattccatggtatatatgtgccacattttcttaatccagtctatcattgatggacatttgcattggttccaagtctttggtattctgaatagtgccacaataaacatacatgtgcatgtgtctttatagcagcatgatttataatcctttgggtatatacccagtaatgggatggctgatgacctggccatttttctatttacatagtgcttgcccgccactgaggtgcttctgtgacacctgagagagatagaaatacgttcctcgttgctatgtcctccagaggactctggaatgaccaattattactaatattttaagtgtttttttaggagattttctgcagcactctgagtgtctcttcccaaacacttcggttactgtttattcacctgctgagatctggtctcttattcactctcattgccttaagaaatggtacagaaatgtattcattaacatttcagatttgtatatgcggtagcgagaaataattccctttcttgtgtgtcgtgatttgcctttcttgtcagcctaagctcaggaaggtgtctgtgagaacttcgctcagcccaagatccctttcccttcccgtcacatctgttagcgcacaagatttcttcgtctgtctccaaaggtttctgaagccccaccctttgcccacgcacggtgccaaggagactgtgccctgccttgacaacagttgctaaggggcggagacttcggctcggttcccgagacggaatacccaggagtcgagtacttgggcgcatgcggcaaccgtatctcagttctcgcgaggtttcgtcttcccggaagcgttggaggacattccctgttgactgcgtcgcgatgtgtggcgactgtgtggagaaggaatatcccaaccgggtgagcgactgggcgctcccttggcccgcgggcggcccccgaggtgtctcatatccaaggctggccttcccagagaggccgtacgtg

SEQ ID NO: 12533 - DNA, 2300 bp, Homo sapien
cctgtctcaataaaaagagcttaaagatttgcctaagggtccgaagtaacagtggcagaattgtggttgtaaaccactgaattggaatcactggagggcaaagctttggcatctctagaaaaattcctacaaacaattctcatttgcagtcagaattaagaaccaccaacccaggctttctgcctaagccagtgctgtgtccagagcaagcactgtcccacagaaagccataagaatcatacgctgcttagtgtatgcttaaagttgtaagcttttggaaagcgaggccagtttgaggtaaatttggagacagagatattttaggagagcctcaccaagtatattccattaggaaaggtgagaaccctgggagtctgaagggtccaaggtcacaccaggagaaaagggatggcatgtacctaaggaagagggaacccccacactcctcatcttgggaactcccatggccttcttgaagaaggcttgcaaaagagcagagaataagaggtgtctctggaggcccagagagtactagggggaagctctaggtatgcacataaatccggcaagttacagttctgcccactatcagtgccaagtccttgtgactcagtggcttggtggggactctttcttattggttgcttctaggaactccacccagcttcagcaggggacacacttccctctacacttcctgtcactccttctgtccacttaggtaatggaaacttgtttttagggagcagccagctgagacacatggtccctgtatacttgaacagccatggaaaagctgcaaggcagcttggcgctccctggtgataattacttcatctcatctcaacaaatcagattctcaagaccagctgctccccggacttgcttattctttgttccaaggagacagttcccaatggatgtgcccctgtgaaaacaccctagtaaacatttgctttgttattgaaatttcactctaaaatcccaaagctaggtcaagccccattgctagttttactgatgaagaaatcaaggcatttttaaaagagtaacttgttgagttggcgggtgcttgggtcttttcggtttctgtggcttccaggggtgggcctctgagatggcccttagcagatgtcctgcgatgcactgcacgcctcttgttgaaagcatcaggggtgacctgcctgcgtctggaaccacagcagcttcaacttcctccacacacttccttctgtgggaaggtgaccagcacaaacccgctctgaaaagtcttggggaccaaatctctgtctgagaggaaggtaggtgcagttcatccactaagtttatccacctgttctgtgactcctcttcaccattctcccagcaacgactgagcctcatgacttgggggctgggggatgaggtggaggtgggggatataatataggagatggtacagtgcaggggcagaggctggtgtgttctccaggacaagtggcaccacgcactgaaagacttttcaagataaacacaactttgtctcttcagcctggcaagagctgaggcactgaaaacttcttttttcccctagaaaatgacacactctcctcctaagggtccctttgattttgtcctggtggaaagcaacaaagagaagaacgtgaacaggaatatgtatatttcagttgtcatctgagtcccatggataggaggctcaattctcttcttcatctttcagatctccgcagaccctgccctctcactgtacaattcagagattgacactcagcaggcattcaataaacgtctgtgtcaaatgagaacaacttgatggggcaagtaggagtcaatcctgcatccctccctccctttttttcctctccattcgacctttagggctctggtttcctgtaagcagtgaattatttacctctgctcatagatatcaaattggcccttcccaggttgcagcagggtggggcggggaggcggccttgttcagtctgttaataggaggagcaacctccttgttcaaacagcacttacaggtggggacctgtttttgctaagtcatcctggggatgctcaaagctccattgttagatcctttctgtcctccttcctggctcctccttcctccccacccctctaataggctcataagtgggctcaggcctctctgcggggctcactctgcgcttcaccatggctttcattgccaagtccttctatgacctcagtgccatcagcctggatggggagaaggtagatttcaatacgttccggggcagggccgtgctgattgagaatgtggcttc

SEQ ID NO: 12534 - DNA, 2300 bp, Homo sapien
ataatggaatccactacatcagttcctttagctttctgtgtaatcagagtagctagcaggctcgggatttcgccccccggcttttttttttttttttttttgagacagagttttgctcttgttgcccaggctggagtgcaatggcgcaatctcggctcaccgcaaccttcgcctctcaggttcaagcaattctcctgcctcagcctcccgagtagctgggattacaggcaccggccaccacgcccagctaatttttttatatttttagtagagatggggtttcaccatgttggccaggctggtcttgaacttttcccctcttattataattcagacacttaacctgaaatataccttttcaaatgaagtaaatgggcttaccactttccttgacctactattgaaaaatacattctccatccaatattcagcctgaaaacaggtatgtacatatatacttttcattgcttttttttttttttttttgagacaaggtctccctctgttgcgcaggctggagtgcagtgtcatgatctcggctcactgcagccttcccctaatgggttcaagcaatcctcccacctcagcctctcaagcctgggattacaggcgagccaccgtgcccagctaatttttttttatttttagtagagactgggtttcactacattggccaggctggtctccagctcctgacctcaaagtgatctgcccgcctcagcctcccaaagtactgggattacaggcatgagccaacgcgcctagcctttcattgctttttaaagacctaataggctagactttgctctccctcaatactcgttggtagggataggcaattttctcaactccggagagcattcatttgcctctctccggtgctaacacattcagtggtaggaaactggatcttgaacaagggccattcattctttggtgccactggctataccacagagaaatttaggggtctgaaacaatacattggtcacctgggcacctatcctaagcaccttagagggaaaacggagacttgcccgcacacctctaaaggattttgcacttggagatgttcttatggccatctatcttttcaccctggtggaggccgtgaataggcattttccccatttaaagaaaaaatggggacgggggagggccgtgacacagtcacacaggtaaggggcagccagatggcagggagggggaattccacccacactctcggggactcatggagacgggtgttcgaatccagatcctgctcaaggccttcctacctcgggtgagcccagctgaggtaccagccactggggagcccggccagatcctgcagatgcagggtgccacggcgggcggaattaccggcgccagacttggggtgggatatggggagaagtggtgagcccggaaagcggagcacggtagaagtgggctgggtgggggctcacctcaactcccccattcggagcgtccgcggaaaaacgaaaacgttcccccgccccgggcaggaaggggttgggagggggggctggcgccccgccccagcgtcgcctgctcgatggggtcccgctctcctgcgcgcgctccccgccccctctctccggggcggcggcggcggcgcaggggaaggggcgggcaggggccgccgccggtttctcctcccaccgcctcgcgccagcccagccgagccgagccgagccgagcgggcgccgcgccgggctcccgccgcagccgcgcttcccggcacccagcgagcgagtgggcaggcgggcgggcgaggcagccgcgggggccgggcccggcgtcctcctcgccgcccgcagcgtccccgggcgggcgcgggccgcgatggcagcggcggagcagggctgagcccgctgcccgcccgcagttcccggccccgctggccccagtcatggcgaagcagtacgatgtgctgttccggctgctgctgatcggggactccggggtgggcaagacctgcctgctgtgccgcttcaccgacaacgagttccactcctcgcacatctccaccatcggtaaggggcggtggcccggggcgcccctccctccccgcccgcggcccctttccccgccgcccccgtccccagctggggaggaattgccagcccctccggctggaggcggtggcgccggaggccggagtccgggataaatctcggggtgagcataggttttggcaggtgagggtgtccctgctgcctgccgtccggaccaggggtggggtctcccgcctcttgccgggaagccttccgtcccatcaaaccgagaaaccg

SEQ ID NO: 12535 - DNA, 2300 bp, Homo sapien
agtcactctaaatatcctattttgagatgaggaaactgagtcacaggggggttcagtaatgtgctcaagattgcacagctggtgagtggtgacactgggactggaacccaagtgtgccttactccagagcccttggcatgcacctgaaaccccatgtaagcccactgtggagacgcgcacctcgaaataatggaatccactacatcagttcctttagctttctgtgtaatcagagtagctagcaggctcgggatttcgccccccggcttttttttttttttttttttgagacagagttttgctcttgttgcccaggctggagtgcaatggcgcaatctcggctcaccgcaaccttcgcctctcaggttcaagcaattctcctgcctcagcctcccgagtagctgggattacaggcaccggccaccacgcccagctaatttttttatatttttagtagagatggggtttcaccatgttggccaggctggtcttgaacttttcccctcttattataattcagacacttaacctgaaatataccttttcaaatgaagtaaatgggcttaccactttccttgacctactattgaaaaatacattctccatccaatattcagcctgaaaacaggtatgtacatatatacttttcattgcttttttttttttttttttgagacaaggtctccctctgttgcgcaggctggagtgcagtgtcatgatctcggctcactgcagccttcccctaatgggttcaagcaatcctcccacctcagcctctcaagcctgggattacaggcgagccaccgtgcccagctaatttttttttatttttagtagagactgggtttcactacattggccaggctggtctccagctcctgacctcaaagtgatctgcccgcctcagcctcccaaagtactgggattacaggcatgagccaacgcgcctagcctttcattgctttttaaagacctaataggctagactttgctctccctcaatactcgttggtagggataggcaattttctcaactccggagagcattcatttgcctctctccggtgctaacacattcagtggtaggaaactggatcttgaacaagggccattcattctttggtgccactggctataccacagagaaatttaggggtctgaaacaatacattggtcacctgggcacctatcctaagcaccttagagggaaaacggagacttgcccgcacacctctaaaggattttgcacttggagatgttcttatggccatctatcttttcaccctggtggaggccgtgaataggcattttccccatttaaagaaaaaatggggacgggggagggccgtgacacagtcacacaggtaaggggcagccagatggcagggagggggaattccacccacactctcggggactcatggagacgggtgttcgaatccagatcctgctcaaggccttcctacctcgggtgagcccagctgaggtaccagccactggggagcccggccagatcctgcagatgcagggtgccacggcgggcggaattaccggcgccagacttggggtgggatatggggagaagtggtgagcccggaaagcggagcacggtagaagtgggctgggtgggggctcacctcaactcccccattcggagcgtccgcggaaaaacgaaaacgttcccccgccccgggcaggaaggggttgggagggggggctggcgccccgccccagcgtcgcctgctcgatggggtcccgctctcctgcgcgcgctccccgccccctctctccggggcggcggcggcggcgcaggggaaggggcgggcaggggccgccgccggtttctcctcccaccgcctcgcgccagcccagccgagccgagccgagccgagcgggcgccgcgccgggctcccgccgcagccgcgcttcccggcacccagcgagcgagtgggcaggcgggcgggcgaggcagccgcgggggccgggcccggcgtcctcctcgccgcccgcagcgtccccgggcgggcgcgggccgcgatggcagcggcggagcagggctgagcccgctgcccgcccgcagttcccggccccgctggccccagtcatggcgaagcagtacgatgtgctgttccggctgctgctgatcggggactccggggtgggcaagacctgcctgctgtgccgcttcaccgacaacgagttccactcctcgcacatctccaccatcggtaaggggcggtggcccggggcgcccctccctccccgcccgcggcccctttccccgccgcccccgtccccag

SEQ ID NO: 12536 - DNA, 2300 bp, Homo sapien
ttgtgtattgatttgtttactatctgtctttctccaccaaaatgtaagctttatggggcagggattttttttttttttttggtctgttttattcattgctgtactccctgacataatagacactgaataagttaaatggttcaaatgatttccagtcattgtaatgaacatttgagtgcttgtttgtgtaacataattgtagatgataatgacaatgaacataatactagccttatctttcaagagctcactatctaataactacagagaccatgtaaataaaaatgagtataaaataaaagtataaatataaataaatctattaagtagaaaagattaaaaatgaaaaatatatataaatgataaaaacataaaataagacataatacatatacacagaatatattccccaagaatgtattctcttacagtgggaatgtagctgaaggagtaattcattctaatctatttaatgaagatggccttttatgtataatatttgtgtttagtaacatttgtaagagactagtctgaagtaatcattttttaataattatatcgaaatttagaaattgtgaaatgtattttaaaatgttctgtattacacaaaatggaatataaaatgtttccaatcataaaaaacaaaagaatagctttctaaatgcagtacaatgatttcatggcacaaagaacagctgtgagcttctcagaaatcaataaatcatcaatactacatggctgcattattttattgtgttgtatgttgatatgaaataaattacattatatattattaatcattacatatactctattactgaaaacctgtgcaaaagtattgactcacagtcctgttttgggtttatcatggtgaatattttaccagcagatacaaaatggaagccaactaaacaacattgttcaccttgaaaactctaagaaatgattttttatttggctgggtgtggtggcgcatgcctgtaatcccagcactttgggaggccgaggcgggtggatcacgaggtcaagagatcgagactatcctggctaacatggtgaaaccctgtctctactaaaaatacaaaaattagctgggcatgttggtgtgctcctgtagtcccagctactccggaggctgaggcaggagaatcacttgcacctgggaggtggaggttgcagtgagccaaaatcacaccactgcactccagcctggtgacagagcaagagtctgtctaaaaaaaaaaaaaagttttttttaaactgttgagaggcaatgccagaggtgtacactgtaaggcataccagtgactctcaagcctggctgtgcactgggatcattggtggagccttcgaaaatccagattctcccaggcaccagcccaaccaactaaatcagaatctgtggggctggggcccaggcacatgcattttgtcaaagctccacaagtgatgctgactcacagctagggttggagccactttgaagcttctttgtatgtggtagaaacatgagctgtccaccagagactggctccccttccacagggagagttgcagctgggaagtggctgctcagcagtctcctttgcatttaggcagaggcttgtgagtgggtgctggccaataaaaagtggaagatgtgatatccactacacctagacctgaccctttaaaacctttcatgcgatcctctatttgctcgcttcccctctctgccaggtgaaagtcaatgcctggggtagccctccattgtgcggaaaagcaagagagatcagattgttactgtgtctgtgtagaaataagtagacataggagactccattttgttatgtactaagaaaaattcttctgccttgagattctgttaatctataaccttacccccaaccccgtgctctctgaaacatgtgctgtgtcaactcagagttaaatggattaagggtggtgcaagatgtgctttgttaaacagatgcttgaaggcagcatgctccttaagagtcatcaccactccctaatctcaagtacccagggacacaaacactgcggaaggccgcagggacctctgcataggaaagccaggtattgtccaaggtttctccccatgtgatagtctgaaatatggcctcgtgggaagggaaagacctgaccgtcccccagcccgacacccgtaaagggtctgtgctgaggaggattagtaaaagaggaaggaatgcctcttgcagttgagacaagaggaaggcatctgtctcctgcctgtccctgggcaatggaatgtctcggtataaaacccgattgtatgc

SEQ ID NO: 12537 - DNA, 2300 bp, Homo sapien
tgaatttcagagatgaatttttatttctaaaatacagtttgcaattgctttaggtgcatctgtgacagatgcaacaatttgtcacaaaactgtcccagctattctttcaatagcacagtcttcaggattgaagcgttaagtttccagctctcctgcaaagaaactctttgtgacaaaggctgaatccttagatataaccctgaccttatcagaccatttatttcccaaaatataactaagggaaagacagtaagatgccaatacagggggcagtataatgagaccatttcacattgtgcagccttatccatgggtcctaacccatactgtccccttatttccagatttggtaatattctggtgcctctaggtcttagttcagcaacagtaccactaaaatggacatggtggtagtatttatccacctgaggtctttaggccagcccagcctcatctttgaaatttttgtgagtgcttctatttactaccagagactgagaacaggggaatggctggttgtcaaatgtcactctggtctataatccctggatcctagacatgtgacatggaatggagtgggaacagagtgaagtgctctgagcaggaagtaaagcttgtctccaagtgtacccggaatgtctgttatcataccttctataatctcctacatacaactcccccagtttaatctcttggtattataatttttggtgtagtacttttgatgcatgccctaaaataaattctcttctattgcttgtccaaaggtagcagcgttttcctaaaaatcacaactttaaacttggttgttctggaggcaagtgtgatgagtaagtccactccataagaatcaataagaatttcttttattctagctgggcgtggtggtgagcatctgtagttccagatactcaggaggctgaggcaggagggtcacttgagcctatggtttttgtttgtttttttgttttgctttttttttttttttgaaacagggtctcgctctgccacccaggctggagtgcagtggcacaatcatagctcactgcagcctcgacttcttgggctcaagagatcctcccaccttagcctgtcgagcagctgggactacaggcatgcgccaccacgcccggctaatttttttgatatttaatagagatgaggtcttgctatgttgcccaggatgttctaactcctcaagtgatcctcctgcctcagcctcccaaagtgctggggttacaggcgtgagccaccgtgcccagcacatgtcttctaaaagctgctgtttcttcctttttcaggagttctttcccatactgttcttctggatgactcctcgtcatccttcggatctcaaatgaaaggtcatttagagaggcttggcctgaccatacaattcaattagtttcttacccctttagtctctctcatagaccctgttattttccttcatctcatttatcacaagtcttcatatatttattgcgttggatacattcaattctgtcgattttcttagaatgtaaggtttccaagggaagggacttcgttttgttcacttttgtattcctagaacctagcacaatgcctgacacatagcaggtgttccataaatatctgcggactgactgtctatttcacttatccttgttccttgtactgcatttcagttctcgctactgcagtgtaacctccaagagacaggagaaaatcataatacccccctccctccatcactgagtgatactgagacggcgtccttgcacgtttgagcagctgctgccttctcctgggaggctgtcaagtaccccaaggtgcacaataattcttttagtaattgcctgactgaggcaaatcagtagagctgtcagaaatgctttcaaacttaacattcattgggttcttgggcacctgaaattgcaaacaattgcattacaattaagtgagaattagcagaatgttacagttctttaacaatttgcgtaacaaaccgaggcgtcctacgccatctcgctgaaatgaaattcggatgtagacacccttgcgcttcaggactctacgctcttgcagcagctcctctgcccaatggggggcggcagcatctcagtaactcactcgaaagacgggtaggcgggaggagacattcgcgttcaaaatctttttgcctctatccgctcgccgtagcgctttagcccgctcgagtttcaatgcgcgttgttgcttaacgaagcagagtcctacacactgtctgctgctctcctgatcatggcttctccgagttctttcacctactattgccc

SEQ ID NO: 12538 - DNA, 2300 bp, Homo sapien
agcccagcctcatctttgaaatttttgtgagtgcttctatttactaccagagactgagaacaggggaatggctggttgtcaaatgtcactctggtctataatccctggatcctagacatgtgacatggaatggagtgggaacagagtgaagtgctctgagcaggaagtaaagcttgtctccaagtgtacccggaatgtctgttatcataccttctataatctcctacatacaactcccccagtttaatctcttggtattataatttttggtgtagtacttttgatgcatgccctaaaataaattctcttctattgcttgtccaaaggtagcagcgttttcctaaaaatcacaactttaaacttggttgttctggaggcaagtgtgatgagtaagtccactccataagaatcaataagaatttcttttattctagctgggcgtggtggtgagcatctgtagttccagatactcaggaggctgaggcaggagggtcacttgagcctatggtttttgtttgtttttttgttttgctttttttttttttttgaaacagggtctcgctctgccacccaggctggagtgcagtggcacaatcatagctcactgcagcctcgacttcttgggctcaagagatcctcccaccttagcctgtcgagcagctgggactacaggcatgcgccaccacgcccggctaatttttttgatatttaatagagatgaggtcttgctatgttgcccaggatgttctaactcctcaagtgatcctcctgcctcagcctcccaaagtgctggggttacaggcgtgagccaccgtgcccagcacatgtcttctaaaagctgctgtttcttcctttttcaggagttctttcccatactgttcttctggatgactcctcgtcatccttcggatctcaaatgaaaggtcatttagagaggcttggcctgaccatacaattcaattagtttcttacccctttagtctctctcatagaccctgttattttccttcatctcatttatcacaagtcttcatatatttattgcgttggatacattcaattctgtcgattttcttagaatgtaaggtttccaagggaagggacttcgttttgttcacttttgtattcctagaacctagcacaatgcctgacacatagcaggtgttccataaatatctgcggactgactgtctatttcacttatccttgttccttgtactgcatttcagttctcgctactgcagtgtaacctccaagagacaggagaaaatcataatacccccctccctccatcactgagtgatactgagacggcgtccttgcacgtttgagcagctgctgccttctcctgggaggctgtcaagtaccccaaggtgcacaataattcttttagtaattgcctgactgaggcaaatcagtagagctgtcagaaatgctttcaaacttaacattcattgggttcttgggcacctgaaattgcaaacaattgcattacaattaagtgagaattagcagaatgttacagttctttaacaatttgcgtaacaaaccgaggcgtcctacgccatctcgctgaaatgaaattcggatgtagacacccttgcgcttcaggactctacgctcttgcagcagctcctctgcccaatggggggcggcagcatctcagtaactcactcgaaagacgggtaggcgggaggagacattcgcgttcaaaatctttttgcctctatccgctcgccgtagcgctttagcccgctcgagtttcaatgcgcgttgttgcttaacgaagcagagtcctacacactgtctgctgctctcctgatcatggcttctccgagttctttcacctactattgccctccatcttcctcccccgtctggtcagagccgctgtacagtctgaggcccgagcacgcgcgagagcggttgcaggacgactcggtggaaacagtcacgtccatagaacaggtgaggtggcaggactgggcgaggcgcccgcgcgatgtgttctgggagcgcgagtcccgttcgtagggccgcccgggtgcggaactcaccggggaactacgactcccacagcgcaccgcggtgcctttcctctgggaagctccgggcgcccaggcttgggcttcgtcgtggagcgtttgcgcggccagcttggggaagggtcgtttcaaggttgggcttggaggagagggcagtagccgagtcccctctgccctaaagaacgagaagaatcgtgttctatgcctggaggacagaggcagcccgtgcgggtcggacagcccactctgttctgc

SEQ ID NO: 12539 - DNA, 2300 bp, Homo sapien
agttatgttacagttggtaccatatcagctaacaatttattgaacagtgtgctgaaagcttaccatgcattctctcataatttatgagatggagtctcgctgtatttcccaggctggagtgcagtggcatgatcgtgagtcactgcaacctccgcctcaggttcaagcgattctcttgcctcagccttctgagtggccaggattacaggtgtgcaccatcacgcctggctaatttttgtatttttagtagagacagggtttcaccatattggccaggctggtctcgagctcctgacctcaagtgatccacctgcctcagcctcctgaggctctggggttacaggcgtgagctactgcgcccagttgcattctcttatttaaatcttgtaactacatgaggtagatcaatctcttgttttttgcagataatgaaatgggcatagtaaaattaagtcatttgctcaaaggcacatagcgagtaagatgaggagctgggattcaaacttaagctgcatccctggcagtgtcttcagtagctcaccagcctaccttccaggtggtgggttagccacagcttgggatatcagcatagttttgaagagagcagcttgggccaacggaaagaacactggattgactctaaaaacctaggttcttgtctcacctctgacatttgctatttttataatctgaaaaaggttaatctttggacctcatttatatattttaatttataaaactggggcagtactcctacctaccctgcctagccttgaatgctcaataatcatttatggtttaattaggatcaagagccgtctgcattttgcctttggaagcctttcctagctccccaggcagaattagtcagtctcttccacgtgctccctcaaaactctgttttcgtccattacagcatttctccaggtatatgtacacgtgttggttccagaaagacatgaggtaacttatatgtctgtccagtgctctcttcccctacaggtaaccacacacattctatatcccaagcatctcaagaacagaaaccagttcaggcatggtggctaatgcctgtaatctcagcactttgggaggctcaggcaggtgaattgcttcagcccaggagttcaagaccagcctgggcaacatagtgggatgctgtctctataaaaacttaaaaaattagccaggcatagtggtgtgtgcccgtagtcccagctacttaggaggctgaggtgggaggattgcttgagcccgggaggttgaggctgcagtgagctgagatcataccactgcactctagcctgggtgacagagcgagaccctgtctcaaaaaaataaacggtagaaaccaaattttattatcatccccccagtgtctaatacagtgcttggcacaagtagatactatcaaatatttgttgaatcagtgattgagttaagctaggaaatctcttcagagaatgtatatctccttggttctataccgagaaaatagcagcccctaacctcctggcctgtaggaagtcctctgctcagccttccttagatgcctgccagggagggatccactgggttcagggtcatcttttttttaatcctgttgtcttttttttcttttctttcttttttttttttgagacggagtcttgctctgtcgcctaggctggagtgcagtggtgccatctcggctcactgcaacctctgcctcccgggttcaagtgattctcctgcttcggcctcccaagtcgctgggattacaggcgcacatcactatgcccagctaatttttgtaattttaatagagacagggtttcgccatgttggccaggctggtcttgaactcctgaccttaaatgatccacccaccttggcctcccaaagtgctgggattacaggcatgaaccaccgcgcccagccttgttatcttttttttttttttttttttttttaacagatggtcatttcagctcctggctaaggccacaaagcaaagtgtcctttattcactgattgttgtttgagcaagggtgccctcctcccccttgccaggctgctgggagtgagacagatacagccttggcagcagtgtcttggagtgattgtgaataagggatgttttctctcctgtctctctcccagtgtctggatgccagccgcccatggctctgctattggatcctgcacagcttggaactgctagatgaacccatcccccagatagtggctacagagtgagtctgtctttgggaaatctggggtgttctctgaaattgtattttgagtttgggattttgttt

SEQ ID NO: 12540 - DNA, 2300 bp, Homo sapien
cacagctcagcagggtcacagccttcccgccaggagaaacctccatttacaacaagcaaactgtctttgcagtgttcatggggccttctttcctgggcgctttcacctcattatttccttgctactgctgccagaaagactacatagcctactctccaagaagacacaagtttataactgtttgccaacatcacatttaattgctttcgatttcagagttcccattatccgggcagagaaagcaaaagcaaacgctgctgccttgctctgtgagttctgaaacgtcacaggttaaaacaacacatacttctttttgcacctacaattttactgtagaaaacacaaggattgaaactgaagttgaaaacaattatgtggcactatggtttttgtttttgattttgagagagggtcttactctgtcggccaggctgcaggacagcggcataatcacggctcactgcagcctcaacctccccagactcaagctatcctcccacctcagcctcccaagtagctagaattacaggcatgagccaccacgcctggctagtttttgtattttttataaagatggggtttcgccatgttgcccaggctagtcttgaactcctgggctcaagcaatcctcccacctcggactcccaaagtgctgaggtcacaggtgtgagccatcatgcccagcatgtgacacatttttaacagcaattaatttctgtagagaacttgaatttgttccttctttccaaatcgtcatcaattcttatgacatttcccagaaacaaatagttaataagctcatgccctaacaaaggctggctgcactagcataccaaaaggtttctgtaccacaaaaagttttagctgatacaaaacttaacagcacattttttaaaagaaagaaaaagagtcacctggttatccactccctttcccagctcctaagatagaatcgtgccgaacgcaacactactgaccctaaagcctcgaattagttaggatctgaatgtaccagacacaccttgataccatccctccatgccaacctccctcagctgacatgctgcatctgactgtctggggctgtgctagagaactggaggttgggcttctcttgatctcagacacttccgtattacagaacattctgatcccaaggctttccaacttgcaccttaaggaattggcaagttgactatgaactaccagctgtcattcacagacttcttagcaattctgaagaccaaaatgttaatgatacttctacatatttaaaaaaaacaaacaaacaaaaaaaaggagccaggcatagtggcttgtgcctgtaattccagtactttgggaggccaaggcaggaggattgcttgaagccagtagttcaagaccagcctgggcaacacagtgagaccccagctctacaaaaaaatatttttttttcccacaaatgtagggggagaaaaacttatcatagagacaagaagttcaccaataaataaaaaattacaagcaaaaaacattgtacaaacaccaagtggcacattttgtgaaaaacaagtattcacaaaatcattcctttagaatatgactgaaagctgcaatacatcaattttctttaacgtcagcaaggcatttcattctagcttacgtgccaattaccagcaaagtgggaaactatcttctatatcatggatcttcaaacccaaaatgtgtgcatcagaatctgtagaaagctaataaaagaatacagagacccagtcctgctgaggtggaaaagatcctgggcctttgtatttttaccaaattctcaggtgattcagatacatgcaaagcttgagccatcactagtccttgctgcacaactaaaattacttggggggtgttttaaaaaaatcccaacacccaagccacacctaattccaattaaaccggaatcactatgggtgggacccaggtggcagtattttttttaaactccccacgtgattccaatgttcagccaggtatcagtgcttctcaaacttgagttgcatagaaattacctgtggatcttgctaaactgcagctctaattcagtagaactagatgggtctgagagtcctctttttttttttttttaggagatggagtgtccctctgtcgcccaggctggagtgcagttgagcgatctcagctcactgcaagctctgcctcctgggttcaagtgattctcctccctcagcctcccgagtagctgggactacaggtgcatgccgccacgcccagctaatttttgtattttttagtagagtcagggtttcact

SEQ ID NO: 12541 - DNA, 2300 bp, Homo sapien
gtaacagggcaggactccgtctaaaaaaaaaaaaaaaaggcttaagaaatctcaagtgctgactaaatcagtgagttactttgtttttttgttttgtggagcaataagaaagcagcaggcctgtgagtttccacttggcttggtagttactggtttcttatatgttcttttggacataccctggaattttcttgcctacctgtgaaattgagctacagatggctgcacctatcagttatggtgtggaaagacttttgatttttttagataaaaggaacctttgaaatgcaaaatgagattagaatggcgacctataatttcaggaagaggtagaaaggatttaaaaggtggattccagtgtgcagttatcaccctataatcgtatctgctttcatcttgttgtgattatgtgtgctggtgtccaaattcaggatatctggaagctccttgtagagcttttgaactttgagcttctatgctttaataatataggaagtcactgaaacagtctatagttttttatataataaacatagcgttttcttttcagactctaattttagccacaggttatcatttaccttataataatagtcttttatttgttataggatatgaaatatatgtacattttgtacagatgtgtaatgcagtttcctaaagtttaataaatatgcttttttaaataatagctttgttgagatataattcccataccacacaacttacctattcagttgcgaaccatcatgacaattttagaacattttcatcactcatccccccaaaaatccccatacacattaaatattttcttaaaaaggaaatcgtgaaggaaaaatcaatagtatgattacaatattaagtataaaacatatatatgttttacattaattaaattttaaaaattttaaaaagttttaaactcacataaccaaaacagaggagcaaaaaggagaaaatagatgcagcatatgatgtagacaaggggcaagtataagaaaaagctagattaataaaattggctattggatctcagaagattaggccaaacagacaccatcataaggaaatgcaaatattaaacacaagttatggaaaaatttcaccctaattagtaatcagaggcatgcaaatcaaaataaactatcaggtactatttctttttaccattttaattgctgataacttttaaaaagtaactaaagctggccgggcgtggtggctcacgcctgtaatcctagcactttgggaagccgagttgggcagatcattttaggagttcgagactggcttgatcaacatagtgaaaccctgtctctactaaaaatgcaaaaattagccaggcgtgggggcttgtacctgtaatccaaggtactcaggaggctgagacaggagaatgacttgaacctgggaggcagaggttgcagtgagctgagatcacaccactgcactccagcctgggcgacagagcaagatagcatctcaacaacaacaacaaaaaggtgctaatgctggaggtggtatagcaaaattttaaattttgctggtagctatataaagtctttgtttttatttttagtttatttatatatttatttttgacagctcctgcagagcagggctactccacagggattgtgctgagagtagtctataaattcttaaagcagtttatcagtatctattaaaagccttaacaatgtttattccctttaaccgaataattccaccgtggtcagtctatttgaagaaaataatcttaagcatacataatattgacaaagatttagtccagcattcctcataatggcaaggaactggaaacaaccttggaaataagtaaaagaagatagagtgaagtcccatcatatatgtatgtatcttctacaacaaagttcactgtgcttacaggtgaggaaaagaaaggaagggaattaaaatagtgcaagtgtatcaaagcatgtggcctgcagccagcctgagatgggagattggatgcttctccttaggtcggacttagtttcctgtgtctcttaatgggtgtttcagggctgagtgcgactcagggttgaagacgagaagcttttgtccctggcctctaaatgtcacctggccactgtccctcacctagtgctcaaccttggaaacccttttcctctgtgtctctttttaaagaaatttaataaattcttattgtctgtttgaaatattcaacaatttaggctgggtgcggtggcccatgcctgtaatcccagtactttgggaggccaaaagagggtgggtcacctgaggtcagg

SEQ ID NO: 12542 - DNA, 2300 bp, Homo sapien
ggttctggcttaattggtttggggtgtggcctggggatgggaacttttttaagctcctaggatgattttaacttgtagccggggttgccctagagtgctctgttcatagcaggcacccaagaactgtctgttgtaatcatcaattagctttaacttctagtatccagttaattaactcactcaaaagtggccgtctgtctccccaatagcccatcagctcttatcacataatggtctgcttatatctgtctccccaactcagcaggaaaggaacactatgagacaaaagcatgtagaaaaggtaagttcacttgcaaagatgtgcagacttagtaggactggatcactgaataagaaatacaacagatattagaccgcgagcggtggctcacgctataggcgtgagcacgtgagcactttgggaggccgaggcgggtgtatcacgaggtcaggagtttcgagaccagcctggccaagttggtgaaaccctgtctctactaaaaatacaaagattagctgggcgcggtggcgggcgcctgccccagctactcgggaggctgaggcaggagaatcgcttgaatccgggagagggaggttgcagtgagccaagattgcgccactgcactctagcctgggcgacaaagtaagactccgtctcaaaaaaaaaaaaaaaaaaaaagagagagagaaagaaatacaatagatattaaaggaaaaaatgtaaaggaaaaattaccacatttacatttgtcttttcagcatagatgacatgctcacgttgaggaatgtgtgtcacaagaattgtgtgtgacatatccccaaatttccacattcaaaagtcagggataatatggtattcatccgggaatcagtaactcatgggaaaagctcaagatgtcattcactttggagaccagatgtaaaggagtagtatgggtactttgtctcagggtggaaagtgtctgttatggttttcttccttcccatgggacttgttgcacactcttacaatggcggcaggaccggcacgcttgcttgcacagctgtgagctgcatgaaggcagggatggttttggtcttatccgttatggcatccccttgtggcaagttaggtgttcaataaatatcggtggaatgcatgtgattacacttcatgccacagtatataaatatgattttaactggacagggaactgcaaaagtttcccatattgatcctttttgcaatcttaattatggtactctgagctgggatattgcctaaactgtctgggctacaacaaactctgaaggggcttttacttccacgtccatagtggttgagggttcgcgttgtgtgaacgctggagcctcacgtgagtagctgagtagcgaggatggtcactcccagataaacgaatacaggattctcgcggctgggagcggtcgcccggcgaggtcggtcattctgcctgtccggtagcaccacgaaacacctgccactgacacctccccaccagcccccgagggttcgcgcaggcatcccgagccgcgccccctggtccgccgcagccagattccctcccgggcgggttacgcccctaggcgcaaaacggaaccactccgtatgaagaagacaaagtataaccagtcacaccaaagagaggcagcattatttagacagccggctactcccccagagactccacccagtcccctgggcccggcgtccagcgcgcagacggtgcccggctccaggagttccagctccctccacgtgtcctgtcttcccagcagcctcctctgccgcctcgggaggaaaatctcctgacaactcgcggtctgcggactacgactcccaggaggcgccgcgccgcggctctccccgcccccccccgcccccccccccctccccgggacgcgcaggcgccttgggctccgtcaacaagccgggctggcgtcgcctggatgcggtttcttccgggatttgtagtttttctggagctacccgggccgtctgttagagggacaagaactacaagtctcggctgccccagcgctgcgagcctggtcacgtggcgggggccgaccgggcgtgcgtgccgccgttgatccggtgctgcagtgaggaggtggttcttgcccgtgttgtgtgtgtgtgtgagtgagagagcgagtgagtgagtgagtgagtgtgtgtgtgggggggactcggcttgttgttgtcggtgacttccccctccccttcaccccttcccctccccgccgccgctgcagtggccgctccctgggccgtaggaaatgagcgataacgatgacat

SEQ ID NO: 12543 - DNA, 2300 bp, Homo sapien
ctcctgagtagctgtgattacaggagccccccactgcgctaggctaatttttgtacttttagtagagatggggtttcaccatgttggccaggttggtttcaaactcctgacctcatgatctgcctgcctcggtctcccaaaattctgggattataggcgtgagccaccatacctggtctttttttttttgagacagagtctcgctctgttgcccaggctggagtgcagtggcgtattcttggcttactgcaacctccacctcccaggttcaagcgattctcctgcctcagcctcccgggtagctgggactacacgcgtgtgccaccatgcctagctaccttttgtatttttagtagtgatgaggtttcaccatgttgaccaggctggtcttgaactcctgacctcaggtgatctgcctgcattggcctcccaaagtgctgggattacaggtgtgaaccactgcgcccggccaacctgcagttgcttttactgtgacaccttagtgtcctcttttagttatctagttaacaaccttttttttttttttttttttttgagacaggatctcactctgttactcacactgagtgctgtggaacaatcatggctcactgcagcatcaacttccggggctcaagcaattctcctgcctcagcttccggagtagctgggactacagacacacaccaccacaccctactaattttttattatttgtagagatgaaatctcactatgttttccaggctggtctcaaactccaggactctagtgatcctctctcatcggtcacccaaagtgctggaattagaggtgtgaaccactgtgctcggccccagtaattcttacattaccttctctgttcaaataacagatggtgttttctgtcccctgagtgagacacatctcaatgaaaaaaaaaatggagaattacagtatcccagaggacttgctggggtaaagaattagtgaggcctctagcgaggaaagactggagtagttgcttaacgttttttttaaattatttatttatttatttacttatgtattcatttatttcgggatagggtctcactttgttgcccaggctgtagtgcagtgttgtcaaccctgctcactgcagactcaagcagtcctttcacctcagcctcccaagtagctgagactacaggcatgtgccaccaagctcagctaatttttgtattttttgcagggacaagtttttgccgtgttgcccaggctggtctcaatctcctgagcttaagtgaccctcctacctcagccacccaaagtgctaggattacaggcgtgagccactgtgcctgtcccggtttttgaatcacagagcccttggagaaagagatggaacaaaggactttctctctaggaaatgtaaatgtctatcggcacattgcctacctgcaacccttgcactcagttactcaattttaagcgttggtggaccccaaagcccaggtactgattcttgtggtagaatgttggctaggttgagtctccatgttggaggaaatctagtgggctctcagaggctgttgcctaaacctaggaaaagtcgaacaaaagatctgtcagtccggggttgccaaggagctgtcctagattttcagactccctgaatttgagttaaatatcctgactgtagacctgccaaccaccctggacttgtaattgctcttgcatctgaggccttaacaatgtgtcatattcaacaacaactattttactcatgggggccccgccaacaagaatgagccttctgaagcagagccctgttttctaggccatcctcccccagaggcccctggctggccccaggaggccccaaccttctctcccagtccttcagtgccacgtagagtgtagtcctcctggacagaaaggcgcgtcgccatctcctggccggcactattactgcacgtccattttctagaaaattcctggcatctgggttctatgtaaacgtaagaacttttcctttactgtgagttagcaatccggatgtgttttgtggaagattatgccctaagcccttagaagggaggacactgagtttgggaaaagtcactacctctgggcttcattttttgccctaaggcaatgaggttatcctgatgctgaggaatctatggcaaattttcctttctccctcaaactatcctgtcaaccttttcatattagaaggcagagaatggaaaatacacatacacagtaagtacctgctacatatctttatagagctgtcctatgtatatttgttttttggttccatgttgatcttt

SEQ ID NO: 12544 - DNA, 2300 bp, Homo sapien
aacccatttattggctaattgagttgcctttctgtagttggagttttgggtggttacctaaagaattggcagatgaaaacaaaaataaacagccctattaataaggaaggacgggagtgaatgttcaattagaaatcaatagtgtgaactatatgctgctttatcccagtggagaagacagaaatttcagccatggaggcaagtcatagggagggatagtctggctagtttcatcagtctttaaatcaatcacttcatttactcttgtaatgggaaagatttgctctggctttttaatgagtaggtatagagtttgtttaaggagctggctcaaaagtgacttaaaacacattgaatttgaaaatatagattcttagctactcaggaggctgaggcaagagtacagcttgaggccaggagttcaagacgagccttggcaacattctgcgaccttgtctctaaaaaataaaaatgaaaatatagactttttttccctatatttcatttttgtagttattgtcaatggtgtgtcaagttggctagatttatagttttagaactgacgaacaactaaaacttacctagtccaacccttttattttacaaatgagaaaactgaggcccagatgggtaaaatgattatctcaaggtcaccccttcttgctcttggcaataacaatgctgccctttggatgacttcctggaaaatcggatcctgtaagtgaaatgtagctagagcaacaattataaaacaacgagaacaattaacaattattcagaatgcttccatggctgacagtcagttggtacacgttggtagagatagaaaaatttctaaactatttggtaagtagcttatgctaagccttctgagtgcctcaaccccttgctggaactccacagatctccccaccgtaataacaggatccacctcaaaggtttgatttgagaattaaatggtggaggtaaagagttttgcatgaggcctggtgctcagcactattacactttggctattatttttattacagtcataataaaatggtagtaaatttcaaaccagtttctacatgaatgttcacaacttaggaaatgtgatagcattcacgttcattaactttgatctagctaatctctcaataaaatggccactcatgtactcactttaactttcattttgatcttttccatagtctaagggttgactccttcttgccccgggacacccgagtccccatagctctagctgatggttaagaatttgaccgaggctatatacaagaaaacaatgcactgacaaggccctgttacttgttgtataacagatcataacgattgttctgtctaatcttttgttgaacagaacttgtctttaacttttgggataagcaaagatgggtccaaaacctagtttggtgagggaggggtggagtaagaggtggagtacctgtacttacttaagcaactattacaaactggcagtgatgagcagcagaggcaagcagttgggagaagagaatgagagagcgcagcaacagggtgggacctgcagcttgtggaaaaatgcttttgacacagatactttctgatggccagtgatgtttagaaccttttgggggattccttctctctcagaatttaacctggcaagagaacgactgagttctaggaattttcttgtctggagagagtaaaataaatgtattttttaaaagctgggactgttatccacactgagaagaggcagggtataaaattccctttcataagtgaatttcctggaaattcatgattggcttggaacttaatgtgtaaagacttgttctcaaatatcagttgtttgacagagacctccagttttgggatggcagctaaatcctgagcctgccttggaaagggttttgataataatgttccatcacaggtggagaagcacattgattcaacaaagcagacttcaaaaccactgaagaattagtttctgagtgtattcaagagataccaaagttatttgttattttaacgtatattatactgttctatacaaatgcaccaaatcctgggcaaaacattcctaggacaggtttttttttttttttttttcagttggaaggaggtagggaaaataagtgctttaattcctaggattttggaagtaaaaatggaacaccagacaaaaatggaatttttaggcaaatgtaaagctttgtacttgggtatctcaaagtattatacagtgtaaactatcatgattattaaccaactagaagtagttcttttttttaaattttatttttaat

SEQ ID NO: 12545 - DNA, 2300 bp, Homo sapien
tcaagttggctagatttatagttttagaactgacgaacaactaaaacttacctagtccaacccttttattttacaaatgagaaaactgaggcccagatgggtaaaatgattatctcaaggtcaccccttcttgctcttggcaataacaatgctgccctttggatgacttcctggaaaatcggatcctgtaagtgaaatgtagctagagcaacaattataaaacaacgagaacaattaacaattattcagaatgcttccatggctgacagtcagttggtacacgttggtagagatagaaaaatttctaaactatttggtaagtagcttatgctaagccttctgagtgcctcaaccccttgctggaactccacagatctccccaccgtaataacaggatccacctcaaaggtttgatttgagaattaaatggtggaggtaaagagttttgcatgaggcctggtgctcagcactattacactttggctattatttttattacagtcataataaaatggtagtaaatttcaaaccagtttctacatgaatgttcacaacttaggaaatgtgatagcattcacgttcattaactttgatctagctaatctctcaataaaatggccactcatgtactcactttaactttcattttgatcttttccatagtctaagggttgactccttcttgccccgggacacccgagtccccatagctctagctgatggttaagaatttgaccgaggctatatacaagaaaacaatgcactgacaaggccctgttacttgttgtataacagatcataacgattgttctgtctaatcttttgttgaacagaacttgtctttaacttttgggataagcaaagatgggtccaaaacctagtttggtgagggaggggtggagtaagaggtggagtacctgtacttacttaagcaactattacaaactggcagtgatgagcagcagaggcaagcagttgggagaagagaatgagagagcgcagcaacagggtgggacctgcagcttgtggaaaaatgcttttgacacagatactttctgatggccagtgatgtttagaaccttttgggggattccttctctctcagaatttaacctggcaagagaacgactgagttctaggaattttcttgtctggagagagtaaaataaatgtattttttaaaagctgggactgttatccacactgagaagaggcagggtataaaattccctttcataagtgaatttcctggaaattcatgattggcttggaacttaatgtgtaaagacttgttctcaaatatcagttgtttgacagagacctccagttttgggatggcagctaaatcctgagcctgccttggaaagggttttgataataatgttccatcacaggtggagaagcacattgattcaacaaagcagacttcaaaaccactgaagaattagtttctgagtgtattcaagagataccaaagttatttgttattttaacgtatattatactgttctatacaaatgcaccaaatcctgggcaaaacattcctaggacaggtttttttttttttttttttcagttggaaggaggtagggaaaataagtgctttaattcctaggattttggaagtaaaaatggaacaccagacaaaaatggaatttttaggcaaatgtaaagctttgtacttgggtatctcaaagtattatacagtgtaaactatcatgattattaaccaactagaagtagttcttttttttaaattttatttttaattttagacatgagggtcttgctatgttgcccaggctgaagtggctactgacaggcacgatgtggcactgcagcctggaactcttgggcttaagtgatccttcctgcttcttctatcttaaaaaaaaaaagttacgcttgcttgttaaaatatttttaaaatgctgtgtttaaactaagaagtaaatatccaccccacctctgacttctaaaaattatctaaagtatgactggtaagatttttacctttaatcccacataagtctaaaatttgtgttcatttccaacaaccaaagtgtgtcacttttataccagaattttgtcctgcttatacgtttagtacagaaatctcatgggagagagcatccatgcatttacaaattgttattgaattattttattgaatgatgacacccaaactgagctagaacataattctggctctgctagtacatcttctgtgtgatcttggacaagtcactctactttcctttcaattttcttttctcacagggagataatcataaaaacga

SEQ ID NO: 12546 - DNA, 2300 bp, Homo sapien
agtattatacagtgtaaactatcatgattattaaccaactagaagtagttcttttttttaaattttatttttaattttagacatgagggtcttgctatgttgcccaggctgaagtggctactgacaggcacgatgtggcactgcagcctggaactcttgggcttaagtgatccttcctgcttcttctatcttaaaaaaaaaaagttacgcttgcttgttaaaatatttttaaaatgctgtgtttaaactaagaagtaaatatccaccccacctctgacttctaaaaattatctaaagtatgactggtaagatttttacctttaatcccacataagtctaaaatttgtgttcatttccaacaaccaaagtgtgtcacttttataccagaattttgtcctgcttatacgtttagtacagaaatctcatgggagagagcatccatgcatttacaaattgttattgaattattttattgaatgatgacacccaaactgagctagaacataattctggctctgctagtacatcttctgtgtgatcttggacaagtcactctactttcctttcaattttcttttctcacagggagataatcataaaaacgactgtaaagtacagcacttcatagagtgctttttgtttaaagagctgacaataaatacgagtctcaaggtctaggaaagcctccctcacaacctgagctgcttgaggacaagggattttcttttgaatcagcagtaccttatttgtgtatctgtgatagagttcctggtacataagaaggtctcaataaatatgtgaatttatgaatattaggcagattgcaaccttgacaggccactgcctcttaaatctcctttctgtgatcttttaatatttaacatctaaaaggccgccgctacttgctttgggataagtatccccggtatgtactttaaaatgcccaagcctagagaaatgattcttgtcttaagggcaccatttcgctctcccaccgtaaagcgccccaggcttgggatctgggtcccaaggctacagggaagagtttggaacgggaagctcatcttccggccctctgattggccggctcgcactccactcacgcggcgcgcagctctgattggcctcggcggcacccctcgtcccgcgactactttgtgtgctggggcggcgcgctccggtcctcccgctcagctggcggtctgggctgctctggggcagcccttcggtccactgctctgcatcgcgggcgccgggaattttccgagtccgagcgggtaggacgcatcctagggcaaagcctctcccctctccccgtgctgttctctttcccgtactaaataaacttccgcctcagaggggctgtcgcagccgcgggtcgggagaggccgggcatcgaactcaggccctcgtggggggggtctttctcttcgagtgaatgtggaaacagctcttacaagataaagtagggcttcgctgagtctcctgggggagcgatgccattgtaggatcgcgctggaagcagcagtcaagcggccaaatgcgggctgcaggggctgagcagcagcagcgcgcacccctaaaagtagcaaggagccagcttcaaaacctctagtgcgggtgccccctagggccgccgactgagctggcacgggccggtccattcccggcgctgtagggagcacagcattctctggaggcgagtctcctcccgggatccaggatccgctcgcgccccgctcagcctccggccttcaggcggtagagggcggcctacgcctgtgtgcgagccggagccggcgtgcgcagccgctgccctgctggaactgtgccgtcccgctgtggcccgcggctctgctaggcggtggatgctgctgctacgctctccaccggcgcagcgaggaagggggcggggagaatccctggcacatgccagggtcgccgtaggtggcagcggccggcgcatgcgcgccctctcccagaagccaggaacgccgaggggcgcgctcccccattcgcgcgcgcacgccggcgctggccgaggcttccccgcctgcgctcgttgtcagagccgctccggcgcgtgcgcgcgttatctccggccgacccgagcagccggttccctcctctccaggccccctccccatcccacccccgccgcctggccccagccgacccgtcccttcgtctccccgcggaatggggccggcactgctcagggtcgcgcgccctggacccagctcgctctcggtctcgcgctgtcagcgactgcccggctcgcgccgcctcgcgctctgcct

SEQ ID NO: 12547 - DNA, 2300 bp, Homo sapien
tatgcaagtttcattccagctgttcagctcttgaattcaaatagaattctcaatttataaggcagcaaaaagaaaatccatgtcttggaactacctttgtacgtgtcttatagcctattcatctctaactccctgcattttttacacactaaacctgtgaaatcacaattacaaatgcttgaattcccaccttttcaatactactgtagtatttacaaatcaagtaattaagattttctatacacataccagatttcacaaggacagcaaggtacagggccttattatttggcatagggttttaagatgtttttacagttattttaaagagcagagactacaactccattatttctcatatatctgatatactgtagtgcttaaataataatttctctcctaaaatactttctatatgatgcacctatttaaagaattagtcataaaacatagaatgtaaatttaatcaagaaaataaacatgcacctaaccgccggaataacaagaaaaaaaaaatctataatgaaacctgcctacagttttcatagaggcaagccagttaagtcagttacttgagatgcgtttaactctaaactgacacaaaacttgtgttgaatttgttccgcaaaaccttgaaatttggggttatgtactacagaatttggcttttctgggtccaccttcctgagtgggtttaaataaactgtgaataattaaaacataggaaggaaaaaaacaccacctgtccgtgcctttaaccaaggcctcaatctatatattatatggcaaaatgctaaaataaaagctcatccgggacaaaccctaagcatgacactgccacttaagaaatacactgcgtctctgaagattgcaatccccactgtgaagaaagaacaggtgctgcacccgacaacccactcaatcctgcaggacaaacctcctagaactgataaatatggactcatttaaccttcccaaataagttgatactcaaaagccgccagctcgtcatttgcacatcaaaagggagtacagctgcactcaagcctttaactgccctgcatcagtccctcgcggatctttgtgagggtccactccctgctttctagcccgagcagcactcagaaagagcccataacgcacgggcatcttcctccccacaaaccgcgactccagggaccgagctgctgacgaagggaaggtaggtgtggaggggaaacgacggacacctcccacccccgcccccaacccttctccttccctaggctttggcccctgccctaggcaaggatgcgcgacgccgagggcagcagcggcgcagctccgcgtcccggctggagaggcgggcgcccctcaccctctgcccgcgcccccggggctgcgccaaggcatccgccagagcgtcccgggggctccctccccacttttccgagagccgctggttaaccggcagcagttgcagcaacaggcccgggtgaacgagcagggacagccgcggagcctcctcagatcccgcgcgcagcccagcccaagaccccgaggcgcgcggggcccggctcccaaaacgcccccttaccccaggcgggagcagaggcggtctccgccgctccccgtcgcagctgccaaagccacagccctcagccgcagctgccccacgatgggggagtgggaagggtggctgagtggaggatgctactcccgaccgaacggagaggaagaaacggaaacaggaaccgccgccgccgcttaacggagccttcggcgccactgactgaggcagagcgcgaggcggcgcgagccgggcagtcgctgacagcgcgagaccgagagcgagctgggtccagggcgcgcgaccctgagcagtgccggccccattccgcggggagacgaagggacgggtcggctggggccaggcggcgggggtgggatggggagggggcctggagaggagggaaccggctgctcgggtcggccggagataacgcgcgcacgcgccggagcggctctgacaacgagcgcaggcggggaagcctcggccagcgccggcgtgcgcgcgcgaatgggggagcgcgcccctcggcgttcctggcttctgggagagggcgcgcatgcgccggccgctgccacctacggcgaccctggcatgtgccagggattctccccgcccccttcctcgctgcgccggtggagagcgtagcagcagcatccaccgcctagcagagccgcgggccacagcgggacggcacagttccagcagggcagcggctgcgcacgccggctccggctcgcacacaggcgta

SEQ ID NO: 12548 - DNA, 2300 bp, Homo sapien
caggcaatatgatcctaaacctagaaaatcccatattccctacccaaaagctcctagatctgacaaacaacttcagcaaagtttcatgctacaaaatcagtgtacaaaaatcagtagcatttctatacatcagtaatatccaaggtgagagctcaatcaagaatgcaatcctagtcaaaattgccacaaaaagaataaaatacctaagaatactgctaactagggaggtgcaagatctctacaaggggaattacaaaacactgctcaaagaaatcagagatgacacaaacaaatggaaaaacactccaggctcatgggtaggaagaatcagtatcattaaaatggccatagtgcccaaagcaatctacagattctatgctattcccatcaaactaccgatgacattcttcacagaactagaaaaaactgatttaaaattcatacagaatcagaaaaaagcctgaatagccaaagccatcctaagcaaaaagaacaaagctggaagcaccgcattacccgaattcaaactatactgcaaggctgcagtaaccatggtatgggtaccaaacaccatggtacccataccatgtatcaccataccaaacagcatggtactggtacaaaaacagacatatagaccagtggtacagaatggagagtccagaaataaagtcatatacctacaactttctaatctttgacaaagctgacaaaaacaagccaaggagaaaggactccctattcaataaattgtgctgggataactggttagctatatgcataagattgaaactggaccccttcctttcactatatacaaaaattaagtcaagatagataaaagacttaaatgtaaaacctaaaaccataaaaactctagaagaaaacctagggaataccattgtggatataggccctggcaaagattgcatgatgaagacgccaaaagcagttgcaacagaaacaaaaattggcaaacagaacctaattaaagagcttctgaacagcaaaagcaattatcaacagagtaaacagacagccaacagaatgggagaaaatatttgcaagctatgaaaggtctaatatccagaatctataaggaacttaacaaggaaaaagcaaccttattaaaaaggcaaacacttttcaaaagacagactcttttcaaaagacatatacacagtcaatacgtatcaaacatcactaatcattagagaaatgcaaatcaaaatcacagtgatataccatcagaatgaggcaacagaatgctgttattaaaaagtccaaaaataacatgctggtgaggctgcagagaaaaggggcatttatacattgccagtggaaatgtaaattagttcaaccattggaaagtggtttggcagtttctcaaagaacttagagagctactatttgaccccgcaatcccgtttttgggtatataaccaaaggaatataaatcattctgctataaagacacatgcaattaacatgtttatcagagcactatttgcaattgcaaagacatggaataaacctagatgcccatcagtggtagactgaaaaaagaaaatgtggcacatatatatcatggaatagtatgaagccataaaaaagaatgagatcatgtcctttgcagcaacatggatggagctggaggccattaccctaagcaaactaatgcaggaacagaaaaccaaacacttcatgttcttattaaaagtgggagctaaacattgagtacatatagacacaaataagagaatagtagacactggggcctacttgagggtgaaaggtgggaggagggtgaagatcaaaaagctgcatatcacttactatgctgattacttggggtgtataccaaaccccacgacacacaatttatctatagaacaaacctgcatgtgtacccctgaagatgaaagattaaaaaaaaaaaagagcagttgacctctctgtacaacttatctttattttcatttctctttctccctgacagaatcccaaggactgcagcaaagccaaaaagctggtgtgtaatatcaacaaaggctgtggctatggctgtcagctccatcatgtggtctactgcttcatgattgcatatggcacccagcgaacactcatcttggaatctcagaattggcgctatgctactggtggatgggagactgtatttaggcctgtaagtgagacatgcacagacagatctggcatctccactggacactggtcaggtaaggagcttgtgcagcatatgagatctctgggctgtttcactcaattaccagattattaga

SEQ ID NO: 12549 - DNA, 2300 bp, Homo sapien
atgagatgggaggaagaaggggtgatgattagaggggcatatgtgagaaggtgagatggggggcttgcctgggtcctgggtgcagagagaggtactgaccctgtcaggaggacagacctggtgccagttaaaaaacaaccgcaaaaccccaggaaggtacaccaatacgtgttgatgctctcacatctggaatcaactgacaatcagctaactggctccactgatcttggctgtactaaactctataggactccacagctgtcatctgatctggatgagcctcatctccacaagaccctcagcttcatcctgggatgggtagacttgcctggacttgttttttctcatggcaatggcagagatgcaatagagcaagctacaatttccaagcccatctgccgcctcttcttgtgtcatgcctgctaatctcccactggccaaagcaaatcatgtggctgagcccagtgtcaggtcagtccacccacacattgcaaagttaaatggcagagagcatgaggtcacagatatcttaacacagataaagagaaatacagctttgacattttgtcaaacacaagaagaaaaagcagtttgtaagaatccaagggaaaaagacaaaggcctagccattcactcctctttcgtgcagatcaaggtgctgccgtattatttatgtccagaaaggttaacactcaactgtggttaatgagcaaagtcagcctagatgagaacacttcatgatagggtcagcattaccttataaaacttaacgacagcaaagtcagctttattgcttttgttgaaagggggaaagcccttcaccacctccatgaagttggtggaatctgctcctgggcaaaagaaaaaaaatgttctctccaaagcttgtttatgagagaagattattggactgtgaaagagtttaatttaaagagcagggtggggagacaggagtgtctgcaaaagtgaggaaaagacagctctggcttacatccatattacacttggaagggcaagaaatgagcttgtggaacaatgaagccaggtttccaagggctaaaccacaaaggtaaggagcagaatggtgattctgtgatggggagtgctttccccatacgcttcagacattccccaaagttatcatcacctgcccttctccctcctctctattttcaggcagaaccattctataaacacctctctctgcttctgaaacaccaaagcacggcactgcgaattataaaccttcagtgtacaaaggtgtccatggttatcacctgtggatcttgagcttacataaatcaggggtctagatgagttgctcccccttctttcaattcagtgtagtgtgatgtattccccctcaggggcattgatggaatatagtgtctaattttaactaaactgtcagaaaattaacacatggctttaaaagtttcctgtaaagaaacagcagttgggagatttgctggcctaggacaggagaacagacctagtgccagttaacaaccacaaagacccaggcaagtacaccgatacatgttgttgctcccaccactggaatcaactgagggttggctaaggggctccactgatcttggctggactcacctgtctgggactccacagcggtcagcttacctgggactccagcagctgtcagctcatctgctacacaggaccctcagcctcatcctgggattggtagacttgcccaggcttgttttcctcatggtgatggcataggtgcaagaggacaagctccaatgcccaagcccatctgcagcatcttcttgtgtcatgtctgctaatctcccactgaccaaaaacaacagggaaatggctgggctgatgagcagcccaccacaagaacaagctcttggtcagccacactgcaaagtgacacagtggtgaggtgatgtgatccctccagagaagtcagctaaaaggggaaaaaattgaaatgatgaagacgattactatttaaaatacgtatttatatccactatcattaactatctttaaactgtcccaagtgcacgttgtacctgaagttgtcataaccggtaggacataaaaactttaagcattcagttcgatcggtagcgggagcggagagcggaccccagagagccctgagcagccccaccgccgccgccggcctagttaccgtcacaccccgggaggagccgcagctgccgcagccggccgcagtcaccatcaccgcaaccatgagcagcgaggccgagacccagcagccgcccgccgcccccgccctcagcgccgccgacaccaagccc

SEQ ID NO: 12550 - DNA, 2300 bp, Homo sapien
ctactgcccattaaatgtttcaaaattctatcatagttctgccaaccaagtatcacaacatgaaatttagagaggcaatactttagcgatcaatgccatttttgtcctctactatttgctaccacctgtcacatatgcagtcaaagatgctactaatgataattcatccaaccagtttcttttttttaactgtgaggcgttttctcaccctcattcaatccaaacttttcatggaaattcctagggcaaccaatgtgaattatatatgatttgatatggctgtcctaatttaacatcatattacaccaggtatcatccaaaacttacaagtgacatatatatgttgtaaaggtatttgtaggccaggcatggtggctcacacttgtaatccaagcattttgggaggctaaggcaggtggatcatttgaggtcaggagtttgagactagcctggctaagaaggtgaaaccccatttctattaaaaatacaaaaattagctgggtgtgatggtgcacacctgtaatcccagctactcaggaggctgaggcacgagaatcgcttaaactcgggaggtggaggttgcagtgagctgagactgtgccactgcactccagcctgggcaacagagcaacactctgcctcaaaaaaaagagaagtatgtgtagagactaccaaagaagttttgatgtagaggatacttaggagagctatgtatcctatttaaccagaagcagatctttgttttgtgggcccctaaaacacataatttggagtggtctgtctttccaaaaaagaatacaaaattacgaatacaaaatgaggttcagggcctttggaagaggtctgtgaaaataaagggctctaaagtttaagtttcattagcctcatataaatcaccctttctgtatctgaccacttaactgaggcattaagcaatcctaaaacccaaaccaaataaacacaaactcactaaaatgggaacatctaacatgaaccaagctctgtacataatacatttcatactcacaacgaacctatcaggtcgatattacctttctcacttttacaaaagcagaaactgagactcagaaaatttagtaacttgctcacaagcagctcactatgcacagtgaagctgagatccaaaccaaagtctgacaaactaaatcttgtgttatttccattataatactctccctttaatgtttcccacaacataaaggggttaagttactttggagaacacccctagaaaatggctggaagtgttcagttagtacttgacattgacatgacttaactcactttgagaccttcactaaaaatacttctctaaaactgtgtttaaaaggcatgaaaaaaaaacaaatgtataactgggttaccttccaataagtgacatagatgaagacaagagatcttaaggtccaaaagaaatgtagtaaaagaaatgtaataaaaaagaaaatagaagcagaaccagaaaatcctgaagggaggctagaattattacacaatctttcagggaagagtgtggttatggaaggacatactgacgatatggatctttcacaaattaaatcctcttcctacatgtccaatattcttttacctgccattatgataatatcaaattttaaagattgaaaaataatgacagtggcttatatattatattattctattatatccataccctgtatttgccagtttgatctcttttaaaaaaaagtctcttagaagtattccttcttcctcttgaggcccccaaaaggtatatgctgtgtctttatcttttcttcatttgcagactctgtcactgtgctctacagatagtggcatttcacagaggtttgttgccatgaaagaaggtgttgatgagtcgtttttgacagtccaacattttctaacacaaaagtagatatgatgtgattccatcctattcattcaaagacttcagaataaaactttgtcatttggctagatctaaggcaagaactgatcagatgtagttagtatttccagtcaacaaactgccattgatgttgaaattactttaaagacctgttgattatgtggtattagggccattgtgacctcgctgtagctaagatcagtccactgcagcaggagtttcaagaacagcagcacaaaaataatgacttaactggatagaaaaaaaggcacatattttcaggaaggcctctttattcttagaagttacccttcaagatgacaagtggtgcaaactcttcaggatcttacctgccctcagaaataaggtgagtctttgatggaaa

SEQ ID NO: 12551 - DNA, 2300 bp, Homo sapien
ataatattgattccaggatgaattctgaagaatgtcacactgtaacaagagtaatagtgtgtacatattataatattcattcaataaccatcagtaaaagttcactctagacagtaaagtcactgcgtttttcctttgtaaggtttgtaaaaggttgctgaatttgagaaagatgaatacacttaagaaaaacggttgaaagacaagcattataatttagttccattattattttttaggaattttaatacttacagtcagtaaaacataatgaatgttaataaacctccatatactttagaacaggggtccccaaactctgggccatggacaggtacccatctgtggcctattaggaaccaggccacacagcaggcagtaaccattactgcctgagctccgcctcctgtcagatcagtggctgcattagattgtcataggagcatgaaccctattgtgaactgcggatgcgtgggatttaggttgtggcttcttatcagaatctaataccttatgatctgcagttttctagaacagcttcatcccgaaaccatcaaccctccccatctccatccatggaaaaattgtcttccacaaaacagatccctggtgccaaaaatgttggggactgctgctttagaaaatttaattcatatccacccttcccacttaaattttaatgaatttaaccatcaccccttttatgaatgcagaaagttagtctcttgtcctcttattattgatttgtgaaataaagtgccagttttcttccatgaataattacagaatattctaattaaaggagtgcttatttagtctaccactatacttaaaaggtacttatttagtctaccatcttatttaaaggatgaaggaaaaggcccaaatttgtttagggtcacaacctgttagtgggcaggtttagaccttacgtctaagatagatgtaagacagacgataagctcaagatattttctaatcatttagagtgtgttgcagagaatagagataggttaggaagataacaatataaccaactatttgctcttcatgtttagtttgagataacggaaatcattctcttggacatactttcttatctttatctctcatttcaaactagttaacaacccgttggccaccaggatctaaggtgacaatgatagggaatgagttcatgacctggcttaaatttttaattactgtcaaaaataccagcaatacacatactaaaaacaaaaacaaaagcaaaaaagccattaatttattttacccacttcaattccatccatcatctacttttaggccccattatttaaaatgaaatacataagcacgtgaatcttcagaggatgggtaatttcatgttccaacggaacaataaaaaactcataatcggccaggcacggtggctcacacctgtaatcccagcactttgggaggccaaggcgggcgggtcacgaggtcaagatcttgatcgagactatcctggccaacatggtgaaaccccgtctctactaataatacaaaaattagctgggtgtcgtggcacgcgcctgtagttccagctactcgggaggctgacgcaggagaatcgcttgaacctgggaggcagaggttgcaagtgagccgagatcgcgccactgcactggagcctggcgacagagcgagactccggatcaaaaaaaaccaaaaccaaaaccaaaaaaaaacctatcaaagtgactttgaaatttgtgtataaacactgatatacatcttttaatactttgcttttcacttttatgcctccaggttactacagctaagaagagaaaacatatacatatgagtgtgtgtacacacacacacacgcatataactttttaaaattcagaagttgaaaggtccagaacgatagtaagaaactaacgtagaatagccacaggtgattaataacacgtttcatgaaaggcacatggaaataaatggcaacaaaagctactttcatggtaatctcacatcccacgaatactgaaatgaaaatcgccgcggcaatggactgtggttcaggtggaacacgttctcgttcgctaaggagattgatgcttttcatctaaaagcagcgctcatggcgaagaggcttaaggccacaaaaccgtgggacagcaggaggaagagaagccaggtatctccactccagctgccctgcctcagactcctcagtttcgcacgtgaggatcgtcttgcaggcactgactggagatggaatcctaaagcataggtgaagcggaaatcctccttcagggagagcccactga

SEQ ID NO: 12552 - DNA, 2300 bp, Homo sapien
tcttattattgatttgtgaaataaagtgccagttttcttccatgaataattacagaatattctaattaaaggagtgcttatttagtctaccactatacttaaaaggtacttatttagtctaccatcttatttaaaggatgaaggaaaaggcccaaatttgtttagggtcacaacctgttagtgggcaggtttagaccttacgtctaagatagatgtaagacagacgataagctcaagatattttctaatcatttagagtgtgttgcagagaatagagataggttaggaagataacaatataaccaactatttgctcttcatgtttagtttgagataacggaaatcattctcttggacatactttcttatctttatctctcatttcaaactagttaacaacccgttggccaccaggatctaaggtgacaatgatagggaatgagttcatgacctggcttaaatttttaattactgtcaaaaataccagcaatacacatactaaaaacaaaaacaaaagcaaaaaagccattaatttattttacccacttcaattccatccatcatctacttttaggccccattatttaaaatgaaatacataagcacgtgaatcttcagaggatgggtaatttcatgttccaacggaacaataaaaaactcataatcggccaggcacggtggctcacacctgtaatcccagcactttgggaggccaaggcgggcgggtcacgaggtcaagatcttgatcgagactatcctggccaacatggtgaaaccccgtctctactaataatacaaaaattagctgggtgtcgtggcacgcgcctgtagttccagctactcgggaggctgacgcaggagaatcgcttgaacctgggaggcagaggttgcaagtgagccgagatcgcgccactgcactggagcctggcgacagagcgagactccggatcaaaaaaaaccaaaaccaaaaccaaaaaaaaacctatcaaagtgactttgaaatttgtgtataaacactgatatacatcttttaatactttgcttttcacttttatgcctccaggttactacagctaagaagagaaaacatatacatatgagtgtgtgtacacacacacacacgcatataactttttaaaattcagaagttgaaaggtccagaacgatagtaagaaactaacgtagaatagccacaggtgattaataacacgtttcatgaaaggcacatggaaataaatggcaacaaaagctactttcatggtaatctcacatcccacgaatactgaaatgaaaatcgccgcggcaatggactgtggttcaggtggaacacgttctcgttcgctaaggagattgatgcttttcatctaaaagcagcgctcatggcgaagaggcttaaggccacaaaaccgtgggacagcaggaggaagagaagccaggtatctccactccagctgccctgcctcagactcctcagtttcgcacgtgaggatcgtcttgcaggcactgactggagatggaatcctaaagcataggtgaagcggaaatcctccttcagggagagcccactgaggaagccagcggctagcacgaggcaggacaggatacctccctcttcgcccacggcggcctctctgtcatagtagccaccgttctgccactcatgcagctttctaagacacctctcggttccccagcgctttcagtggggcggccggccattcccgagggttgcaagaggaggcccggggtgctgagccagcctcgctgcccccgcgtagaaagccggcccgccggcgagagccagcctaaggcgcggacaaccaacgaggtgtcaggctcggcaggggattgcttctgtctggggcccggccgaggttgcgttcgtgcctcgcgcgcacacgctccgcgttcactcagccaatccggtgctactcgcgcgcccaggagcgatccgcggtcctactcaggctgggccggctccttcccgctcccaatactcagcacccgagctctcactcctcccctcactctccacgagttccacgcctaggggtgtagctccgcccttgtccccgagtccgcccccgcaacctccagagcgtgtgctatcctttcctctcagtcctgccatctagctgccttgggtctcgcgctccgcagagcgttccgacactctccggcctcgttctgccgcctccgcgcgctctccccgtgcggccaccgcgccccccaagcttgcctccttcttgccggacttggggccgcgcgccctgactccttcccctcccgcggacccgcgc

SEQ ID NO: 12553 - DNA, 2300 bp, Homo sapien
ggggcacttgatgaagacctgagaaactacttggttacctaatttttcaaaacaataaaatatttgaaaatgaacatagaaggtaacatgactgtaaataaccttggctcaattcataaataaggaacctttgttcttcgcttttttatttctttaaataaagataaacagcacaaaaaggcaaattacacaaaaagaataacctttcttattgtaggacaggcgttaatcagtaccaaagaaagaagcacatcaaaactcagcaaactcactaaaattttaatatgtttctcagcttcacttcaaacacagttactagaaaccagggcaaatacaatctcatgaaagtttgtcctttattatgctcttttatattctggaacaaattgacactttagagcaaagaatagtcttcataaccgtaagggtccttgagaccttttaagaggacctgcaaggtcaacactattttcataataattttaagactttatttgcttttttttttttttttttttgagacagaggctcgctctgtcacccaggctggagtgcagtggtgccatctcggctcactgcaagctccgcctcccgggttcatgccattctcccacctcagcctcccgagtagctgggactacaggtgcctgccaccatgcccagctaattttttgtttttgtatttttagtagagacagggtttcaccatgttagccaggatggtctcgatctcctgacctcatgatccacccgcctcggcctcccaaagtgctgggattacaggcgtgagccaccgcgcccggccagtttgccttttttattccacttctctcattctctttccttttctcatgagtgtatgcttgagttcttccagcagctaaatgatgagtgatatctcatcagattgagtgaatcagatatgagaatctgacttctggtaacccagaagttaaagagattttcaaaattataaaacaacgcattgaaaataaattactgggctgggcgtgtggctcacgcctgtaatcccagcactctgggaggctgaggcgggtggatcacctgaggtcaggagttcaagatcagcctggccaacatggtgaaaccccgtctctactaaaaatacaaaaattagctgggcgtggtggcgggcgcctgtaatcccagctacctgggaggctgaggcaggagaaccacttgaatccaggaggcagaggttgcagtgaccccagatcatgccattgcactctagcctaggcaacaagagtgagactctgtctcaaaaaagaagaaaagaagttacttatgttaacatgaaatggctttattgttgttattttcaaatgaaccaaatgtttttttaatttcttagttttaatttctaatatagtaaatatccatagctatagctcacataaacaaaaactcttagggatccttaatgaattttaatttaagaatatgtgaaggggtcttgagaccaaaaattctgagaatcgggccttaagaaaaaaatattatttttccttgaaaaacaaaagaacacttatagttatacttctctgtcattattgttccttatataattgcaactacccatattaattatgatgtttaagaaaataactaatatctgtgtcatagagaaaactagggagcttggataattgagaaataatatgtaaccattttagcagactagcaaagctcataaacacaaagaacacaactttctactgcgggacacatcccttttacaccttagtgtagcaaagatgaatcaacacattcattaacatgacccaaaaatacagcctttccagcaaaatatattcaccttaagaagtacatagttactaactatatagttttaatttctatataattaataactatattctttttaaaaagctaataacttaaaatgatgcttaataataaatgctctaatactctatcttagaaattaggtatcttacgatgatttattaatcaattcagtttaatatcaactcaagattttaagtaaataaaaatcttaaattattttgaaactgacatactataaaacataataactattaacattgtaaggttggccgggcgcggtggctcacgcctgtaatcccagcactttgggaggccgaggcgggcggatcacgagatcaggagatcgagaccatcccggctaaaacggtgaaaccccgtctctactaaaactacaaaaaatagccgggcgtagtggcgggcgcctgtagtcctagctacttgggaggctgaggcaggagaatggcgtg

SEQ ID NO: 12554 - DNA, 2300 bp, Homo sapien
atttcctagttaatggcaccatcattcacccagcttcccaaacctctgagtcaccttttccctccctaagcccagtgagtcaccaaattttgtggactctactgatagttcccaagttaactccctcctttccattgacactgccactgccactaccatggcttctgcatctccagaattgcccttcccaaatctatccttcactctgctctcagaatgatcaattcagaacataaatctctccatgtaacactctttattagagctactggagcagatgaagtcccagcacctagttatggctttcaaagccctccatcatctaggctcttcttccgtgaacttcattttctttcaacccttcaactttatgtaacaccagaccatttgtagttacccctcaaaccctgtcattttatgcctctgtgcctttgctcagactgactaatctttcaggatttagcttggatattagctcctccatgaaaccgtccctaaatcctccaattggactaagtacccttcatctgtgctcctagaatcccctgtcacccctctatcttatcactacataacactgaaataatctgtttacatgaccccttctccacttgatggtaaacttcttgagtgcagagactgttcacctttgtggtccagcatggcatggtgcccaggaaatagtaagtactcattactgagctgaccaaaagaatgtaccttgcattgcactcaccagggactgaatgtggcaggaaagcttcatatcccaagcttaggacatgcagctgagaagatcccatgcaggcgtgaataggcaggcccatctcatgagggacaaagagggctaattgctcacggacctcactttgacaaagtgccacaaattcagacttacaatctccaaatgaagttatacatacagttttatattttgtgcatctttaaaagcattttaaagacgcttttgaaggtaaatattttaaatataccattatttttatttccttcttttggtatttcttctctttttaatgtatcagtagcctcaaaaaatggacgtgagataataccaaagtttaatcaaggtaccgcagaattaaattgatatcatcaacagttaagagatgagatcagatctatgcaaaaatattttctggcccttgggcaggaagaacaggaacatggcaagttgtgatcatgcaataagtatgctcaatgaagaaatcttactcagtgggactataggtatgaccagaggaagaatttgtccatccaaaagatggcactcaacatagaataggcgaaacagagcatctgagacaataacaggggaaccactcggacaagtgcagaaagagactcagccaatcaagtgcattgaaccaccaccagagcctaatatcattaaatattcatgctatacagccctcggctcagtttcttttccttccttccttccttccttccttccttcttcctttctttttctttttctttctttctttcttttctttctttttctttctttttctttctttcaatagaaatggggtatcactgtgttgcccaggttggtctcaaactcttgggctcaaacaatcctcctgccttgctcttccaaagtgctgggattgcaggcatgagccactgcgcccggcctcagctctgtttctaagcagtttccctctaaaaatgctatattcttttaacgcttttcttcacagaggctcaaagtgccttaaatatgtttaagtctctgaaacttgggatatagggaaagtgaataataaattatcaattgtatgatcaatgatgtaaagtctgatatttttcccgtggttatactattgctaaattgacttttctctccaagaaatcctctgaaaacttcacaccaccacctgaatgcccactcctgagcggtccggtcagggctccatgggaatgctgaccacacttcctctcaggggcagacctgcacggctgctcctccccagtgccgttcttctcttactgcagagactatgtcagcacgttatgattatgatgcagcagcaacagaacaatgcccagagcagcctggcctgtgcttcttttactaagtggttagttgcctgctgagtagacataaacacctgctaaagaaatgtgaaaagagtggaaacgtgctatttggaggttattttcctagtcgacatccaggagatctccagagatctatttcagccccacctgttggtaagtgactgtctcattactgcaacttgggtttgaaactgaaggagaaggaaatgaat

SEQ ID NO: 12555 - DNA, 2300 bp, Homo sapien
taaaaaggaatttcacatattttgagataagcagctggtctgctatctcacactcatactaataattattttattatggtggggtcctgtatgggaatctaagcagctgaggaagcaaggctaggtacttggcgggttcatttgggtggaggctttttttgtgtgtgtgttttgttgttttgtaaaactgcctggggccaagagattggaagttacggataaagatatactatctttccaaagaggtcctttctttgaacagctagatctgcagtccttacctgaagatgattttgctcattcctccccatgacctttggtgatgtctggagacatttttgattgtcacattggggagggtgatgctactggcacgtagtgggtagaggctggggatgcttctaaacatcctatgatgcacaggacagtccccacaagaattatccagcccaaatgtcaatagtgccaaggatgagaaattataagctagagaaagaagaattcattgacgagctggaggaagcttcttgaattattatttatgttatatatttaagaacttagaggcggggcacggttgctcacgcctgtaatcctagcactttggaaggctgagaaaggtggatcacctgaggtcaggtgttcaagaccagcttggccaatgtggcgaaaccccgtctctactaacaatacaaaaattagccgggcgtggtggctggcacctgtaatcccagatactggggaggctgagggaggagtatcgcttgaacccggggagcggaggttgcagtgagccgagattgcgccactttactccagcctgggcaaaagagcgaaactccgtctcaaacaaaaacaaaaacaaaagaacttagaaaaggaagtaagtcacacacagtaaccgttttttcttttggggtatggctagtagtttctaggaatcctggagactttatctggatttcagttaggcatttcaccagttctcatggcatctttatggaggaatatgggccaagaagacagttcggttgtgtcgtccacctgtattcgaagcctactgagaaatttttgatggcaggagcattaaggtctttagtggcatgcagcagagttctgtcctccgctctgtcttattaaacacttggacagaatgctgatcagatttgagaaggataacaaatctgggaagggtaggcatccccaaagatcttcaccaccaggaacaacggtttgcttcgttcaggccatcacagtgtccttagtgagggacaccacaacccataggctgtccagaggagcgtaatggggaagaatgtgaaagagcttgaaaatcaggacctgaggacattgcgagatggaaaaacaccgtgggacaaaatgaggaaaaccgagagaaatggaaatggcatatacgaaggctttgagggaggactgtgcccctgggggaaactgtgcccccgggctggagtcacaggcatagtttggcctcatagaaggagaggtcgattaacaaaccttgcaagtgttcaaatgtggaatgggcttgctcggaaggtactgtcaagacagagaccatccgagggcttttattgcaagtgtcgagacacattgctggtgtttctccttagaacgtcctccaatctgctctgacttccgcccgcacccgcctgagtcctgccccattccaagggtggcacatccaggtcccgagggcgccagccatgcccggagcacgggctgatctgcgtaactctgtcccttcgggagacttctgggaaatagttctagtccttgctatccttgctttctggttttcagaaatcagtgcagctgctggctttatgcagtcttctgcgggacactgcacacatccaggtgtttatgtcattttttaaaaaaaacaaatgttagattgggtgactaacttgacaggacatgaggaatctcttcaagaggaatcagattttcttcaggatacgtcatccagagacaagagccaagggatgtagaaacccagggaagcctcgcgtccccacaaagcccgccggccaaatcccgaaggggctctaccgggccagctagcccggagcagtccgcgttttagacttagaggcgcgcgactgcgcgcacccggctggagctgcggagaggaccaatgagcgggcgctctctccgctccggctcgggattgggcaagccgcgccagcctctcacgggcggggtgggactcggatccgcgcgcccactgcgccagagtcccgggggcgcgtgcgcggtctcgcggcggccgcaggggc

SEQ ID NO: 12556 - DNA, 2300 bp, Homo sapien
gtagctgggactaaggcacatgccacaatgcctggctaatattttgtatttttaaaaattattgttattttaaaaagagacaggatctcaccatgttgcccaggctggtctcaaactgctgagctcaagcaatctgttcacctcagcatcccaaagtgctgggaacacaggcgtgagccactgtgcctagacattttttatatttttttagtagagacagggcttcgccatgttgcccaggctggtctccacctcctggactcaagcagtccacctgcttcagtttcccaaagtgctggggttacagacctgagccactgcgcctggccaggaatgattatttaataagtggtactagaatcattggttatttggaggaaaaataaagttaaattttttcagatctatgctgaaataaattctagatgaattaaaattaaatagaagttaaataaagtagaaattataaaaagctagaagaaatctaggtaaatattttttaatgacctacaagaagaagtttataagcatagaaacagtgaaagaaatcacacaggaaaagcaggggggtcggagttgacaaattctataataagagcaaccataaatataattaagaggtaaatggaaatattggaaaacgattcccaacaaatatgacagagtatatgtgcgtgtgcatgtacactcacacagcctatttgggagcagggaagagactaccagtgcttttttttttttgagatggagtcttgctctgttgcccaggctagaatgcaatggtgtgatctcggctcactgcaacctccgcctcctgggttcaagtgattctcctgtctcgcctcccgagtagctgggattacaggcgcctgccactgtgcagggttctcctgcctcgcctccgaagtagctaggattacaggtgcccgccactgttcccggctaatttttgtatttttaatagagacggggttttaccatcttggccaggctggtctcgaactcctgacctcatgatctacctgtctgggcctcccagagtgctgggattacaggcgtgagccactgcgcccagcctaccagtgcttcttaaccattttagaataacgttttccagaaaaatgcttgtgctatttatgcacactaacaggcagacacaatgcacatacatatgcccacaactttcagtacaacttaggagactcacatattcattagagttttatagaccacaaaagaagtgcctggtaattgtgaataaacctcaacttccttactagtcaaataaatggaagatttttaaaaataataatatcaaatattgctgaaaatattgctaatggaatgcagattagtaaagcctccctagaaaagctgtttgactttttaaaaaatgtcagaatcttatctaaaagttctatttctgggacttaccttatgaagacatcagaatctcagacaaatttatatgtagcactgattattatgtaatgaaatgcttgtttttatggtagcaaaaaattggaagcaatctaaatgttcaactttagtttaatggttactataaattatggtttagccatgtaatagaatataatggaatcattaaatatttaaaaagactagtgatatgggaaaacatttacaatgtactgttaaaaaggaaataggatgttaagaaaaaatatttctaggtgatgggattattggtggttttaaatttctttatttttgcattcctcccctcacttgtttttatattgaatgtgtattagttttataattaaaacacctttgtaaaaatgcaagttattctgttgtgtaatttttaaaagagttttacttaaaacctatgaaatgaccatgattgacaataatatatgcagattttggtatttttctgaaaacttaaattgttactggttcaaagaaatgttctctgaaaatgcatgttgaattaatactgaaacagttaatttttggataccttttcttcttctactagaaatagaagacttgttttcttcacttaaacatatccaacatactttggtagattctcagagccaggaggatatttcactgcttttacaacttgttcaaaataaggatttccagaatgcatttaagatacacaatgccatcacagtacacatgaacaaggccagtcctccatttcctcttatctccaacgcacaagatcttgctcaagaggtatgtattctaaacatcttgttgatgtctacaaggtaattagtagtggcaggaaggcaggattattggaaaatactaatgtgact

SEQ ID NO: 12557 - DNA, 2300 bp, Homo sapien
gaagacaactaacttaaactcaagacaaaatgtctcagatataaaagtcacacatcaatactatattggacccatagtacaaaacaatttatatcattcaactgtttgaacttctgtaacagtaagaaaacatattaaaaatatgacaactctggcttgtcctgaggcagtttcttgcatgactctcattctggaatgttgtacatctgaatatggcacacagaatcctttgttcccagcagggaatctacttcaccactgtaactgaacacactgacatttttgctaaaacttatgtctaccgtaagctcaagattattggaagaacattctaggactccacagagaactgaaactttgtggtattggagttgaaatgaaaatgataaagcccgaatccacctagtttttatcaaatttaaggcattgttattccattttgtgccaaaatggcttatatcacttatttagtacttcatgtctgaagttctctttcaaattacaatccacgactaagatgaaacaaaatgttttagctcaaaatttttagctgaactaggcaaaactgacaataagttcatactgctagatagccactctcaagccttcatactagcagaacagattcagagattcagaatgcaactagataaccggttggttacattttgtaacgccatcattttcttagcacaattttatagagttaaaattgaaaatctgttttacttcagcacttctatcattgagtaataaagcactattagaaataccaataccagcgcaggggctcccccgcctgtaatctcagcactttgggaggccaaggtaggtggatcacatggggccgggagcttgagaccagcctggccaacagggcaaaaccccgtctctattaaaaatacaaaaaatagccaggcgtgatggtgcacatctgtaatcccagctacttgggaggctgaggcatgagaatcacttaaacccaggaagcagaggttgcagtgaaccaagattgtgccactgcactccagcctgggcgacagagtgagactctgtctcaaaaaaaagaaagaaatatcacaggagaaaaaaacttaagtagaataaatacaatcagatacaccatcctctacaccaaaaactgtggaatacacatcctaacaggtgtgcacagaacattcaccaagaaagaacagatgttgggccataaaataaggctcaacaaatttgaaaagactgacatctttcagggtctgaccacctggaattataaatcagttaaaatctttttcacatctccaaataggtggaaactatataacatacttctaaataactcatgtgttaaagagaaaaacaaggaagcggggtgccgggggctcaggcccataatcccagcactttggaaggctgaggcaggtggatcacctgaggtcgggagtttgggaccagcctgaccaacatggagaaaccccatctctactaaaaatacaaaattagctgggcgtggtggtgcatgcctataatcccagctactcgggaggctgaggcaagagaattgcttgaacccgggaggcagaggttgcagtgagcagagatagtgccactgcactccagcctgggcaacaagagcgaaaccccatctcaaaaaaaaaaaaaaaaaaaatgaagggaaattagaaaatacttctaacaaaatggtaacaaaaatacaatgccaaaacttacgggatgcaactaaagaactgtttcgagggaaatttataatttcaaatgcctacatttgaaaagaagagtttaaaaattaagcattcatcttgagaaactaaagcaagtgcaaattatagtcaaagaaagcataaaaagaaatgaattaaatagaaaagagacaataaagacaaatgccctccaacttatttcttttgctaaagtgtctgattattccttttgataataataataataattattattattattatttatttcctggttccagattgtgtctttattcctctttctgacagacagcagagcatttgtctggcatatattctctcttaccacaatatagatgattttctgtgactttaacaatacatacaagaaaaaaatcacatctttatgccaataccattctttcacaatactagaagaacagattcagagtacaattacataactggttggttacattttgcatccagtgagtaacaccatcatcttcttagtttctatatctatttatttatttatttatttatttatttatttatttatttatttttgagaccaagtct

SEQ ID NO: 12558 - DNA, 2300 bp, Homo sapien
tgcagttgtcactacctcgggatagtcctcatctttatttccccacaactagcttgctgcctacttagtgcaaacagctattagaaagtcaacaggtgaaggtaaaaaatttaaaaacttcatttcattaagagctatttagtcaccgggcagaaagaaatctgggcttcaggtttgaatataacttttattttaagcatcctcagattctctcaaaggacagaatgaggaaaaacaacaaaacacccccacagagataggaccacaataaaagggtctaaatgtcagggtcaaaactgattttctgcttcctcactgaaaagaaaaagggaaagccaggcgcggtggctcccatctataatctcagccgccagggaggctgaggccggaggatcacttgagcccaggggtttgaggctgctgtgagctctgatcataccactgcaccccagcctgggagaccctgtctcttattaaaacaaacaaacaacaaactaaataaaaataaacaggatgaggaggagaaagggagcaagttgttaggcacatttgagaaaacgtcaaaattttccttacaaactagccaaacacctacagtgatatgccattttcctgacaaagaattcaggccccaaaagaaaggcagcccacaactgagcgtattcccaagcatgagttctttcaagaaatatttttttgtggaccttctatggattaagacactctttcatcctggagagagcccacagtctagtgggagagaaagacacataaacaaatatctactttacagcgtgatgaccggtattaacacaggtctgaacaaggtgcagcggtgagagagcaaaagcagtgcctcagaaacacagggatatcctctcacagcaggtgacatttggcgggatcttggaaaatgagtaaggggatccaagatcgaatccgagggctatgctagggcgattcgattccatccccactttggcttagggacctcttctatatcctcagtaaacttcccttctcagagcatttattaaaacctccttggcctttccagacgaatgtctggctacgtaaactgtgagctctgtagggcagaggtggcgacggttcagttatataaatccagtgcccggctcaataagggtatgtggaatggatgaatccattaatgaataaagacagcagacctccacaaaagcccgccggccgggcgccttttcctaccggctgggatcgcttcgtccagcctgattcactcaggaggaatgcgcgaagaggccgtcaggaagcctcgccctagactcaagaaaagaacctgggaaaagctcaggatcctcccaggaaacaaggaccctcactgtggcccagggtctgaagggaccgcgctccgggttcctaaacctgtgaaagcggcttatcccattcctttacttacattcgcgagggaaagatttcaattcggtctttgcccgacattctgacgataacttttcggctcgggtccccggccgggcaaccgaggctgcaatagctccagaactggcctccacagtgtcttcctctacgggagtcagctggttgtgtcacttgacccctcttgttgctaagaggcagcagggacacccattttcacttccgcttccggttgtcacaggcgacgaagggggaggacagaacagaggcgttgcccggatgtcgaggcgcgcgcaccgcggaaccacccctcaattccggttcgcctcccaacccctccccatccagcttccctgcggctgcgcaatacgcggcacgcgccaggccaaagactaggagcgaagcgtgcacgccttgtctttctccacctttcgtctttggtcacagcgccatctcatggttagctgaaactttgaaagaggattcattcttcagaggcaaggaatcggagtcctatgtctttctcgcgccttgaaggttacttagctaaagctaagatagcgagaaacagtacttttcaggtccttccatgatctacattcgtccttgttctcggaggacccagactctatggttaatgatgaagaggggcctctattcgttcagcgcttgcgcatgcgaggaggttccgcatgcgcggtggagtgagcgaagcgcacgctgaggaggatcggcggccggtgagggggaagcaagtctggtctctgtgattgaagaagtcggctctgggctccagtgcgggaatcacacacatacctcaggtgactaatcccaagctcggtttctccaggaactcactttggtttgtgtccagtgacatgggt

SEQ ID NO: 12559 - DNA, 2300 bp, Homo sapien
ctaatgatacaacaagaaagactcttaccaggccaggcgcagtggctcacacctgtaatcccagcactttgggaggccgaggcgggtggatcacttgaaaccaggagttcgaggccagcctggtcaacatggtgaaaccccatttctactaaaaataccaaaattagctgggtgtggtggcaggcacctgtaatcccactactatagtggctgaggcaggagaatcccttgaacccaggggcagaggctacagtgagctgagatcgtgccactacactccagcctgggcaacagagactctgtctcaaaaaaaaaaagaaaaaagaaaaaagaaaaaaaaaaaagactcttacctaagtaattaagtatagagtgggaaacaaactagcaagcaaataattacaatacaaagtactatgaaagggcacagtgaagcaatgaacaggaaaggtggaacagaaatactaaattataatacttccttaagaacaaatgcttaataagtactagcgtaggagctaaactcaagtaatccgacatcaaatccagaatgtctttaacccacagaacctcaatatcacaacatgctataatactcttatgtgttctgatgtaaaaagtatcagccacctttcaaaatatatcaaccaaactccaggctaatttcaaataccctgcatagtcagttattttgcatgacaaatggtaggtaggacttctttctcaaaacagtgcatggtcaaactgctataatggatatagaagttcacattcctttccaaaatatattatgtgatggggacaactctcgtgataattctaatttggatctaacacgtattaggaatgctctctgaatgctagttcttggtataggagtgctacataagtaaagcttttatttcatcattatagttgaaaaagaaagttatcaccgaatctctacaaacattactgtgcatgagacaactacatcttttggcaccagatgaactaagaataggtagcaaagttctgtacaagtcacccccaaactattgacagagattgttccttgaataacaactcaattgaggggaaataaagacttctctgctatactttttctcgaagaaaccatgttttttgcttaataaaaatttaaaaagcctaagttttgaggataaagagacctcagcatgactgtgtatttaacccgaaaatatatccttatcttaggttttagttatgcttaactaacatagttaacctaacatatgcttaacacagttctattctcattgtcgccaaaatacgacaaactgatagtaacagtaataaactcaagtctcatttagttttggttcaaggggtgactcattcaattatcagatgaaaaactactcggaccccgctctttccaacacggtgcccgtcccacaggtttctcaggtaagaggccagtttggtttccactgagacgcaggggaaatttttggtagagctgttggggcggaagaaaagatggaattctcaagcctggaaaaagcaaagtgctcagcgtcctgagccggggttaagagttacggtgtcacagcgttctcctgagaccgccccatcgtcatggcattctcactttcggcatattgtagaggctgtacaatccactcggcccactttccttcacgagattcctctgctcgaacaacgatgcctctggaacacaggatgacctacacggagccggcgaggaggcccacgacagcgcgggtggtggcggtgctgtccagccacttcccgcgcagggacgggaaagggaggtattagcccggggcctacccgctctcgaacacccatgtcactggacacaaaccaaagtgagttcctggagaaaccgagcttgggattagtcacctgaggtatgtgtgtgattcccgcactggagcccagagccgacttcttcaatcacagagaccagacttgcttccccctcaccggccgccgatcctcctcagcgtgcgcttcgctcactccaccgcgcatgcggaacctcctcgcatgcgcaagcgctgaacgaatagaggcccctcttcatcattaaccatagagtctgggtcctccgagaacaaggacgaatgtagatcatggaaggacctgaaaagtactgtttctcgctatcttagctttagctaagtaaccttcaaggcgcgagaaagacataggactccgattccttgcctctgaagaatgaatcctctttcaaagtttcagctaaccatgagatggcgctgtgaccaaagacgaaaggtggagaaagacaa

SEQ ID NO: 12560 - DNA, 2300 bp, Homo sapien
cctggcaggagccctgccaggagaaggtatccatctctttcccattcccatttctgtgaattcattcaagaacccctcctgccaaagaaaatgccacttcttctaagcctcagaagattgtgtctgggtggggccaagacagcctctttgaggaaggagatggatagaccacagttagagccgaagaggatgagaacttcccagctcaacctctcaagtcctggctttcagcccagctaggtttcagagctgggacaattccttaggaggcaagagtatttgcaatgccctggagctgcataaccttgggcaagttatttaactacttggattcagtttccttgactggaaaatgacataataaacacctcatggggttgttgtactttagataaaacctagcacctactactacaggcctggcttcagaaggtgaccagctgatgttcattctgaattggaatggaagccccactgctttggggcttcctgggaagtctgaaggccagttagtgcagaaggctagagtgggccattgggctggcacgcagtgacccagaccctgcgagttttccttggggctggcaggtgggagtggggttggggggatgtaatatgtctactacagacatgtagaagcaacactgtgtcaagagctccagggcagggactggcctgggagctggcttcagtctggttctgaaaggcaccccccgccttccacaagctggttcaccttcttcctctctagagccttctcttcccttacaggcatctgagggcctttcccatgcctggtgaagagtcctgacagggcccttcaaactggagcacaaataatatggaccggccccatgactcatgcccacaatcccagcactttgggaggctgaggcaggaggactgcttgagcccaggagttcgagaccagtctggacaatatagtgagaccctgtctctataaataaaaataaattttaaaaaaatgtgtgactgtgttctaaggattgttagacagaatcagtactatttgactgagtttccttctgttccaggctccaatatggcctgatagaacattgttgttgatcctatctatttaaaatgttagcattttgttcatcgtggattttttgacattaattttgattttaaaaaatgcattaaaatattatttttctaggtcttacacggtggctcttgcctgtaatcccagcactttgggaagcccaggccggaggattgcttgaggccaggaatcaagaccagcctgggcaacatagcaacaccctatctctacgaaaaataaaaataaaccagccaggcatggtggtgcactcctgtagtcctagctacttggggagctgaggcaggaggatcttaagcccagagtttaaggctgcagtgagctatgatcacaccactgcactccagcctgggtgacagagaaagaccctgtctcaaaaaacaaacaaaaaaccccaaaaaaccaatcatctctctctatatataatttgtctaggttactggactccttggtgcccccttaaattttgtccttaatgatggaattttcggcttcatcttttttgagggagcggggtatatcctgcggacagggggccctgcaaactgtgcctgccgccttaaaactgtgaccttcctgttactgagaggtcttctctgcccccatcagaggccaggataaaattcccataccagtttcggctcacccactgtcccatctcctacttgcaatgagctcaggaatggctccaaatcctggagtcctgtcggttatgttcaattcgataagcgttcctcgagggcaatgcgctaagtgcccgggaagcacctggcgaaggacgctgagcagagagactggaacagtgaggggcgcggggcgcacctggatggggcggggttggccgctctgtacctggaggaccaaccaccgaccctggagcacctttgggtggaaacgtcacgtcagaaatcccgacttggtctgacttcctgccccggggcctcaggctctggacacgcgccagggaggcgtcgccctgccgcgtcggagctgcttcctgggcgccgtgggcgcggactgcgcgggctgcgcgggtgccgaggagcgcgaggcgcggggaaggcgcacctggggtggccctggcgtgcgggcggcgacatggaggacggcgtgctcaaggagggcttcctggtcaagagggtgagtgcgcgtcgagcttcgggacattgcccgggtggggccccgccgacgcggctccctagagcggggccag

SEQ ID NO: 12561 - DNA, 2300 bp, Homo sapien
cccaccacaccctgcaccccaccacaccctgcacagtatgggcagggcagccagcagggaagaggacattctctccacaggtgataccgtcactttgtaatgatccataaaaaggggaaggctaatttctacctaagagtcctagtgtggtcaagaagagaccatgtaccatggggtgggccactttctaacggacccttccccttgaggagtgagagtcagagccggaagtaggctggagtgagtatttcacctgtccactgccagcaatggacctgtcacaggacaaagtggggcaggggaaccaaggtgccaatgcccatgagtgtggcagggttaatactgtttaaggagtgagctcaaagggtcagccttgctgggaggagtttggggagaggggcagccctgaggttctgctaccagggctgaggctctggcagaaccagaactgataccctcccacaaaggaggctccaaggagccttccacagctgcaaggtcctcctctctttcttcctctcattctccatcagtctccaatgctggatacctggcttctccatcccatagaaagctagactgctcagttttggcttgaaaataaaccaggcagggaatagatgacctagaactctggcttttccccaccaaactgacttgcctctaggtccccactgtggatccacagggcctaacccagcctgcctgtgcattggagggcatcatttgttctcagctgagccactgagaagggagcactgccacagcccactagaccgggggtagggaggtgtaactcaggaactccccaggcatcaggccagccggaacagtggagggaagggctgcaagggggtgagggttgggggtgtctcagggcttcatctccggcagctcctgtgctggctagggagctggggtggggcaggtgtggcgaccgacgtggataaagagccgctagtggtaaaggctttgaaaacaagacagaaaagggggaaacgccaccgaacacacggggattgaaacctccaaaagcccaaggttggtgggaatccagcaccacgggggccccagaaggccaagggagcagcgcagggccctgggggaggggagaggagccaagggagggtctcccagcccttgcagaccagcgttgctgccacgcagcctcctggctgcccagtctctcctcggctgcagctcagcaggcccctggggaggtattggttgcaagcaagcacctgaatattgcctaatggaaccagccaaagctcaactaaatccagatcggagggagggaggtcaggccttgcctcccacctgcggccccattctcattgtcccttggccaggacagggcctgctgcttccaaagtcaactacatagtccatcgctgctcagccacaggcctcctggtaccaacccctgaactgggccgcgatccatggacccttcccaatgtccctctgctgcctccacaccccatcccccaacacctgaccacggccccccaacaccggcccccgcggacgttagggggctctgtgtgccctatagggctgaggcttggccggagcagggcttttgctgcatggatggggcaacctcaccagcttggtctctttgtccatgagttccatgagagatccccaggccccccacccgcttcctgctcagtcagtcttgacatggccgttggccagggctagggcgccgctgggctccccgggctcagcgtccttgtcgaagcggaggcggagggtgttgcggatgatgaactgctccatgatgagggccccgcagaaccagggcacggcgtactccagggtgatgaggcccatgaagtcaaagtcgaactgggagtagtcccaggggcaggcgttgaactggcgcaggatgaagccggtggtgaactcccacaggtaggtccagagcgtgtagatgaggcagcgcaggagcagcgggcagcggccgcgcagccgcaggtacatgcgctccacgatgaggatggaggtgccgtagatgaagagggcccacacgctcgtgaccccagggaacttccagttcaagttcaccacgaactcccaggccgctgtgaacatcacctcgcagaagtagccgtggatggcatacaggtaccagcgggacagcgccgtcaggggctcggcagacgccatggcgccgactggggctggctgcggggggcgcaagagagacaggtgagggccgggcgcggtggctcacgcctataatccctgcgctttgggaggccgaggcggcggatcacttgaggtcagga

SEQ ID NO: 12562 - DNA, 2300 bp, Homo sapien
aggacaaatgtgatgagtcacttacatctcagaaatatgagtgacatggaactgtttgagaagaagtggaggaagaaatggggtccccagtggataggcctgctgagaaatcagcaagtagtctagaaatggggctgattggtgcagcaggccagccgactcttcaactgaccacagataatccaaaaaagctctagggagtacagacacctccctctaagtagcatttgggtagagttgcagagaagtcagtggggtgggtgggttattctgttctttgctctgttttttttttgttttgtttttttggagacagagtctcactctgtctcccaggctggagtgcagtggcgcaatcttggctcactccaacctctgccttgcgggttcaagcgattcttctgcctcagcttcccaagtagctgggattacaggagcgggccaccacgccaggctaatttttgtatttttagtagagacggggtttcaccatgatggccaggctggtttggaactcctgacctcaagtgatccgccgcctcggcctcccaaagcgcagggattataggcgtgagccaccgcgcccggccctcacctgtctctcttgcgccccccgcagccagccccagtcggcgccatggcgtctgccgagcccctgacggcgctgtcccgctggtacctgtatgccatccacggctacttctgcgaggtgatgttcacagcggcctgggagttcgtggtgaacttgaactggaagttccctggggtcacgagcgtgtgggccctcttcatctacggcacctccatcctcatcgtggagcgcatgtacctgcggctgcgcggccgctgcccgctgctcctgcgctgcctcatctacacgctctggacctacctgtgggagttcaccaccggcttcatcctgcgccagttcaacgcctgcccctgggactactcccagttcgactttgacttcatgggcctcatcaccctggagtacgccgtgccctggttctgcggggccctcatcatggagcagttcatcatccgcaacaccctccgcctccgcttcgacaaggacgctgagcccggggagcccagcggcgccctagccctggccaacggccatgtcaagactgactgagcaggaagcgggtggggggcctggggatctctcatggaactcatggacaaagagaccaagctggtgaggttgccccatccatgcagcaaaagccctgctccggccaagcctcagccctatagggcacacagagccccctaacgtccgcgggggccggtgttggggggccgtggtcaggtgttgggggatggggtgtggaggcagcagagggacattgggaagggtccatggatcgcggcccagttcaggggttggtaccaggaggcctgtggctgagcagcgatggactatgtagttgactttggaagcagcaggccctgtcctggccaagggacaatgagaatggggccgcaggtgggaggcaaggcctgacctccctccctccgatctggatttagttgagctttggctggttccattaggcaatattcaggtgcttgcttgcaaccaatacctccccaggggcctgctgagctgcagccgaggagagactgggcagccaggaggctgcgtggcagcaacgctggtctgcaagggctgggagaccctcccttggctcctctcccctcccccagggccctgcgctgctcccttggccttctggggcccccgtggtgctggattcccaccaaccttgggcttttggaggtttcaatccccgtgtgttcggtggcgtttcccccttttctgtcttgttttcaaagcctttaccactagcggctctttatccacgtcggtcgccacacctgccccaccccagctccctagccagcacaggagctgccggagatgaagccctgagacacccccaaccctcacccccttgcagcccttccctccactgttccggctggcctgatgcctggggagttcctgagttacacctccctacccccggtctagtgggctgtggcagtgctcccttctcagtggctcagctgagaacaaatgatgccctccaatgcacaggcaggctgggttaggccctgtggatccacagtggggacctagaggcaagtcagtttggtggggaaaagccagagttctaggtcatctattccctgcctggtttattttcaagccaaaactgagcagtctagctttctatgggatggagaagccaggtatccagcattggagactgatggagaatgagagg

SEQ ID NO: 12563 - DNA, 2300 bp, Homo sapien
tcttaacccttctttctgattctctaactgatatcttggcttctacaatagagcttctctgctaaaggatgaaaatattaatattatatattaaaacatttttctttgacctcaatgtttattttttgcctctgagtttaaaagaaattcatacatttttgcgggtccctaaaaatattgtgagcactgagcccggcgcctaccgtgcctcatgcataaggtgccaggaattcagatcttccgaagcctttccagcccattgtgctttcctctgcgcaatgctgcctcccagagcctgggggagagccagctgccagccgccggccacagctagagaaggagattaggcgtactatgccttcgtggcaagggggcacaggggatggcccttttcatcaggtaggccttgctgctagactagctgcttcttgccagcgtgtccctgagacactgtctcctgcgtctctgacagtgtactaggacagcccacatgcctgcctgtagccctgactctctcccttttccctgacctatctccagcaaaaaaacaagttttcctgttatccaaagcctactgtgtgctgagaatattatatgcatgatgtccttgggtcattatactatatttatgatgaggcaaatctccaaattacagaaaaggaaacaaactcagggggaagtctagagttcctgccactggtagcacgtggctgtctacctcctgtactagtttgaggaacccaacatgactccctctgccccaatcagaacccactgctttccttctgagaaaaatggcttgaccagcccaggaacacgatatacatggggatgggcttagaaattccttgtccatatttcctactcccagctttgagaggcacctttgttgatctttgaatattctggccagggacaggaggttgatggaagacctacggccccatcagacaattaggggaagacacaggatcagattagggttaggtattaggttcagacaggaggaaagcagctcagcttcttgcccagaatggggcaagagcagctggatgaaccataggttccttttcttagaagattctgtgctgccttggacttctgagagctgtttgtcactggggtatgttacaaaaaggggtaagggcttcagcctctcttgttgtccctctcctcatttccccccctctccagctaggttgaaaagcggccattagacccctcagatcaggcctcggcatgcatagggtttgcgagagaattagaaagggtaccctctccggatgggttagtgacaaaaggacacccccagagggtgttataaattttcaaaatgccctttcctcttggctgaggcacccagtgccaggacctaggcttggcgtgcgaatgggggctggctgtcattcccactccctgctcagcctttctgcaggacccaggaccagtccaaggggcctgtctcaagtcagggccctcagctgccgatttcctacgttcggtattgtggaatttccagagtttccagatgatattcattattttccacctcccaataaaagaatctagattgacttctgaaataacatattctctgtaacctttatggtataaagcaaatcgtgagccttagaagttcaagccttgccttaggcaaattccttaacttccataggcctcagtttctccatcttggaaatggggataaacaaatgaccttacatggctgtttccatgaactgaccgcaggtccacagtgctggcacatagtgggtctgccacaccacgtggtctgtggccctcaggtagcccgggcctgcaatggtacccacagtggatgttgcacgcctggtccccacaactacaagctccgggcctgacagacactcaaatgcaggcgggttggctaggacagggagggccgaagagccctgcaccgcagccacctgcgccgcggccctggcagggggcgtgctcctaggcgcccgtggcggggccgaccccgggctgcgggaggcagaggggtcggaggggacagcgggccgggccggcgagcgggcgagcaaggagttaagccgggcggcagggcgagcgcctgtcagacgcgagcatgtgcagtttgcagcgcatccgtactatgggtgagtgccgccgccgccgccgccgccgccgccgccgggggctcctttcctcccgggcagcggcggctgcagccccccggaccccgcgccgccgcggcggacgccgacacacaatgcgggactaggcgcggcgcgggagtgccaggcggcgtgggggag

SEQ ID NO: 12564 - DNA, 2300 bp, Homo sapien
gggctgcaatgagctatgattgccactgcattctagcttaggcaacagagcaagatcttatctcttaaaagaaaacaacaacaacaacaaaagttgtaacttgcccaagtcacatagctaaaaagtggaagagacataactgaaactcaagcctcctaaattcctaatgtagggttcagtccacctctaccaccctcccacagactgccaaggggtcctgctcagagttgggcaatggtgagatgcactctatggccccaaactcattgaaagtaacaactgagctgaaaaaaatgtggagtctcttctgccctctacagaagtaaccagctataggggagagcatgctcctcccattccactctccatggtgcgtctcttttcactatataacaaagttatattaaatgagttctgggccgaggtgcggtggctcatccctgtaatcccagcactttgggaggccgaggcaggaggatttcttgagtccaggagtttgagaccccacctctactaaaaaaaaaaaaaaatttttttttttttttttgctgggtatagtagcatgtgcctatagtcccagctgttcatgaggctgagatgggaggattgcttgagcccaggagttcaagttacagtgagctatgattgtgccactgcaatccagcctggagaacagaacaagaagaacctatgtccaaaaaaaaaaaaaaaaaaaaagtgaatgaatgaattaatgtcttcttagcaaaatccagagaacgtgtttttgggcttccttatgcaacttctggaatgttgaagtggatagcctgagcattgtcccacaaaatggggctaatctatcccaatccccacgagctataaagctgtttgcaagttcagccattgaagtcccattggcccagttaaattctcacgtttggcctcctgcactaccagctttccttagtgtctgggctctcaaaacttctacgtgagaatggcctggggtactttagttagagattcagattcaaacccagggtgggggtgttcttcatggtgcctgggatgagtcttccaaggaccatttggagaaacaggcgctgatggtattttgcttctgttcagtccttcactgacagagagcctgcagggttgaggaagaaggctctgttttgaagtgtggatccctccctgcaatggtctctatttgcatcttctttactccaggctcacctagccaaatgttgagttttccaacccctctgggtatgagattgctttgggcgatctgagatctgcaaatgtctgagaacgaggagcacatgggcacgctgatgactgccctgcaaactgcctggcagccagggtcctcctgggccctcctttaaaataacatatacataagccggcctggaggcccaggcgggaagatcacttgagctccggagttcgagtccagcctgggcaacatagcgagaccagaaaataagcaagtaagttactctctgggctgtcgtaacttattttttctttttctcctgcaaattgcaactcagaacatttggtctgccagactgaaatatggacttctgttccaaatatccagacgttacagttcccacaggtggccaggagaatgctggaacctttggcggagacggtctggtcttgtcccgcagcccgcgagggtcccccgctatttggggtcaagcagatccccggggcgctctggccaccccttgcggcagctggtgcggcctcctcggagagctccgggccggcgcccgggacaccccgccgccctccctgccgccccagggacgagcccagcggtgcggagaagtgggaggctggagcctgctgaggtcatttcctgtgcctctccgcgagctgcctggagagctgagcccagcgctctgcctttaaggagcgggcggggagccgaggggaggagggcgcccggcggagcgttgaatggggcgcagcaaggctcggccgggctttgtgcagcgagcccgcgggcacccctcccgctccagcctcgccccgccccgcagcccacgacccctgctgccggggaggggagaaccggcggcagcccgggactccggcgagagcgacgcaaggtcggctgcggcggcggcccgagggcgcccgtgtgcccagtgcgcggcggggacggccgcgagctcgctggaggtgagcgacccgcgctcccgccgctgtggtgggctggggctgcgccgcggcggagggcgtcaggctgcgcgcgggggacggcccctcgggcccagaggacgatccggagcaggtgc

SEQ ID NO: 12565 - DNA, 2300 bp, Homo sapien
tctcacttacaagtgggagctggacaatgagaacacatggacacagggaggggaacatacttagtggggcctgtcagtggatggtggcggtgggggagtattagggaaaagagctaaagcatgctgggattaatacctaggtgatgggttgttaggtgcagtagaccaccatgacacacgtttacctacataaaaacctgcacatcttgcatacgtaccctggaacttaaaaaacaaacaaattattttttaaaaaaagaaacaatagagaattttttaaaaatgtgccctaagttccaaacaactggcttacaaaagagcccttgtcgtgtggccgcagtggcttcctcattaccaatatccccaacttctgggggttagatcttgagacccaagggtctctaaaacgggtaggattcagagcaacagtttactgacccatcttctcttgaacctcctttgccccaaaggtgaagggtggaggcaagagagggaactgttgggcactgattatattccaggtgttaaatgcttatgttaagtatttcattgattctcacagcagcctgaaaggtaagtattattacctccatttagagcagaggaaaatgagtctcagaaatgaagtaacttgcccaagatttgttagccagtcactgccccccacaggtctgcccacccccaaagccatgctttttcctgcacatgcctggagggggtgggatgggcatcatgccgggccctgagcttcctgagacctcttgtttcaggagagccggatctatgctgtggccacatcgggcatgcggctctcagatatgtctcccagaagtaatactgcatgctgcggtgagttccaagtgaggcttggaggcaccaaacacccaaggtgggcagggtgggcaagcggggaggagaagactccaagcaacacccagggccagggttggctggcctaccctgttcccctccccagcaggtgaagttcaggtgaaatcacagcaagtcccacctaggagggaaagggaagtcgtacaggttcagcccatcacaggaaagtagccagtcacagagctggaagggatctgagagggggcctccagcccagcctcccacctgcacaggcttcgcttctgcagtgccagggccgtgggtgggaggagccacaagtgtcctgatttacatgaaccccactcactggctcctctccagccagccaccaaatctccacaacgagggctgtggggtggtcccatagccgtatgatttgtaactcacatctgcaacagtggaacactgtgcaagcctcatggaggaaaaaatggttaaaggtaaggcttttggattcttttgtgagggatcctttaccacatggagatcatggtccccaaagggagtcaaggggagaagatgaacagggccctggcccccctcttgagatctgtcactggcctgctcctggagggaatgccatctgcccagttctctgcttcccccacaccccttcctgggttatgcccttgagtaatctcattcctctcttccctgctcagcttcaagccctcctgcccttgtttcccctgggtctttctctggcctggtctacaagaatgtcactgtgcctgtctacacagcactgaagggggtaagaaactgctgcacaaagagggggtgtctcatcaggaaaggcccctggcctcatcatccaatgactggggcggggctctagggccaggcttctgcacatggtgaccctgcccagggagctgagcccagcacgtgtcattttgttttattgtttattaggttattataaaaattccacatttacaaaaatgtgaatcagtatgaacgtggacaaggtaagaaggttaagcctatgcccgctttacagctctccccaccttttctcatgtctgcctcactcctcaggtcccagagggcagtggggctccttctagaattactgaggtatattccaacttatattcccgtaacgtcactacattttaaaaacaaaaatcagatagaattgcaatattttcatacacatttttgtctctgttactggtttttgaataatagtaatacttgataaaattttttatagaagaataaaaaaccaaaagtgaaatttcctctcacgtcgcttttccctaattcctaagcccagaggaagctatcatgaatggtttagtgtttattcagtaaggccttccgatgcatttataaatatgcagcacactctcactgtctcctgtgtgcacacaaaaggtgctcatatacatgtcattctatgc

SEQ ID NO: 12566 - DNA, 2300 bp, Homo sapien
cctccaaaagattgttggtaaaggagggacccaggtatgcccagttcatttacagtggataagctcacatccctcatgcactggccctttgcctgtgaacacagaaaccaacttgctttggccttttgtatttgcccttgctcctttccacctgctgtatccagacacctccaccagccctagtgagctcctctcaggaggttcactcagggttggaactcttctcccgcctcaggtggttggttttgacggctcttccacggttgatgagttcctccagcggctgaaccaggagataggcatgagaaagccatcccactctggctttgccctcttcacggacgatccctcgggcagggacctggagcactgcctgcagggaagtgtcaaggtgacagcctcccactaagccagctgagcccctccctgctcagggatattggtggtggggaaagagcccatctgatgggtgtctgactgtttggtagctcatttggtgctgagcccaaggtgctgccctagtcagcatttctgtgccatcctaaaatgtacctgggcagggagaaaaaagctgttgtgtgcccttgtctctggagacaagatcgctacacacctacttccctcgagtggctgtgcagcgtccagaagaaaagcctcttcttggcttggtgtagggacagtgaggccccacgaagccactgcctacacgtgcccactcagaggctcacagctgtgtgcttggaccccctggatgtcaggtggtacccagcacctcacttttaccctttctttcagggcctatgccatgcttataggttgaaccacacttttaaagaggcaggtccttatggtgctcctataagtaaaggccgttggatgggatttaagatcaatcttgtattgtggtctgggattactgtcctgggggataagtgtttgtaagaatgtgctctagcactttgatgcatatttggctccagtgtttgcttgtctttaacaggacaaaggcttctatggtcttttaacattgcctggaaaaactatgccacataccttctttgccaatgtctgggcatctgtgaggctttgttacatggtagccctctgggcatatttgttgaagaggagaatagcagtcagtggaatggaaatggagctggtgttcgaaggccatggggctgcctagcctctggggaggcccctcagctggtgacaccagcagggcagatttcttgctttattgctcaccctgtccagggttccctctgtttgtgagggagctgctgccaccttgggtccaggaagcatgaagctccgcaggtcagcctcctggtgggaggacttttccttagttttctttgctcttctgctctgagtccagccctggctggaccttgatcccttctctccttatcaggaaattttctgactttcttcttttgccttttcaagatctgtgatgccatctccaagtgggaacaagccatgaaggagctgcaccccggaaagtctgagggtgggacacgcgtcgtgaagctgatgtacaagaacaggtcctaagcactgcacgagggtggggccaaacacaagggctgccactgggtgccagctcatcgcctcctcgactagacagcctatccagacggggggagggacccacagatataacactgcctggcagtcactagctggggtgcaggcgggctctgctgctgatactctgtgaaaccctgggcagctcaggccttctgtcagccttccctatactgcgtgtgcgtgtgtgtatatgcacacacacacacacacacacacacaaacatctgccaagaaaacagaccagaccaccctgggcaacatggcaaaaccccacctctacaaaaaatgcaaaaattagctgggcatggtggcatgtacctgtagtcccagctactcaggggggctgaggtgggaggatcacttaaacctgggaggttgaggctgcagtgagctgagatcacgccactgcactccagcctgggcaacagagtgagaccctgcctcaaaaaaaagaaaagaatagaaaatagaccaacctcatgggatggctaagtgtgttactttatgagagtgaaattttgtataagcaccagctagttatagctaaagactaagtacttcctataccaattccaggaaatacagaagtagacatcctgactttctatcaatttgagtaagaaaatcccatccctccatctcagtatgtctccaggcaaatagtttccagtagtctcttggactcttacctcatccagtcccct

SEQ ID NO: 12567 - DNA, 2300 bp, Homo sapien
aagatcgctacacacctacttccctcgagtggctgtgcagcgtccagaagaaaagcctcttcttggcttggtgtagggacagtgaggccccacgaagccactgcctacacgtgcccactcagaggctcacagctgtgtgcttggaccccctggatgtcaggtggtacccagcacctcacttttaccctttctttcagggcctatgccatgcttataggttgaaccacacttttaaagaggcaggtccttatggtgctcctataagtaaaggccgttggatgggatttaagatcaatcttgtattgtggtctgggattactgtcctgggggataagtgtttgtaagaatgtgctctagcactttgatgcatatttggctccagtgtttgcttgtctttaacaggacaaaggcttctatggtcttttaacattgcctggaaaaactatgccacataccttctttgccaatgtctgggcatctgtgaggctttgttacatggtagccctctgggcatatttgttgaagaggagaatagcagtcagtggaatggaaatggagctggtgttcgaaggccatggggctgcctagcctctggggaggcccctcagctggtgacaccagcagggcagatttcttgctttattgctcaccctgtccagggttccctctgtttgtgagggagctgctgccaccttgggtccaggaagcatgaagctccgcaggtcagcctcctggtgggaggacttttccttagttttctttgctcttctgctctgagtccagccctggctggaccttgatcccttctctccttatcaggaaattttctgactttcttcttttgccttttcaagatctgtgatgccatctccaagtgggaacaagccatgaaggagctgcaccccggaaagtctgagggtgggacacgcgtcgtgaagctgatgtacaagaacaggtcctaagcactgcacgagggtggggccaaacacaagggctgccactgggtgccagctcatcgcctcctcgactagacagcctatccagacggggggagggacccacagatataacactgcctggcagtcactagctggggtgcaggcgggctctgctgctgatactctgtgaaaccctgggcagctcaggccttctgtcagccttccctatactgcgtgtgcgtgtgtgtatatgcacacacacacacacacacacacacaaacatctgccaagaaaacagaccagaccaccctgggcaacatggcaaaaccccacctctacaaaaaatgcaaaaattagctgggcatggtggcatgtacctgtagtcccagctactcaggggggctgaggtgggaggatcacttaaacctgggaggttgaggctgcagtgagctgagatcacgccactgcactccagcctgggcaacagagtgagaccctgcctcaaaaaaaagaaaagaatagaaaatagaccaacctcatgggatggctaagtgtgttactttatgagagtgaaattttgtataagcaccagctagttatagctaaagactaagtacttcctataccaattccaggaaatacagaagtagacatcctgactttctatcaatttgagtaagaaaatcccatccctccatctcagtatgtctccaggcaaatagtttccagtagtctcttggactcttacctcatccagtcccctaatctataactccaggtaccagatttcccttactaaatccagtaagcttaatggtatcttcagaatgaaccatgccctcctgttggtatgagatcagcatgaccctgcatctgctctgtgtcatactcggttatatgtttctggaggcaatacaaaataggctcataaatagtgggaaaagagtactttatctttttggaaataaaggtaacagacccagagaaagccccatccctgtttggaatccctgctgagtcctggtttcttattctcttctttgtaggctgtactttcgcagtcaagtcaaaggggagacggaccgagaacggctgctccttgcctctcaaaccagtagagagatagtggcagggaggtttcctatcaacaaggaattggctcttgagatggctgccctgatggcccaggtaaggttctgttcaggaagcaggagggtcgggttgccagcttagaatgaatgcaccatgcagcctgaaacacaggagagattctgcagatcctgtggtgctcaggagagggcagctttgccatctctgggatggaaagcagctgacttctacagatcagagctcctcactca

SEQ ID NO: 12568 - DNA, 2300 bp, Homo sapien
ggagggacccagtgggaggtgattggatcatggggacggatttcccccatgctggtctcgtgatgctgagtgagttctctcacgagatctgacggtttaaaaatgtggcacttccccactcccctcctgctgccatgtaagacatgcctggcttcccctttgccttccaccattattgtaagtttcctgaggccttgccagccatgtggaactgtgagtcaataaacctcttttctttataaattaccgagtctcaggtagttctttatagcagtgtgaaaacggactaataaaaggagtgtattaattgtcagattcggggcacagaaataaaactagaaaaataaagaagtgcttgaagaaatcctttaggaaaaaagaaagggaaataaaattctgaatgaagatgaagaaacggaacctttcatcagagagacttaaagctggtgagacctttatgccatggatctttttttttttttaaatgaatatagacacagtcttgctctgttgcccaggctggtcttgaactcctaagttcaagtgattctcctgcctcagccacccgaacagctgggattacaggcatgctccaccatgcccaggtaatttttttgtatttttagtagagatggtttcaccatgttggccaggctgatcttgaactcctgacccaagtgatctgccctcctcagcctcccaaagtgctgagattacaggcatgtgccaccatgcccagcccatcacaagtgttttgacagtccacatagccactcctgggccacatcagaagtaaaaatggaactcataggccactattactcatgagtttagtaattttattatccatttcttctgcatctcccgctcctgcttaattcccagccaggtcttgcctgtctaccacggtccaagcagtcatttgggagacagaactcccaggcagtgaaatccaaactccttaccagaccctacaagaccctcttggatctgacccctacctgcctccccagcttccaactgttttccccacacaccaacctttctcgccttttgattatttcattaagccaagcttgttccaacttcgaggggtttgcctttcctggtctttctttctggcaaattcctcctccagagctccttcagtcctgtctggctcgtcacccttgtaactcagtgtcctcttacttagagacttcgcctgactgccctatgtaaagtcctcagtccatccctgccagtcagcatagtattgccaacgatactctcttatttccatattgtctcctactagaaaggaagctgcccgagggcagagactgtcatcaacatcgttcactgctgcatcctcaagcacctcaaactacccggcacaggaaaagagtaagtgaaatgaatacccgtgggctctccttgcggctcactctggcttagagaaatcggcttgccaagcaaaagcatgattaaaactgtgggtttgggctgggtgcggtggctcacgcctgtaatcccagcacttcgggaggccgaggcgggcgaatcacctgaggtcaggagtttgagaccaacctggccaacatggtgaaacctgtctctactaaaaatacaaaaatcagcagggcgtggtggcgcgcgcctgtaatcccagctactcaggaggcttaggcaggagaatcgcttgaacccgggggaagcaggttgcagtgagccgacgtcgcgccattccgtctcaaaacaaaaacaaactgtgggtttgttttgagacagggtcttgctctctcgcacaggctagagagcaggggcatgatctccgctcactgcaacctcgacctcccaggctcaagcgatcctcccgccttggcctcccagtgctggactacaggcctgagtcaacgcgcccggtctaaaaacgattttaatctttccacttaactattgccccgacgaggttttttcgaagacagtcaaggccggcccggaagaacgcacaaccatcagcccccagcagagctctcggcgcgcaactgaggctgcgcaggcttagggcggggcgtggtgacgcggctgccggaagcgggtctggagcgggcgagacggccagggccggcgagcgcagtgcagcgccgcgcggtgcgggcggccgagtgggggcgtcatggaggatgagcggagcttttcggatatctgcggcggccgcctggcgctgcagcgccgctactactccccgtcctgccgggaattctgcctcagctgccctcggctctcgctgcgttcgctcaccgctgtcacctgcacgg

SEQ ID NO: 12569 - DNA, 2300 bp, Homo sapien
ccaggctggagtgtaatggcacaatcttggctcaccgcaatctccgcctcccaggttcaagcaattctcctgcctcagactcctgagtagttgggattacaggtgcccgccaccatgcccagctttttgtatttttaggagagacaggagtttctccatgttggtcaggctggtctcaaactcctgacctcaggtgatccacctgcctcggcctcccaaaatgctggttttacaggtgtgagccaccgcgcccagcggaagcaagaggtttttgcagtagcacaggaagccctgaggcaacctgtgccagtatcaacttcagaaaacatttagtaaagggggaaaaaaattgaatgtagtgatgggcaagaaatacaaaagtatcaacataatttcaatgaactgaacaagtatgacagtatctgtgactgtgaatccctgaccacgcccccacccattcctggagggcttgttaaaacataggttaccggtgccctacccctagagttactgattctgtaaattcgcgagtggggcccaagaatttgcacttctaacaagtatctggtgacccatagcaggtgctcaagaagcaagaagtttcttgctgctttttatttttatttttttgagatagggtctcactctgtcactcaggctgagatgcagtggtgtgatcatggctcactgaagcctcgacttcctgggctcaagagattctcccactttagcctcccaagtagctggggccataggcacatgccaccacatccagctatttttttttttttaaatttctggtagagtcagcgtctcactatgctgcccaggctggtctcaaactcctgggctcaggagatcctcctgccttggcctcccaaagtgttggaattacaggtgtgagtcaccatgtgcagccagtttcttcttgatgctgtatccaggtgatgctgatgctgctggtctgggaccacactttcagaaccactgccttacagtggttattttgctaaggcctcaaagacatcattgttaaaccagcagggggagacaatatacaacagagcctctaaaaataaaatgtcttagggtactaaaactcctttggagttatggtgttgccatggagacctctgaactgttttggagagcagtgtgtaaattgacatgaggtgaaataaatttcaggagtttatgtaaaaaattaatttggtagaaataatgtctagattcttgcatgccatggtgtcttggttaagaacttggaatgtggagtcagctctgccacttacaagctatgtggctctgggaaaattacttatgtctttgatcttttcttcgctttaaaaagtaacctgtggtatagaattggaggggtaaagttcttggaatgctgagattattaaattattattcgttattaaaactctagttacttagcacttacagctctttagcttagaaatagtctaaatacgttgctatatttgcttttttaataaccagcgctcccgttattcaggtaaagaattaaaaacatctaaaaggtaattgctttgtaaatcctaacctctttcattcaaaatacctaaggtagatggctctttataaacgtgcccggctcagagagctctcatctatattatatctccgaatccaaatttcactgatgcccagtctaagagtgtttcctgggctttgagctttgagatagaacgaagcaggtggatcctggctttgactaggcagggccagaccaggcccgacccagccagcccatccgtagagtcagcatcagccgggcgtgaagattggtgtcggctcctgcgttccgccaagttcaggaacctggcatgggccggccgcctcccgcgaagggacacacctgttggtcaccgcgctcttactggccagacccggatattggccttctggcgtcagcggcaggggcatgtccctggccggagagcacaggccagagtggggtgacgtcatcgaaggcacgtcccagccttgcagagcggtgggcggggcctgcgaagaaggtgtgccgggggctggttggaggcgcgggcggcggggccaatgtggcggtgacgtcacggggcgggcggacgctggcgcgggtaggtaagagcagcggcgggcggtggcgctcactcccggcttccaaccgcgcggagcctctgccttggagattctcagtgctgcggatcatgtccctaaggggcagcctctcgcgtctcctccagacgcgagtgcattccatcctgaagaaatccgtccactccgtggctgtg

SEQ ID NO: 12570 - DNA, 2300 bp, Homo sapien
cgatctcctgacctcatgatctgcccgcctcggcctcccaaagtacagggattacaaggcatgagccaccgtgcctggcctaaaatctgtttttaagagctggccattaagataggttactggtcagtgcggtggctcacgcttgcaatcccaacactttgagatgccaaggtgggaggatcacttgaggccagaagttcaagaccagcctgggcgacatagggagaccccccatctctaccaaacaaaaaaaaattaccgaggtttggtggtgcatgcctctggacccagctactcaggaggctgaggtgggagatcacttcagcctgggaggtcaagcatgtggttagccacagttgcaccactgcactccagtctgggtgacagagtgagacctgcctcaaaaaaaaaaaaaaaaaaaaaaggttactgttctttgttaaacctactgtcacagaaaatgtagtttagaggtaattctaaccatgtccctttctgtcttaagagacaacataggagctggagttggtacctcaggcaagacatgcatgagtctcagttggtacccaaagtttgtcagaagttggttccgtttactgaacagtttaacaactgcttctcttcacctgtggcttttctttaaaaaaaaaaaactttttttttttttttttttttgctctagccctatagaagcaagagtcctttgactccatctcatcatactctagcttcagcaaactcattaagattggggccaaaattctggtcgctgctagtactccgcagaaatagttggccctgtatttgctacccgagagcagatggagaaaaaattctcttttggccagcgaacttccttcttgcttgttgaagatcagtgtttcaatttcccacttatcccaatgaagttctgagaaggaagcacatctgcatccttttctctgttttgcatctgttttaagaaagaccaggccactagactgtgggaactatcttcttcctaatgggagtactgggagcttttcttaatacctgtgtacagctgggcatatccatgatacctgtttgtagccattctcctgtttcagttaataccttggtagcatttttaaaatcttctagctgctactgatttgtttgatgctcagatacttgttttctccaaactcagcaaaagtaataatcctatgctgcccattccaggcagatgaaaataatttagggcctcttgtggatgtgtccaggtgttacattttacttaccccagaaaaatggaagtctgattcccctaaagcagactgctctgggtaggcccctgttctctctgacatggagacaaacttaattgattttcagaaagaggagcaggagaagggaagaaccctgatgccagacccctatcatttttaatacagtagacttcaaagcacttcttgatggcaatgttcaatcataccaggctaaaaacttggtatattgaagagagctgagagaatttgaagattttgaatcctgactccttttctgtttaattttttatatatatatagagatgaggtcttgctatgttgcccaggctgtgctcaagtgatcctcctgcctcggcttcccaaagtgccaggattacaggtttgagccactgtgcctggcccggactcctttttgtgcgatcttcagaggtttctttaagtcttatatatgaaatggagcatttcctaccttattgatttgttgtgaggattaaatggagaatgtatataaaagtgtttagtaagctataaagtacttctgtttttccattcattcattcagttcatatactcgaatgcctgctctgtgcttgctgggcactatgcaaggcattcagaatgaggggaacatgccagacatggtccctgcctcatggagcatatggttatttacttggtgtagtccaaataaataagtagtttgattagtccaaactaggcatatttccaaatgagtgagggaagaaccaggctatctgctcactactttctgccttcccagctggcagagatggaggaggagctacgttatgcacccctgtctttccgaaaccccatgatgtctaagcttcgaaactaccggaaggaccttgctaaactccatcgggaggtgagaagcacacctttgacagccacacctggaggccgaggagacatgaaatatggcatatatgctgtagagaatgagcatatggtaagttttagctgttttgtttgttttttttttcctttaagggcctgtggtacaaaaattaactatattgttggggt

SEQ ID NO: 12571 - DNA, 2300 bp, Homo sapien
agaataaatgaattaatgttttacttaatttatattgaactgtcaatgacaaataaaaattctttttgattattttttgttttcatttaccagaataaaaactaagaattaaaagtttgattacagtcaaaagaagaaaacactgttcattattatggttgtgcaatgatttctcattctaaagaataatttgttccagagtctagctacagtgtaatctcaatccacatgctattaatttaggttgtgtgataatctaattgttcattcaccatttcctacttaaccttttttgacactcttcacagacactttttccacatttcttgatcatcccgggccatttttttttcctttctttttaattagagacagcgtcttgctttgttgcccaggctggcctcaaactctgggctcaagcgatcctcccaccttggcctcccaaagtgctggggtacaggtgtgagccgcagcacccggccccaggctattgatcctttttttgcacctgccccttatttctgtactgtgacaagtcccagcattgtgctgtgggacttacacagtatactgactatcctcagacttggtcatgtctatgctcagtgcatattaagagcttaaccaaagtgtgttgaatcaacagccaatgaacttgatctaataaaaatgagggcccaggagatacaaattagcaaagcattttctcctgagcagtcatacatcttttaatatttgtaggcagtttaaaattgaactcccaagcaaacatttgagaacagacaccttgagcaaaccgtgaaatcggtgaaaataataatttattttaattttttgagatagggtcttctctgtcacccaggctggagtgtggtggcacgatctcagctcactgcaaccactgcctcccgggttcaggcgattctcctgcctcagcctcccgagtagctggggttacaggcgcccaccaccacgcttggctaatttttgtgtttttagcagagacgggggtttcaccatgttggccaggctggtcttgaactcttgacctgaagtgatccgcccgcctcggcctcccaaagtgctgggatgacgcgtgagccaccatgcccgacgtgaagacaggaatttatacccatggagtgcaagaagggaccttgtaatttttaacacgtgacacttagtggcagatgagacctaatgaagccaggcccaccttccacaccagattataaattcccctggagcagagattaaatgttttattcaccaacatgcccagatccctcgcaatgcctacgcttgacaaacacctgttgtcaacaagtgcacgaggcagcctaggaggagaattagtctccacgaggagaattactcgggcctagcagctagagtatttcgaggtcatcctaactgggttccacttttgaatttttggtttttgggttttttgtttttttggagacaagatctcgctccacttgggagcaaggtctcccaaagctggagtgcagtggtgggacctcagcctccgggggtagctggggccaaaagtgcgcgccaccatgcccggttcttattttgggtttctggtagagctctcgctattgtgcccaggctggtctcgaactactgggttcaagcaatcctcccacctcggcctcccaaagtactgggattacaggcgcgagccactcgcccggccgggttccacttctgaaagcttggggagccgctgggccttccaagaaaagtgctccacctcccgacggcaggcagagcccctggcccggctatctttccagggccgaaagctaacagtcaagacgcgaaacgaggaattcgggtcagggtggcaaagcaaagcgcgatgacagtgaggacgacgtctagacgcaaacatacatcaaatcgggccgaagcccgctgtcgccgcgcgggctgaacctggcacccggagcaacgcgcgaccccgggacgagacgctctcgtccgagccaaactacatcccccggcgtgcactgcagcgcccgcccctcgccggccggcggggcccgggaggaaggcggccgcgctgccagtcccgcaggtcccctaggcccctttcgctgcggcctttccccaacccggacccggcacttctcgggttccgcgactgccgatcgccccggcgcggcaccgctccctcaggagtcgcctaggccgcgcagtctcccgacttctcgtcaggctttcgcgccggcgctccagcaatcactggctggagaaggtgggcgttccggctcgagaggaccctgccg

SEQ ID NO: 12572 - DNA, 2300 bp, Homo sapien
cagtatataaactctgagtgtggagcttacatgtacagaaatctgccacccaagcccacatttctgtctgtaaattcccacagtaaaacacccttaccaagaaactggatttgtctgcctcaacctttggtgtcttggctcctctggcatttgggggccactttgcatatagggccctctcatggaacaccacctgcttcagtttgaatcccagctctgcctctttgacctaggctagcttacacggtgcctcagttttcttgtctgtaaaatagggaaaattatagtacctacctcttagagttgttatgggaattaagagttaatatatatatataaatcattgggacagggcctggccataattaagcagtatttaagcactggctattattgccatttctggcactctcccttctccctagacggttttctgttgctctagtgcaccctgctttctctgactgtgaaccctcaggtggggtctttcctctgctcagcacactcttgtctatgttgcttgcctactaacttccctctggcctccgctcaaatgttatttcctcaaataagcctctcctgatctagaactcctctcccttgtaaaagctcccagagctttctctaatcctcctcataaccttcaccatgatttatttacagtgattacttatttaaggtcttctctgacagtccatgaactccgggcgagcagagattatgtgttcctggcttcctgctggacatcagcacagtgcctagtacactataggaatgccataaatgtttgtcaaatgcgtgaatgactgaataaggaacaaaacaaatgaaaggcttttataaagttataaaacccaatacaaatattaggtaacacaataatgagaatgtgacaaaatgtgatgattgctaggtaatctaatgttaaattggtaggaattagtattgtgtgaaggaaaccctctcttctccaatttgctataaaatatattagttcattggaacccgtgtcttttaaccaaatggaaattatgcaaaaggaccagaaaatattactgggtacaattaaggaatcacagacagatattgattggttaaaacaccctccactttcacccccaggaaataggcctcagatgaaagaaactattgaacagggaacctatttattcacagagaacatattcatggccttaattcaagacaggattaaatactttcacgagttggcaaaaccaactgtgccaatctgagatattcattgctaccctgggagttaatgtatgtgacccaagccatcaggaagacgatattctattatcaatgaacactcaaacactagaaaaatcatgatagttgccaccataattcaagatagacacaataaagtgattctcctgagaatgtcttcaaggacttattgcttcctcttctctggaaaaaggaatcctcgaggaggaagggtttacattcccccaccttcccaactgtcagacttcggaccgctcctctcctgtctaatccgcctttcatttcccagacgccaacatctgatctccaggagaaacagtgcggtaactgcctaaccaggattggggaaaactgaaccaggcactggacttgggtctggggagatagaggactgcagagatttcacaaacaccgcggtgcctagtacactataggaataagtgtactattcctatagtgtatacttttttttttccagaaaaatccctctggggtatgagcactattttcagttctggttcaacttttcattgagattctatgtggataagaggatcttgtagtgaaaaaaagataaaaagcagtgttttcatctgagtgtgagaaaccatgtgtgcctagaggtgggagaactgagtattcagaaggcagaaaaaataactgagagctgggtgaatgatcccacaggccctaagccctagatggttggggattagcgatgtataattcaacttctgccagcgttggcggcagcgctcccacgtagccagcctgaggctgtcaagctctggactacatttcccagaaggtctgctccccgggctgtcgcaatttgaattggggcgtgtctagaaagagaagccatagtcggcgagcaacgctggagcatcccgctctggtgccgctgcagccggcagagatggttgagctcatgttcccgctgttgctcctccttctgcccttccttctgtatatggctgcgccccaaatcaggtctgtgcaaatgtattgccttctcttgagaattcttgttgcggggcgggagggaa

SEQ ID NO: 12573 - DNA, 2300 bp, Homo sapien
ttttttaagttttagttttcagtttcctgtcttactagaaaggtcttaccactctaaaaatgtgtccagtggttcttcttaatacttcagtggtttcatttctcatacttacgtctttgaggtattcgaattttggaaggatcaagtttgctttttcccagctggatacctaggtgccacaatactttgttaattaaatcatctgtcccttccactgatttgaaatggcattttcatcatatctaaatgcccatgtgtatttgggtctatttcttgcctttccattctgttctattgatttgtctgcctattcacctacctgtacttagtagtatggtttagcattttggtacaacttatcaatgatatgatggtggcctttggattataatatttaacattttattttagcaaagtgtttgtgtattttcataattctagatgccttatggtccttctaatatcttctctccagaggactgtatgctgttcttaaggactctctgcttcctggacaagctcaagctaaggtgagtaccatcttcttaaatgcaaggatcttagatttgagtcaagaagtgtctgctgggaatgatctgatcactccttgttctgttggtcaggtccatgggtttccccaggggcagaaactgtgtcttcctagtatgttgcacaattcctggtgcagagaaacactcagtaaatgtgtgttgaggatgaactgatgaatgaggacatgaacacctgcctgccacagaagtctttcatgcatgggtgttcctggaggctcctctggcttcacaggaagggacagaactgggaaattattcctggggtcctgtcccagctccttgtctattcttctgtccaagagaggaacacagagcgaggaagggcaatgaatcccacttacccttctcccatctcacacacatccagaggcacgatcctagctcacttcaaccttgacctctgagctcaagtgatcctccctactcagcctcccgagtagctaggattacaggcacgcaccaccacacccagataattttttgtagagacagggtctcactaagttgcctaagctcagtcttgaacttctggcctcaagggatccccctaccttgggctctttaccagcattttcttgtatttctcctcatcttcaatagcattcaactgaaacatcacccacgttcatcatctctcccttttctacaccatggccttgagtaaagcaagtgagatagcaagggagatacgaatcagaacagctaaccataacagctgactcttatatactgtttagcatatgccagtttcgttttccaccaatgtaataattgaacacttagaacaagtggggatatatatatatatatatatatatatgtataacacatatatatataaaaccatatattatatatataatcatacccattgtacaagtgagaaaactgagttaacagagaggtttagtaacttgcccagggccgtggagcttttaaatagattcagcgctagagtccatgcacttaaacaccatacctttccttgtaatatgcatgtgcgtgtgttaacttcattgaagtaaaatataaaatgcagaaaagtgcacaagtcgaaagcatacgactcagcagattttcataaagtgagcacacccatgtactagcacccagatgaaagagcagagcactctcagccctccaggagttccagtcatctccctccccagtcactgccccctcctccctaaggttaactgctcttctgacgtctctctccattcttctgggagtttccttcccatcctattttaatccactcatattttaagcatcatggggtttgtggctaaagttagaaatattctatatattccatcttgcagtagaggtggcagtggttgggagaacacatttcctagagaagagaaacaattgaggatggggggtttagggggtacttgctttagtttccccacattctctttgccagtaaacctaagtaagcttcaaaccttgactccatcccctccccaccaggactacatctcccagcaggctgtgctctgacagctcttggatttaaataggattctgggctctgctcagagtcaggctgctgctcagcacccaggacggagaggagcagagaagcagcagaagcagccaagagctggagccagaccaggaacctgagccagagctggggttgaagctggagcagcagcaaaagcaacagcagctacagaagttggaacgatgctggtcaccttgggactgctcacctcc

SEQ ID NO: 12574 - DNA, 2300 bp, Homo sapien
tttgtttactattcatttctcttccagcctataaactctgagggcagggctcatctctcttgacctctgttattgtacctggcacataggtgctcaataaatgcttatcgattcaatgactggaccctatctggttccacagtgcaccataatattgtgagtctgtgcaggacacgagatcaccatttttttggtcttgtcataactgctcacaaggtacttgaggtctcttttcccactatatcatttgttttccctttttcattgccatattattcgacttctcagtctcctggcctcagtcacctggggcccctcatgaggctggactgtgcatattctgtcaccacaggcacatgaacacacttcagctgcagatggaagtgaccaggttcttgcatcggtgcgaaagtgctgggacctctcaaatcaccactttgcctctgccaaccctgtttggaaataaccacatgaaaatggatgttgcctgcaaggtacatgcagcgtttcagacctctggcagactattgtcatcttttagaacacttatcataattgcagttgtctagtgattatttcagttgtttgtttgatggctgcctccccactagaatatgagccaccaaagactggtgatcaggtccattttgatcattcttatatccctagtgcctggcacttagcagggtctcaacaaatatttgttgaataattgaataaatagaggccttcattcttggtcaagagtattctctagtaattgccatgtttttaagcatgattccctttccttttcaggtcatgctgggagggaaaaatgtagaagatggttttggaattgctttccgtgttctgcaggtatgacttggatcattcaaatcatactgaggacaatcagcacctgaccacagttccgggagagattattctttaggaaattcttatcccaagaaaagtggatttacatgcacattagggatgaaatcaaggatgtgactgttacagaactgggtcaaattcaagactctaggccactttgccagaagccaagtaacccatgacaaattcatcaaaagctaccaaataaataccaggagccaggtctcagacagttccccacagctgtttccctgagaaacactgctggttctcacagggaatatggctggaggggtggccaggggctttccactggccacaagggctgttccccatccttggtctgtacaggagctggctggaggaatatgtttcctattgcttgtgataaaaggacacaggtggggctgtggcactggagcaggggctggagcagggcactgagaccatgaggggcagagtctcttcagacctgcccaccaccacacagctccatgcagataccccaggagctgagagcaggcagcttagggcaggcagggtatttatgcattgtgagtgtgtcagtgatcaatggcttcatacatgattagtcaggtgtttttcttcccatctgtttttggtgttggacagagctcaccacacacagataccctggtaggcaggcagaggggcagctccacccaggccctgtggcataagggttctcctagaccaggtttaaggtgtttatctggcagttttcagcaaatgagtctttcagtgaatgggtctgtttctgaacactaagtcacctgcgtcttaacagagcaccaggtgtccagggcagcaaataccatcccccaatgcccatttctcaagaaagtgaactagtcttaggattttgataagaatattttcagtgagtgccaccgcagcaagtgaaatgtaccattttagatactacagctgcagtttttgtggatgcttcctaaaggtctacctaactccaaagaggaattgacgcttgctttttgtttggtatatttatgttttctactgtgaccacaatcaatatggcttatctacaccaagcatagtgagagcttttaaatgctgcctccctccccaccgttaacgtttcctgctcctaagcccatcatgttgtgttctgttctaggacttccagctggatgctgccatgacctactgcagagctgcccgccagttggtggagaaagagaagtacagtgagatccagcaactgctcaaatgtgtcagtgagtcaggcatggcagccaaaagtgacggggacaccatcctcctcaactgcctggaagcgttcaagagaattccgccccaggtacactccctcccgtacctcttggctcctccatcaatttcagtgtcttcacatccccatctttattgttctgttttcc

SEQ ID NO: 12575 - DNA, 2300 bp, Homo sapien
cagagggtatagccttctacccacctaggttatgatctattgttcctaggctacaaacctgtacaacgtgttactgtactgaatactgtaggcaattgtaacactatggtatttgtgtatctaaatatagaaaaagtatagtaaaaatatgatattatgatcctatgtggccaccattgtatatgcagttcattgctaactgaaatgtcattatgtggcacatgactgtatatccattttacagatgagtaaactaaggcagagaaaggttaactaacttgccccaggtcatagagctactaagtaatagagccataattcagtgtgactccagagctttcactcatgacatctatgctatgcaactctcaattctcatgatcactttcacattgaaaatggagtaggcctgtaatcccagcactttgggaggccgaggtggacggatcacctgatgtcaggagttcaagaccagcctggccaacgtggtgaagccctgtctctattaaaaaaatacaaaaactagctgggcaaggtgccaggcacctgtaatcccagatactggagaggctgagacagaagaatcgtttgaacccaggaggcggtggttgcagtgagccgagatcggaccactgcactccagcctgggtgacagaacgagactctgtttcaaaacaaacagaaaaaagaaaatggaataggaaacctttaagcggctactcttagtaagacactagggagcctcatggccttgcccttttcctccttgtagctacatcagcaaggtagatgtgctgaatattttagttgctgctgcctatcgccacgtgccatctttggatcagatcttgcagccagctgcagtaaccaggctaaggaaccagcttttggaagccgagtactaccaactgggcgttgaggtgagacaaagacaaagacaaagcttacttccaccccactgtagcaagttgcttttgcttagccttgcaaacaggtgttgccgtctctcagttgtcctgcccatggggtagaatcggggacatgactagtttgccagcagagaagtaatggcagatagtgggaatgaggtggttggcaacttgggaatagaataggtctttgggacatttaggcctgaatgtagctaccactcactaaaaggggcaatttttctcccaggtctccacaaagactgggcttgataccaccggggcgtggcatgcttggggcatggcctgcctcaaagccgggaacctcactgctgcacgggagaagttcagtcgctgtctgaagcccccatttgacctcaatcagctgaatcatggctcaaggctggtgcaggatgtggttgagtacctagagtccacagtgaggccctttgtatccttggtaagagcaaggcaggaagagtgcctggctcagggagggagacccaggaatagcaatgacctgggaaaagaatcagtggaaattcagctaacagtgtcagtcctggctcagcatcaagcaggttaaaaattttttttttccatcacatatagttagataagtaaccatatatggttagataagtaatagatgtaattttttttaaaaaaaggagacaatttttaaaaagataaaaatgacatatgacatataatcccatacacagactgattagtgttaaaattctggtgaattttctatgttatgttgtttaatgaaactggggttgtcccatatcataatatgtagaattgtgtatcctgcctgttctgcctttgacactgaaaaattatgaacatttttccacattgttaaatattctttctttatttgtttttttatttttttatcatactttaagttctagggtacatgtgcacaacgtgcaggtttgttacatatgtatacatgtgccatgttggtgtgcacattgttaaatattctttgcaagcaatattttcagtgcctgctgagaactttttgagtttcatttttctctctcgctccctgtgctgtcagcaagatgacgattactttgccaccctgagggaactggaagctacccttcggacgcagagcctttctctggcagtgattcctgaagggaaaatcatgaacaacacctactaccaggaatgcctcttctacctgcacaactatagcaccaacctggccatcatcagcttctacgtgaggcacagctgcctgcgggaagctcttctgcaccttctcaacaaggtgggacatggacacagctcaaaaaggcagtgcctgccttactcctctggcttggaccactcagccttaagcgg

SEQ ID NO: 12576 - DNA, 2300 bp, Homo sapien
ggctcttgtctgtaattccagctactcaagaggctgagggaagaggatcccgaggccaggagttcgagaccagcctgggcaatgtagtgagaccctgtctctaaaaacataaaaataaactcaccacctactacaaatgttttcatttcccaaatatgcaaaaatattatgagtgccgatgctcttatacactatactttcctctcccccatccctacattgttaagaatcactgatgtacagaatccctttctaggtaattggtggataagtcaggatccacagaggtttttgctgcagttatgagacgagattcaggaaccttgagtgtaggcttgtctcagcagcactagacagtataatccagccctctgggctttctatccttataaggtttttacaagcatcaggtgagatcacagaaggcagccctactaggctataatgagggcccatccttaacccagggtgaggatgtcaagtctagaataagagtgaaggaccaggatgcttccacccagcagcatctccagggaatggtagcgatgtggcctgtgcactgaccaggaatacaggccattgatactgaatctgtgctctctcactcacgaagaagggttcaaaaggaccaaaaagcagatgggtcacttgtaagcccctaacatacagtgtaaaggccttgcctcaaatacccctgagcatccccactccaaacattaatatctaacatttattgagtgccagaaaagttccggacattatcctaagcccttttacttgggttatttcattttatctttaaaactccactgtcacagtcatgcattgcttaacgacagtaatatgttctgagaaatgcattgtcaggtgatttcgtcattgtgcaaacaccatagagtgcacttgcacaaacccagagggtatagccttctacccacctaggttatgatctattgttcctaggctacaaacctgtacaacgtgttactgtactgaatactgtaggcaattgtaacactatggtatttgtgtatctaaatatagaaaaagtatagtaaaaatatgatattatgatcctatgtggccaccattgtatatgcagttcattgctaactgaaatgtcattatgtggcacatgactgtatatccattttacagatgagtaaactaaggcagagaaaggttaactaacttgccccaggtcatagagctactaagtaatagagccataattcagtgtgactccagagctttcactcatgacatctatgctatgcaactctcaattctcatgatcactttcacattgaaaatggagtaggcctgtaatcccagcactttgggaggccgaggtggacggatcacctgatgtcaggagttcaagaccagcctggccaacgtggtgaagccctgtctctattaaaaaaatacaaaaactagctgggcaaggtgccaggcacctgtaatcccagatactggagaggctgagacagaagaatcgtttgaacccaggaggcggtggttgcagtgagccgagatcggaccactgcactccagcctgggtgacagaacgagactctgtttcaaaacaaacagaaaaaagaaaatggaataggaaacctttaagcggctactcttagtaagacactagggagcctcatggccttgcccttttcctccttgtagctacatcagcaaggtagatgtgctgaatattttagttgctgctgcctatcgccacgtgccatctttggatcagatcttgcagccagctgcagtaaccaggctaaggaaccagcttttggaagccgagtactaccaactgggcgttgaggtgagacaaagacaaagacaaagcttacttccaccccactgtagcaagttgcttttgcttagccttgcaaacaggtgttgccgtctctcagttgtcctgcccatggggtagaatcggggacatgactagtttgccagcagagaagtaatggcagatagtgggaatgaggtggttggcaacttgggaatagaataggtctttgggacatttaggcctgaatgtagctaccactcactaaaaggggcaatttttctcccaggtctccacaaagactgggcttgataccaccggggcgtggcatgcttggggcatggcctgcctcaaagccgggaacctcactgctgcacgggagaagttcagtcgctgtctgaagcccccatttgacctcaatcagctgaatcatggctcaaggctggtgcaggatgtggttgagtacctagagtccacagtgaggccctttgtatcc

SEQ ID NO: 12577 - DNA, 2300 bp, Homo sapien
catgagataataaaaaagaggcaggaggagtcaacaggtgtcagtggatcttgtttctggctcccatgtctttgacagtaagactggtgacccagcagtggttatatgcactgactcaggagacagagggcctgggttctaatcctggctctgcctcttaatgacagtgtgactatacactattttggtctcatgtgcctacttgtaaactaaggatgatatattcttaggctcatggagctgttaggattaaatatgataatatgtgtcaccatacttaacgcagtacctgcccagtatgccacatcagctcaacgctgatgaaaacgatggtgatgtaattgctctgtgtctgtttcctcctcatctataaaagaggtgtaatatttctattagaatgaaatgaagcagtactttaaagtcactttgatgcccatccactgtagactggataaagaaaagtggtacatatacaccatggaataccatgcagccataaaaaagaacaagatcatatcttttgcaggaacatggatggaaccagaggtcattatccaaagcaaactaacacaggaatggaaaaccaaataccacatgttctcaattttaagtgagagctaaatactgagaacacatggacagaaaaaggggaacaacagacacggagtgtacttgagacagaggagggtggaaggagggagaagttcagggaagaaaaactgctaggtaccatgcttactacccaggtgacaaaataatctgtacactaaacccctgagtcacgagtttacctatgtaacaaacctgcacatgtgcccctgaacctaaaataaaagttgatttaaaaaaaaaaaaagatattaggaaagcagagtcaggtattttccttatttaaacttacaaatcttcaaggaggacaattggttgtggcttgttgagacatatgacaagccaccaaaaggagttttgcatgacaagctgctctctagctttgaaaccaccatatagaaggtttacttacatatagggtagattatagaaagagtttctaatctttaaattctaataatgacaacagttggcctttattgactgcctactgtatatgttccaggcatgatactaagtgctttgcttaagttatctctcttaaattttacaataacctgatgagcttggtaatattattactatattacacacatcagaatatggatgtatagagaaggtatataatttggagaagactgatgagacattctgaattgactgatacaaattaagaatttgtgtgtaaaattaaattgtacctaagtgtttatgtttttaaagtcttttttttttttttttttgagacagagtctagctctgtcacccatgctagagtgcagtggtgtgatctctgctcactgcaacctctgcttcctggattcaagcaattcttctgcctcagcctcccaagtagctgggagtacaggctcccgccaccacacctggctaatttttgtatttttagtagagatggggtttcgccatgttggcaaggctggtttcaaacttctgacctcagatgatccgctcacctctgcctcccaaactgctgggattataggcgtgaaccaccgcgcccagcctaaaagtcttgcttcatgtttatcatgtgttacaaatggcacctgctaaaataaccttggggaaaacaaataaaggcattttgaaagggatactttttaatcattgtcatcaataccatgtagaaatgtgatctgcactggcttagaaagtgacttcttctccactactttttcttgtttttccacatgttgcctccatacacaagtagaacttgtcaggagctatcgcaaagctccatgacttcgcacctttgcccatcagctgacagatatttttaaacattcaatttttgagggcaaggactggtgtgtccttttccaatagagacccaagcagttggtgttcttagaaagtataagccactggtagttaataccatgtataaatggattgatggcaatctccccttctctcctccctctttcttctcctcctgatggcattcctcagtttaacaggcgtcatcattgtcgccgctgtggccggctagtgtgcagctcctgctccactaagaaaatggtggttgaaggctgcagagagaaccctgctcgtgtgtgtgatcagtgctatagttactgcaacaaagagtgagtgtcctacagcagggctgttgctattattgaccgctgcacccttccgcaggtccctacactcctaggagtctc

SEQ ID NO: 12578 - DNA, 2300 bp, Homo sapien
ggagtctagtcatttgttccccggagcttcccacatgctggattttgctgactgccttcctgtggcaatctgcgtcttcatccccagaatttccaggacacttgtagttaggtctagaagctggacttgattcaggcttaatattttttagtaagtatacttgatagcaggtggtgtacacatccatcaggaggcacacaatgttcagttgtctctcttttatgacacaaacagtcactgatgatcattaactggatctattctttcaataacggtttgtaaaatggtaaaattctatcattccctcttcatctataagctggtatattgattaccttttactctgacctctggctctgcctcccaggtatctccagtatacattcccctagtctaagggaaaggagtttcccaccaacccagccctcacaggaatttgtgcccccagcgacaccccctgccaggcaccagtgggtaccggatgagactgagagtatctgcatggtctgctgcagggagcacttcaccatggtaagcagcatcggtctccactgtcaccctcaggagaaggtaaaggagaattctagttcatgagcctgagtttacaatcaccgcctgtccccaggagaatatcggtattttcagaactgccaaatctaagactttgggttcatttttgacctgaccagaatgtattttctggattcagacaggtagtagacaccctcaaacagccataaattctaaaatctttgccattgtcatgagataataaaaaagaggcaggaggagtcaacaggtgtcagtggatcttgtttctggctcccatgtctttgacagtaagactggtgacccagcagtggttatatgcactgactcaggagacagagggcctgggttctaatcctggctctgcctcttaatgacagtgtgactatacactattttggtctcatgtgcctacttgtaaactaaggatgatatattcttaggctcatggagctgttaggattaaatatgataatatgtgtcaccatacttaacgcagtacctgcccagtatgccacatcagctcaacgctgatgaaaacgatggtgatgtaattgctctgtgtctgtttcctcctcatctataaaagaggtgtaatatttctattagaatgaaatgaagcagtactttaaagtcactttgatgcccatccactgtagactggataaagaaaagtggtacatatacaccatggaataccatgcagccataaaaaagaacaagatcatatcttttgcaggaacatggatggaaccagaggtcattatccaaagcaaactaacacaggaatggaaaaccaaataccacatgttctcaattttaagtgagagctaaatactgagaacacatggacagaaaaaggggaacaacagacacggagtgtacttgagacagaggagggtggaaggagggagaagttcagggaagaaaaactgctaggtaccatgcttactacccaggtgacaaaataatctgtacactaaacccctgagtcacgagtttacctatgtaacaaacctgcacatgtgcccctgaacctaaaataaaagttgatttaaaaaaaaaaaaagatattaggaaagcagagtcaggtattttccttatttaaacttacaaatcttcaaggaggacaattggttgtggcttgttgagacatatgacaagccaccaaaaggagttttgcatgacaagctgctctctagctttgaaaccaccatatagaaggtttacttacatatagggtagattatagaaagagtttctaatctttaaattctaataatgacaacagttggcctttattgactgcctactgtatatgttccaggcatgatactaagtgctttgcttaagttatctctcttaaattttacaataacctgatgagcttggtaatattattactatattacacacatcagaatatggatgtatagagaaggtatataatttggagaagactgatgagacattctgaattgactgatacaaattaagaatttgtgtgtaaaattaaattgtacctaagtgtttatgtttttaaagtcttttttttttttttttttgagacagagtctagctctgtcacccatgctagagtgcagtggtgtgatctctgctcactgcaacctctgcttcctggattcaagcaattcttctgcctcagcctcccaagtagctgggagtacaggctcccgccaccacacctggctaatttttgtatttttagtagagatggggtttcgccatgt

SEQ ID NO: 12579 - DNA, 2300 bp, Homo sapien
ggtctgagtggtgtcagctgatccatggagtgcagggtctacaaaatatctcaagcactgatcttagggcttgcaatagtgatgtcacccccgggagcaatttggggaggttcagactcttggagccagaggctgcatgacctctaaactgtaatttctaaacttgtagctaatttgttagtcctgcaaaggcagactggtccccaggcaagaagtgggtcttttcggaaagggctgttatcaattttgtttcagagtcaaaccatgaactgaattcctccccaaagttagttcagcctacgcccaggaatgaacaaggacagcttaacggttagaagcaagatagagtcggttaggtctgatttctttcactgtcataatttcctcagttataattttgcaaaggcggtttcacttcggaatgctgaggcaggcagatcacttgagctcaggatttcgaaaccagcctggccaacatggcgaaaccccgcctctactaaacatacaaaaattagccagacatggtggcaggcacctgtgatcccagctacttgggaggctgaggtgagaggagccagacattgcctcaaaaaaaaaaaaaaccttaatgggccagaaagccatgttacttttctcaggaatcgaggacaatccaccaatcacagaagagtttttggaagaaaacgttttgtttgttttaacttgctcttttcaccaccctttggtgattaaatagtttgggaaatgctgaatgaaattactaaacctgaaacacacatagtgaggaaagctgagagtctgtgattaaagcacaccagggaaaccaaacaaaaggcttggtgtaaggcagctgtggtgagcaaacctagtaagccgttacttcaagagttggtttcaggctgggaacggtggctcacgcccgtaatcccagaactttgggaggccgaggtgggcggattgcctgaggtcaggagttcgagaccagcctggccaacatggtgaacccctgtctctattaaaaatacaaaaattagccgggtgtggtggcgcgcgcctgtaaatcccagctactcagtgaggctgaggcagaagaatcgcttatcccagctacacagtgaggctgaggcaggagaatcgcttaaacccgggagacggaggttgcagcgagccgagatcgcgccattgcactccagcctgggagacagagcgagactctgtctcaaaacaaaagacttggtttcagattattgtgtttgcgaaaaagcctttgctcattctttgctctctgatctcttatgcatacttctgtcttataatttagcccaccgtctcctaatttttggcctgcatctcccttgagaagaaggacctccatttactcaacttagagaatagggcctaagcccggtgtagtggcgcgcgcctctagtcccagctactacaggaaggctgaggcttaaggattacttgatccaggaagttcgaggctgccatgagccgagatcacaccaccgcactccagcgacagagagactctgtctctaaaaaaataaaataaagcctagcacaccgttcaattaacagttgtagggtaaatgtgcaaataaatgaatggagtgaagcagaagaatatggaaattcagaccgcagagttccggaacaaaagagcccagtagatagaataataatggaggagaacccagttctcctagctccgggtatcccccgcgcctggcaaaacaccatcactggttggcgttcaataaatgttgacttcacatgttaaggagataagagagtggaagaaaaaaaaaaatccagggtcacagttcttcctgccacctgctcggccgaatgcagaactgaaagtattgagcgccggagctgtcacaattgagggagatggtccgcagccaggtagctgatttcctctttccgagctttctagctttccctactcccggagaggtggcgtcacgtgactcaaacaaatatggcacttaattttcatcttccctgccttgagccaataggagtggggctttcagtctttgtcaccacccccaccaccgctgttcggagtgggttctgtcacctgactcggctcaaacatggctgcgctgagagctctattgctttgggcgccgggagcaggtgagtgtaagacacccctgagagggaggggcccctctccacgacccccgcagagagcgtccctgcggcccacccccacactgctttccacttatgacacagattcgtctcctggtcgtcaatcctctgccttaacagagggctca

SEQ ID NO: 12580 - DNA, 2300 bp, Homo sapien
tgttggccaggctggtctcgaactcctgacctcaggcaatccgcccacctcggcctcccaaagttctgggattacgggcgtgagccaccgttcccagcctgaaaccaactcttgaagtaacggcttactaggtttgctcaccacagctgccttacaccaagccttttgtttggtttccctggtgtgctttaatcacagactctcagctttcctcactatgtgtgtttcaggtttagtaatttcattcagcatttcccaaactatttaatcaccaaagggtggtgaaaagagcaagttaaaacaaacaaaacgttttcttccaaaaactcttctgtgattggtggattgtcctcgattcctgagaaaagtaacatggctttctggcccattaaggttttttttttttttgaggcaatgtctggctcctctcacctcagcctcccaagtagctgggatcacaggtgcctgccaccatgtctggctaatttttgtatgtttagtagaggcggggtttcgccatgttggccaggctggtttcgaaatcctgagctcaagtgatctgcctgcctcagcattccgaagtgaaaccgcctttgcaaaattataactgaggaaattatgacagtgaaagaaatcagacctaaccgactctatcttgcttctaaccgttaagctgtccttgttcattcctgggcgtaggctgaactaactttggggaggaattcagttcatggtttgactctgaaacaaaattgataacagccctttccgaaaagacccacttcttgcctggggaccagtctgcctttgcaggactaacaaattagctacaagtttagaaattacagtttagaggtcatgcagcctctggctccaagagtctgaacctccccaaattgctcccgggggtgacatcactattgcaagccctaagatcagtgcttgagatattttgtagaccctgcactccatggatcagctgacaccactcagaccagtaatttggcgcaaccagttttgccatcacacccaggaacagaagacattaagaaaacctcacttcgaccccttatgattccatctccaacctgaccaatcagcactccccacttcctaagcccctaccagccaaattattggtaaaaactccgatccgcaaatgctcgggacaactgatttaagtaacaataaaacttcagtcttccgcacagctggctctgcgtgaattactctttctgcattgcaattcccctgtcctgataaatcggttctgtctaggcagctggtaaggtgaacccatcgggcagtttcaaaagtgctgggattacaggcatgagccaccgcgcccagcctattttttgtatttttttgtagaggcggaggggtgggggagggtgtctcactatgttgccaaggctagtctcgaactcccaggctcaagtgatcctcccgcctcggtctcccaaagtgctgaaattacgggcgtgagccactgcgtctggcccctttaagccattgtgaaaagtgatgatacacgaaaaaaaagatttccagggccgagagcggtggatcacgcctgtaatcccagcgctttgggaggccgaagcgggcggatcacgaggtcaggaaatcgagaccatcctggctaacacggtgaaaccccgtctctactaaaaatacaaaaaaattagccgggcgtggtggtgggagcctgtagtcccagctactagggaggttgaggcaggagaatggcgtgaacccaggaggcggagcttgcagtgagccgagatcgcgccactgcactccagcctgggcgacagagcgagaccccgtctcaaaaaaaaaaaaaaagaaagaaaaaagaaaaatttccaaacagggtgttcccttgtttcacattctctttggtgatggtcctgcaacagattttgataatcactatattgagaaactgcttcagattcgatctgttaggctgatcatagtattaactacaattcccagcaagccgcggagccaacctgggcctctgccggcctctgattggatacagtagccagaatgacgactcaatcagtgcttcggttgttgctttgcggcgttttccgcggggaaactgtgtaaagggtggggaaacttgaaagttggatgctgcagacccggtactggaaagtttcatgtggggtgccgttgtggggaagtggggttcgctcattatttcctgctccttccctaggctcgtgggtttcgatattgggggagcggagattttctcttgggtgctggtcacgcccccttaa

SEQ ID NO: 12581 - DNA, 2300 bp, Homo sapien
cacgaaatctctcccccaccgccccaacacccacttgggaaaggaacgagcaaacatccctctaagaaagaaacctacacttgaatgatttaaattaaggtggatggaagttatttccctttctggcgcttgccagatttcaagaaaagctgaaaaatgggagcgggggagggaagcaacagacggctggagggcagcagcagaacaagcgaggggcagcagccgagttaaagtgggggccatccatttcgggcagaggagacaaatgaaagccgaccccgctgggatcacgtaggttcgtggctgcagcaaaagttgggtttcacaaagttgaaaaacagccggtttctcaaacaattgtgatttggaaggtttcgctgggtttgcccagatgtttacgaataaataagaaatgcagttttaaaaaaaagtgtgtgttgggggtggtgagaatgcgctctcttcggcccgccccgtcctttccaaagaaacgtgctcataatggggtgacctaattacatcgcaatggaactcaatcttagccactccgcagcaccgggtttcataacagactcggcggcctcgagtgctgggaagaaacgtgcgagggccgaggggggcggcggagcccgcgtggaaatcggaaagaagcgcagccctgcgacttccgcctgggtcatcacgccagcagtcgggccaaggcgcagggggcgggtgggggactcgttaactttttatttgggtgggcggcatccaaacctaacagtatatattttatcattttcaagggagtcatgctccattgcgggcccttcggtttcgtggctcccatgtccccctctccacctcccgccaaaacggcgcagcgtgacaagccatatgttccactccggtgggggcgagagagaagcaacaataagttaaaagtgccgcctccctccacctctttaccttcattcttaccaaagtaaccttttttcattgttctagagtcttgaggtgtgtgtggggaggatggaggaggagggagggttgtggcgccgcccagaattcggagcgcgcgtggaaagtagtgagttgctcggtgggctttttctgggaggaaggggcattcaggaaggattagggttttcttgactaaaaagtttaaagattggatgcgtgaaaagaaacggcacgcctaggcctggtaaaacaaacaatcgtcccgggttgtggtctttttttgcggcgccccccacccgcccacacccggagagcgccggctgcaaagcgagcgcgagtgtcgacgcgtgcggcgcactaaattgtgccgcgctcgcccccgccagaccatgtcctcctggggaaaaagtttccctagtccccccagcagcgcgccccaccctacgccccgctggaaaaaaaacagcaacataaaatcctaggcttgaacattctgtgcgtcccaaatttctaatgtcctcggcctgcccggtttgccgaagggagccgagtgtcgaagagaagtcgggaaaaggtaagttgtgcagacacttggggaagtttcaaggagaccgccagctcaagatggaaaccgcggcccgggcgctaaggacgggcttcagctcccgctggcaaaaagagaaagtcgagcccgccttcctgcccaacaaaaaacaacaacatgacaacaagaaccccggagggagtggaatgagtgacgtcacagccgcgctctgaggctgacaaaggagggggcgcgcccctcccgctctgcgcccgcgcggccccggagagggggcgcctgaagcgccgggtagggaagtcagccgacttgaaacttttcctcttaaagaaaaaaaaaaaaaagttgtgcgcggctcacagtggggttttttttttccgccttcttttctcgtctcccctcccccttcttccttttgaaagtttcttctcctccccctgccccccctccccgcctgaccgcatggctgattcaactccagtgtcaatcaacttctttttcctcctcttcctcatttaaataagtttaaagctcctcctccccccggcccaccaaatctgaactttataaattgggctttgcgcgccccagcccggagtcagaaaggcgaggggcgccgggaactggcgtgtgggactccagacaggagaggctgcgccttccccgcaccgggaccttcgcgacacaccagatcctcgcccctggctcgcgcgaacgcacaggatgaccaccaccctcgtgtctgccaccatcttcgacttgagcgaagttttatgcaaggtaaaggggggcg

SEQ ID NO: 12582 - DNA, 2300 bp, Homo sapien
aagggttgccaaatggcttagtttacatacaacagcatgacatatagacggttgcagcgagacatgactctaggcactttatgggccaaatgtaggcagttatcatgattcctatttcagagatgaagaaattgaggccttggtcagtgacttgaaaagtcacatagctagaaaatggccaagatttggatccaggattgcctaacttcaatatactggctcactgattctcaaacattagtatttgggtcgtgagatggaaatttaccaaaaatgcagattccccggccccatctgggccagggaatcagcattccaaactttaaacaaggggactccaggtgtctctctctctttcaacctgaagaatttgggggattttgcaaatgacctgaagcctgagaggaagtgcaacactgcagggctctcaggagggggtaccctgctgacgcctgtgactaggcctaaccttctggggtcctgcggcccagtgctgcacactgtcatctgccttgaggtgcgcctggggtccagattggccgatgaatacgtacacccgcagcgcctccttcactccgaagactttcactttcccccttgcacaaaaccgaacatcccaccccaccaccacctccaagctaaaatacctgggccgcccctccccacgaagggacgcgctccaggcgaatggggagggcccggaagtcgggcctgggacagaggagccggcccaccgcctcccggtcggaagcggcagtgcaggtgaggcggcggccagcctggggactgcgcgggtaaggagcgggagggcggaatgcaccgcgaagttggcgggggacggccacgcacgcctcgcctcggccttcctgcaccgtagggccgccctcccgccacccctgggcacctgtcgaccacgtctgggcgagggcgggtcggctcccgccctcgggccctcaccgcggcggggacgccgggtcagcgaagggttaagggactcgctccctcctctcggctccctcacccttggaaagtccccgaaatgacgtttcaacccgacaatttaaaaaagagtttaattatagagacaggctctgggagctggaacaaacccttggtcggcggggccggtaaacaactcgggagcgagcgggctaggccagtcgcagccttgcggagcccgcgcccccggggagagggggaggggagggcctccgggagttggaaaagccgaggaaattcgaggaatcagctttctttggaaaaatccactttgtagccattctggggcgcctgatggtgctcctggccggtcccgcagccttggagggaaagcggcgccgcccgaagcaggggcatagccggtgccccgcggggacaggccctgggccgggaagggggccccgcccgctcccagtccccttcccctttgcttttttccagcccctcctccggtccccccagctgagcttcgcgaaccctcgggagttaaagaccagccggcctcttttttggggggggtggggggtgggggagcgggaatgggtggaggccgggggaataaaaaaccgaaatagcttcacatcagaactcagactaaccttgtggtttcaacgcgcactctgctctgtcctgaaatctggaactcattacctcatcaccaagaaactgcacgaaatctctcccccaccgccccaacacccacttgggaaaggaacgagcaaacatccctctaagaaagaaacctacacttgaatgatttaaattaaggtggatggaagttatttccctttctggcgcttgccagatttcaagaaaagctgaaaaatgggagcgggggagggaagcaacagacggctggagggcagcagcagaacaagcgaggggcagcagccgagttaaagtgggggccatccatttcgggcagaggagacaaatgaaagccgaccccgctgggatcacgtaggttcgtggctgcagcaaaagttgggtttcacaaagttgaaaaacagccggtttctcaaacaattgtgatttggaaggtttcgctgggtttgcccagatgtttacgaataaataagaaatgcagttttaaaaaaaagtgtgtgttgggggtggtgagaatgcgctctcttcggcccgccccgtcctttccaaagaaacgtgctcataatggggtgacctaattacatcgcaatggaactcaatcttagccactccgcagcaccgggtttcataacagactcggcggcctcgagtgctgggaagaaacgtgcgagggccgaggggggcggcggagcccg

SEQ ID NO: 12583 - DNA, 2300 bp, Homo sapien
aggtcaggagatcgagaccatcctggctaacacgatgaaaccccatctctactaaaaatacaaaaacaaaattagctgggcgtggtggtgggcacctgtagtcccagctactcgggaggttgaggcaggagaatggcgtgaacctgggaggcggagcttgcaagtgagccaagattgtgccactgcattccagcctgggcgacagagcgagactcgaaaaaaaaaaaaaaagagaaataagaacttgtgttcacacaaaaacctgtacatgagtgtttattgaaactttattcataatggcccaaagctagaaataatccaatgcccttcaacaggaaaatggataaactattgtataagcacacagtgaaatactatttatcaataaaaaggaatgaactattgatacatgcaacaacatggttaaatatcaaaggcatatactgcgtgaaatcaaacatacaatatgattccatttgtatgacattctgggaaagacaaaattgcaatgatagagaacagatcagtggatgtcagggactagagatggagaaagtatgaatgcaaagggatagtatgagggagtttttgaggggtaatggaactgttctgttacctgattatggtggtggttacatgaatcaattcataagttaaaattcatagaactgtatgccaaataaagatcaattttactgtatgttaaattgaaagtaaaaaaaaaaagttacaggaatgaatgtatactcacaaactgaaataactactttgaaggaaatgaacattccatgagagcctaagagagaggagggacactgttttgtgacaaaggaaagcatcaagaatgttttccctgaggaagtgaggcttgagttgggttctaaaaaatgatttagaatttacttgggctaaaggaaggttgattcacacagaagcatttgcatgtgcaaaggccccggagtaggaggaagatggctcattctcatctaaaaaggactagagcacacggagtgccctggagggtgggagaagtgcatggggagtgagaaaaacccaagctggaataagagagtcagattacgccagactgctctaggtggggcctaggttagggtgggtggagaggtgtagctgtgggctggcctgataacttcactgacagttggaacatcttgcagagacccgggcaatcagaccccccagggcaatgctggacctgggattggattctcagtagtcctagcaggaggcggcctgctcccaaacccaaagattccagacaccctgcagtgccgcatttaccgtagaccctaaagtgccctctcctgaggcctctgccttgttcaggagaatattgacagctcagtaatacacactaagctttctgaggggcttgagggctttgagagataagatagtctggcttgtacagactaccacagggccccagtgatgtagttgttttcaaaaatacttgtgtcaataatcaggtatttttcagatgggcaacagatccccatcaccctaccctgaaccactttactctcccccaggctccaagcccagggcctctccccatttccaggcctcagggcctgtcttatccagggctgggggtggaggctagagagtgacacagatcaaacttataagttgtcagttgaccatttaatggaagtctacactgaataatcctttgccaagtgaatagccccggaatttgttttgtggtgtaataagggttgccaaatggcttagtttacatacaacagcatgacatatagacggttgcagcgagacatgactctaggcactttatgggccaaatgtaggcagttatcatgattcctatttcagagatgaagaaattgaggccttggtcagtgacttgaaaagtcacatagctagaaaatggccaagatttggatccaggattgcctaacttcaatatactggctcactgattctcaaacattagtatttgggtcgtgagatggaaatttaccaaaaatgcagattccccggccccatctgggccagggaatcagcattccaaactttaaacaaggggactccaggtgtctctctctctttcaacctgaagaatttgggggattttgcaaatgacctgaagcctgagaggaagtgcaacactgcagggctctcaggagggggtaccctgctgacgcctgtgactaggcctaaccttctggggtcctgcggcccagtgctgcacactgtcatctgccttgaggtgcgcctggggtccagattggccgatgaatacgtacacccgcagc

SEQ ID NO: 12584 - DNA, 2300 bp, Homo sapien
atggcctccttagggctgggatgggaactgagaatcatttgagggcttaataagtgattttggaggccccagtccccaccctatgggagcagagtgaggtggtctgacaaggtgcttccttcccggtgagcaggagatcgggaggatctccattgagatgcatgggaccctggaggaccagctcagccacctgcggcagtatgagaagagcatcgtcaactacaagccaaagattgatcagctggagggcgaccaccagctcatccaggaggcgctcatcttcgacaacaagcacaccaactacaccatggaggtgggtggggctggccttgttcctcttcgggagcccgtggccccttctgctctttctcctgggtggggaagtctccaagggaacaggtcatagttggaggataaattaacttcacccctgaagcctcacatcttcaatttttagtaccttctgctttcccaaggaatgtgttgagaatgcacatttctaggccccatctctagaatttgcttcactaattctggggtggagttcagaataagcacttctggtggttctgggtgctggtgggctccaaacactggctcaggcatctgctttgaaaatggctacttgttttaactgtgcaagagtgtgtgtgtgtgtatgtgtgtgtgcgcgcgtggctgtggggttggaggttcggggaatcacacatttttttgtctcaatctttcctacccccaaatctgccctccttcctgacctgacccccattggcaagtcctggtttctttgctctcccaggcagaggctgccaccctgccccttggtcatctagggtccttgtcctagtaggttgtccttgtcctggttccccttcctctggtgacactcagccacacagaaggccaagtttgatggctttggccattttgatggttggggagtaggatgggcaggggccgccaggagcccaggcctgggacccctttgctgacaggccccttgccgtcctgcagcacatccgtgtgggctgggagcagctgctcaccaccatcgccaggaccatcaatgaggtagagaaccagatcctgacccgggatgccaagggcatcagccaggagcagatgaatgagttccgggcctccttcaaccactttgaccgggtgagagccccatcctgtgctttcttagtgcagcccccaacccctgccccagggccctggagggcacttccccgggacgtgggctgccatgcaagtgaggagggagagaaaggggaaactgccgtcagcctgccctgactcaatgcaccctgcaaaaccagccttggaaaacctgtgttggtgccccataagcttccctgctttccgggagagagtgttcagactgtgggtagaaagaggacctttgacccctgatccttgctctcctaccatgaggagtcaccctcagtgaaggcttgctgctccctggctgtggagacagaggagcagaagagactcctcctgccctcgctggcccctacccctaccccgacctccagtggcctctgggactctgctggggatgtcagaggccttggtcctgggttcccatcccagctctgggtcaggctgggttttagtgggctgccccttcccagtgccctggggcttgcgggcggtcccaaggcgtgggagcatgggcttgggtgctgcccaccaccccacctgcttcatggctctctaggcacctggggggaagcccctggggaagcgggggggctgggtcacttctgagggagcttctcacccttgtggctcatcacaccccactgtggtcctgctccctggagcagggctgcgtgtgctggggggagggcaccccctggagcctcgttggtgtgtctaaccgtgtgcacttttatttcccctcctcccccgcccccccaccctccctccgcatgcctgtccctgtgtctccccacacacgccaccctcccccggggcatgcccccctcacggctccacctccctgacaccgcatggctcgctgcctggcgcaccgcggccccaggatcactccggcacactgggtcccgaggagttcaaagcctgcctcatcagcttgggttatgatattggcaacgacccccaggtactcgcctcctgcatggagcacgctcaggggtggcgtctggggcaagaaataatgcgtttttcctttttctcttctctctgtctggatctcctgtccccctcctgtgggccatggggctcgtcctctcctgctgtctctgtctgccccatcactggtccaccct

SEQ ID NO: 12585 - DNA, 2300 bp, Homo sapien
ccgccctccatcctcctccaatgacaataaggttttgtttgtcaggcataaggttaccggattggcctgtgaagtccagaagctctttccgcgctcggctctttgagcctcagtttccccatctgtcaggcgtgtgtatgtgggaggggggtacggagtagatttacctagatcactcggggttgtcccttccagttttgagggtgatgtcggggtgtctgtgaggaggagggaggaccctgccacgcgaaggtagttttggtcgcagcagccagccaagtgtgcccgcggagaccggcagggaattccgggaggccccgctgtggagcggtccccagagcccgagggcgagctagaagagttcctgcggcgaggcgggaacgctcggtagcctctgagagcagttcgctggcgagaaaccgggttcctgcagggcagggatcagccgggtcgcgccttgtagggtggggtggggtggggcggggccggggggggcggcggtggagtcgtgaaattcccaagaaattcctttccattgccccactccgccccctttcctagggtgccgacctgcccagacccaggttccctgggaaagagaaaatgaatgttcttcgggtttcctcgcgtcctttctccagccccctcccaccccggggtttggagcgcgcgtgggagcgcaataacggtggcggggaacgggtccaatcccggcggctcctggggttcccaagcgcgctgccactcagtccccgagctcggggaggcgtctcccggcttcggtcccgttcagcttaagctggcgtcacatgagccgcgggggaacgggcaccgcgggagtgggcgggggtgtgcgcgccgggagggggccgcccagtccacctatatgcgccgcagcccggctgacggatgccaggaattcccaatgagaggcgatggggggaagtttgggcaactcggcctggccaatggagagcctcgggagggctctgccccttccccccgcccccgcccgcctcggctcccgcagcgctagtgtgtccgcctagttcagtgtgcgtggagattaggtccaagcgcccgcccagaggcaggcagtccgcgagcccagccgccgctgtcgccgccagtagcagccttcgccagcagcgccgcggcggaaccgggcgcaggggagcgagcccggccccgccagcccagcccagcccagccctactccctccccacgccagggcagcagccgttgctcagagagaaggtggaggaagaaatccagaccctagcacgcgcgcaccatcatggaccattatgattctcagcaaaccaacgattacatgcagccagaagaggactgggaccgggacctgctcctggacccggcctgggagaagcagcagagaaaggttagcagccgcccccgcccgctgcagcccccagcccccagcccccagccccgacccgctctgcctgccgggctctcggctccgggctctgaaccggttccgggcgcgcacgggagggggcgggggcggtgcggccgttgcgaggtggggtgttgggttacaggcgcctggcggaagcgggagcgcccctgccccggagcccgggaacgccgggccggagcgcggggaggtggcgccgctggcgggcaggtctccttgggggtccgtggtccaggccaccctgcggctgttgcaaccatccccgcgtgggctgtgctcgggggcggtggtcttcaggctggggctgagaccccggctcggggctgcttgctccggatcgattttcccttttcttccgcccctggccacctctccatatggcgtgcggtggcagcgccgcttcctgggccgccctgggttcaacctgagcggcgggcctcccgggaccctgctgccccttaggcggaggggagagcgccggagagatcggcggccgcctccggatctgcctggagaaggaccagctggagtgcggctggggacgagaaaactggggggcgtacgcgggctcccccgcgggccctgtgggggcggggtcaggacagcagaccgttttattgcttaactcagtgggttggaagctgtaaccccgacatgggcttgcgctacgtcctgcccctccgacccccgggaaaggtgggcagctcggttcgagttgaggggctgcagaacgagggtcagtcttaggggatatttggggccagtcactggggatccctacttagccacggagctgcatcccaggcaggcgcggtgtgccgggtgcgcgccccgccacgggagctgggctcggagctg

SEQ ID NO: 12586 - DNA, 2300 bp, Homo sapien
aggcacagtgctggagggtaacactcatatgaatatgtgtggttgacgaatgatgcagccagagacaccatccgatatctgctcacaacagcagcagtggctcttctgagaaccagggggcactttcttcaccttttccatgggtggctttcaggtatccaccatcgcctggagagaaggtagaggacaaaatccagcccataattcagggcccttcctgtcagtgaacttcttcttctaactccttcactcacttctgaattgacatatttgcattttaaatttaaatttaaatttaaatttttgcagttgatgcagccattcatcctacaaatacagtcctcccttagtattggcagggtattggtttcagcatccccatggataccaaaatctgaggatgctcaagtccctcacagtcagcctgggtatctgcgggttctgaagcctgtggatataaagggccaaatgcatatatgtatgtatatattttgagacagtcttgttttgtcacccaggccggagtgcaatggtgaaaatgcacctcactgcaacctcgacctcccaggctcaagggagtctcccgcctcagcttcccaagtagctgggactacaggcgtgtaccaccatgcccggctgatttttgtatttttagtaaggacggggttttgccacgttggccaggctggtctccaactcctgggctcaagcgatctgcccgcctcagcctctcaaagtgctgggattacaggtgtgagccaccgccaccgtggccagcctcaaatccataaattaagctctactatgtgctgggtgctggggtggaagactggcacatctgttgttcacaagacagtgcataacctaggagaggtttatttgctactgttcttcggaaccgggatcccatagaggagcctgccagaacgcgaggcctgctccttcccgggcattagcgcgtttagactctcctcttactaagcccagggaaaggagtcctggcaggtggcaagcagaagttagagctatttagtcactcccgccctccatcctcctccaatgacaataaggttttgtttgtcaggcataaggttaccggattggcctgtgaagtccagaagctctttccgcgctcggctctttgagcctcagtttccccatctgtcaggcgtgtgtatgtgggaggggggtacggagtagatttacctagatcactcggggttgtcccttccagttttgagggtgatgtcggggtgtctgtgaggaggagggaggaccctgccacgcgaaggtagttttggtcgcagcagccagccaagtgtgcccgcggagaccggcagggaattccgggaggccccgctgtggagcggtccccagagcccgagggcgagctagaagagttcctgcggcgaggcgggaacgctcggtagcctctgagagcagttcgctggcgagaaaccgggttcctgcagggcagggatcagccgggtcgcgccttgtagggtggggtggggtggggcggggccggggggggcggcggtggagtcgtgaaattcccaagaaattcctttccattgccccactccgccccctttcctagggtgccgacctgcccagacccaggttccctgggaaagagaaaatgaatgttcttcgggtttcctcgcgtcctttctccagccccctcccaccccggggtttggagcgcgcgtgggagcgcaataacggtggcggggaacgggtccaatcccggcggctcctggggttcccaagcgcgctgccactcagtccccgagctcggggaggcgtctcccggcttcggtcccgttcagcttaagctggcgtcacatgagccgcgggggaacgggcaccgcgggagtgggcgggggtgtgcgcgccgggagggggccgcccagtccacctatatgcgccgcagcccggctgacggatgccaggaattcccaatgagaggcgatggggggaagtttgggcaactcggcctggccaatggagagcctcgggagggctctgccccttccccccgcccccgcccgcctcggctcccgcagcgctagtgtgtccgcctagttcagtgtgcgtggagattaggtccaagcgcccgcccagaggcaggcagtccgcgagcccagccgccgctgtcgccgccagtagcagccttcgccagcagcgccgcggcggaaccgggcgcaggggagcgagcccggccccgccagcccagcccagcccagccctactccctccccacgccagggcagcagccgttgctcagagagaaggtg

SEQ ID NO: 12587 - DNA, 2300 bp, Homo sapien
aaaccttttaagtaccacatagtttcctatttaggggaacaatattccattaaaattcacatttttggaatttgatttctttcttttaaaaatttatttattttttgcccttttccccaagttctgatggaatttggtttctgtttagtaatgtttgctagaatatgtacttttatatgaaacatttgcatatttgttattagtacgattaatcgtattgtcactgaacaaaaagtagaagtaaataattttgtttgacgggtaaacctcttccatgttcagccgatctttttttttaaaaaaaattattattattttccccagatcagagatgtacagcccatctttcaatgatgattctactcaactgctcctgtgccatctctggtccagaggatgtaattcctgctaacttgaaagggcaaaactgacaagtgcctatttcagtagcttattaccacttaatgacagaggatagcttccaggaaaagtactataatacatcgaaaaggggacttttaactgtatctggtagaattccaaagcatttaacacccactagggtcaacgcggtgactcccatcctactgaagtgcagccacttctggcctggagcgcagctgctggttaacagctgtccaacctcagtgctccccactcgagacctttaagaggagctcaccgaacccaattaaataacatatatcgttagtttcaaatcacgcttcttgtgtcgtgcaaatttatctggaacggagagaagtacctcgtgcttctcgggacttcatcaactcggttttggcaattttcttcctacttctttatccctttctctttccccccatgtaccactctaatctgccagacggaacaatttagcctttttcaactaaaggaccggaggaaggaagagttagagaactggacttggggatgagcggtggtgttaaacatttaccgggagaggggaaggggcgggtgcgcgaacaaaacccccaggcaacgttcctccaagtgtgcggccctacctcccggttcccccgcctcgggcagggccggactgcccaaggcagaggccagcagaggaaggagggccggagcccccgcccgcaccttcccccactccagccgcattttccccgaactcgtacgggcgctggcctccgggcagcagccggcccgcgggtccccgcgggaggaaggcgagccaaagcccggcggccactcggattgttacgcgcattcaactccgcggagtgcggggcgctggggtgcagaggggtctccgcccggcgccacccaggtccccaggcgggaagcggctcaactgggaaagcagccggcgcccgtggtctccgggccggccgcccgcgttcttccggccagccccccgcggaggggaggggcgccgacgccgcgttctcggggccccgcagccggcggaagggccgcgcatcgcggaagcgcggcggcagctgaggatcagctgctggaggaggcggagaggcagagggaggagcctcggggggaaggagagggaggggaccgtcaggaagccgcgaacgccgccgagtgtctgcacacctcgctctgcctgccatggctggttaaagaaccatccggatcgcagcgcggggggagggccgggtggggggagcagcggccgcgcgtgaggccgagggaggggcggcggcgcgagcggcggcggcggcggttccagcatgaagaggagagctggcctggggggcagcatgaggtcagtggtgggcttcttgtcccagcggggcttgcatggggaccccctgctcactcaggactttcagaggagacgcctgcggggctgcagaaacctctacaagaaggacctcctcggccacttcggctgtgtcaatgccattgaattctccaacaatggaggccagtggctggtctcaggtaaatcaacccccttcccctccccgcgcctccccgcaccctcccagcctccccctctcgctctcccccgtcaccctcctcctgccctctgtccccaccccctccctttctctacccccttctgcggtgggaaggtttggtgtcaaattaaaaccattgcagggggaggggaaggagaggatgtcttctataaaaaagacctaaaatggttgacagctccttaattcgctttatcccaagtgcaaagtgatctctcctgatgcctgccctgaaagtgtaggtcggggaggggggcgaggttaccgctctacaaagtttgacggcaaactcttcctccgcgtactttaaaaggtgctgggggcatt

SEQ ID NO: 12588 - DNA, 2300 bp, Homo sapien
actgtaaagggggtatgtgcttaagagggcagaggaggatgcgtattatacactgccacagtaaaggccacttcgaacaaatctcccccaccccaggcaaataggtataaatgatggcctattaactggaagaagttagagggggttttgaatgtgtggactgagtatgccaagcaaaggaacagtgagcagggaaactggccttggaacaagtggattccactggaatgaaacaggtcaaactcaacatatccaaaccggaaagcacgacctttcccttcaaactcctccccactccctaagtacattcatgaattcagcaagtattaaagcggccactagtgccagcaagtactggctccaggcatacacccttgagcagaacagacgtagtccctgctctcagagaacttacagcagagtggggagactcatatcatcacaaaaataaatgattaattacacattttgacattgcaatgacagaaggatgtttggtgctatacatctttaataaagctggtatactgctactaatttttaggtggtgattataatgaataaacacaaaggattattagaaggcatcctgaggataaaaccttttaagtaccacatagtttcctatttaggggaacaatattccattaaaattcacatttttggaatttgatttctttcttttaaaaatttatttattttttgcccttttccccaagttctgatggaatttggtttctgtttagtaatgtttgctagaatatgtacttttatatgaaacatttgcatatttgttattagtacgattaatcgtattgtcactgaacaaaaagtagaagtaaataattttgtttgacgggtaaacctcttccatgttcagccgatctttttttttaaaaaaaattattattattttccccagatcagagatgtacagcccatctttcaatgatgattctactcaactgctcctgtgccatctctggtccagaggatgtaattcctgctaacttgaaagggcaaaactgacaagtgcctatttcagtagcttattaccacttaatgacagaggatagcttccaggaaaagtactataatacatcgaaaaggggacttttaactgtatctggtagaattccaaagcatttaacacccactagggtcaacgcggtgactcccatcctactgaagtgcagccacttctggcctggagcgcagctgctggttaacagctgtccaacctcagtgctccccactcgagacctttaagaggagctcaccgaacccaattaaataacatatatcgttagtttcaaatcacgcttcttgtgtcgtgcaaatttatctggaacggagagaagtacctcgtgcttctcgggacttcatcaactcggttttggcaattttcttcctacttctttatccctttctctttccccccatgtaccactctaatctgccagacggaacaatttagcctttttcaactaaaggaccggaggaaggaagagttagagaactggacttggggatgagcggtggtgttaaacatttaccgggagaggggaaggggcgggtgcgcgaacaaaacccccaggcaacgttcctccaagtgtgcggccctacctcccggttcccccgcctcgggcagggccggactgcccaaggcagaggccagcagaggaaggagggccggagcccccgcccgcaccttcccccactccagccgcattttccccgaactcgtacgggcgctggcctccgggcagcagccggcccgcgggtccccgcgggaggaaggcgagccaaagcccggcggccactcggattgttacgcgcattcaactccgcggagtgcggggcgctggggtgcagaggggtctccgcccggcgccacccaggtccccaggcgggaagcggctcaactgggaaagcagccggcgcccgtggtctccgggccggccgcccgcgttcttccggccagccccccgcggaggggaggggcgccgacgccgcgttctcggggccccgcagccggcggaagggccgcgcatcgcggaagcgcggcggcagctgaggatcagctgctggaggaggcggagaggcagagggaggagcctcggggggaaggagagggaggggaccgtcaggaagccgcgaacgccgccgagtgtctgcacacctcgctctgcctgccatggctggttaaagaaccatccggatcgcagcgcggggggagggccgggtggggggagcagcggccgcgcgtgaggccgagggaggggcggcggcgcgagcgg

SEQ ID NO: 12589 - DNA, 2300 bp, Homo sapien
tattttgatacaagcatacaatgtatctgccattctaatctaatttctatcttttaaaattgtatctttttttttagtttggtactatgtcctttcctgttctttcttctttgggttaacaaacttttcactcctttactatcatttttaaaaacccttttatcgaagtatatatgaaaccagaaaagtgctcacaaatataacctgaacacacatgtaaagccgcactcagattaagaaatagaacattatcagcacttcgtgaacctcctcatgttcccttccagttattactaccctaagattaatcattatatacagtgacttctaatagcagggatatttgggtagtttcccgtttggggctgttgaaagtatgggtatgagcttttttttgtacatgtccttttggtgaatacatgcagacatttcagttgcatatatataactaggagtaaaattgttttttgttgtttttgttttcgagacagggtctagctctgtcacctatgctggactgcagtggtgtgatcacaactcactgcagcctcaaactccagggatcaagacgtcctcctgcctaagcttctggagtagctgggactacaggtgcacaccatgatgcccagcactttgggaggccgaggtgggaggatcgcttgaggccaggagttcaagaccagcctgggcaacacagtgaaaatccctaaagtgctgggatgacacgttgagccactgtgccccagctaggggtgaaattgttggaacaaagtcttttcacatattcagattcagttgataccgccaaacagttaaacaaagtgattgcatcaatttatgttcccttcaggagcatatgagagttgtggttgctccacaatcttgccaatacttgacattttctttttcatttagctatatctcattgtggttttaatttgcatttcctctttatcctttgttttttaagtgtttcaagatggagcagataaaaattcagggagttaatcctctataatagctggaaatttcccccatgggtactcattcaatggaatttaaaacatttgcccctgtattgaaggcaatatagtataaaggatggggccacatgctctgcaatcagaaatatgaggtttgattcctaactccggtgcttacttgctgaattaccttgaggaagttatttaacctttttctattttatgtaaaacggcactaataatagtactgcctcacagggttgttatggggattaaaggagaaaaaataagtaaaatgctttgcaaagttcctagcaacaggtgagcacaaagtcaacaaatggtagctattattataccttatattggttatttatgcacatctcatttctccttctgttttacacattccatgagaaaggaaaagcatgcatgtagcacagattaactgcctcacatataattgctaataaagactgattggatgaacgatttaatatataaacaaaaagtattgtggttatcgctataaaagatggcataggttgggcattcacgcctgtaatcccagcactttgggaggccgagttgtgaggttcgcttgagcccaggagttcgagaccagcctaggcaatgtagggagacagtatctacaaaaaaaaaaaaaaaaaaaaaaaaggagggtacataaaattattatagtggctataggataatgtgcactgctaatgaagactacattatttaaatacagtgtctttccttctatttactgttatcgtttagcagaaaaacagtacgcaggatactaaagaaggaaaattcgatgtcccatattacatttgtgagagttctggaggtttctcccttcaaagccaaaaccaaaacacaaacataccatcccagtaacaaatgcgtcacttttctgaagaagacgttaagcccttccaattttaacagatcctttgttcaacagaggagagagactgggtaggcatcacctgccccagtagcttccgtacaaaatggcgttgcccgttcccacacgccagctgggattacgtcctccaggcctgtcgcaggaacggaagtggttacggccctagtgaatccgggtgggtgcgcgcaggcggccgcacaggttccaggtctttaacgtgagcccgctgcaggtgtgcggcccagtccgagacagcaggtaagtgaggctcagaagccggcgaagccttgcaccaggattgtgcgcggggcagggggtgcttccagtgcagactaagaggggtcgtggagcggggggatattaccgtgtacgggggt

SEQ ID NO: 12590 - DNA, 2300 bp, Homo sapien
cttctaatagcagggatatttgggtagtttcccgtttggggctgttgaaagtatgggtatgagcttttttttgtacatgtccttttggtgaatacatgcagacatttcagttgcatatatataactaggagtaaaattgttttttgttgtttttgttttcgagacagggtctagctctgtcacctatgctggactgcagtggtgtgatcacaactcactgcagcctcaaactccagggatcaagacgtcctcctgcctaagcttctggagtagctgggactacaggtgcacaccatgatgcccagcactttgggaggccgaggtgggaggatcgcttgaggccaggagttcaagaccagcctgggcaacacagtgaaaatccctaaagtgctgggatgacacgttgagccactgtgccccagctaggggtgaaattgttggaacaaagtcttttcacatattcagattcagttgataccgccaaacagttaaacaaagtgattgcatcaatttatgttcccttcaggagcatatgagagttgtggttgctccacaatcttgccaatacttgacattttctttttcatttagctatatctcattgtggttttaatttgcatttcctctttatcctttgttttttaagtgtttcaagatggagcagataaaaattcagggagttaatcctctataatagctggaaatttcccccatgggtactcattcaatggaatttaaaacatttgcccctgtattgaaggcaatatagtataaaggatggggccacatgctctgcaatcagaaatatgaggtttgattcctaactccggtgcttacttgctgaattaccttgaggaagttatttaacctttttctattttatgtaaaacggcactaataatagtactgcctcacagggttgttatggggattaaaggagaaaaaataagtaaaatgctttgcaaagttcctagcaacaggtgagcacaaagtcaacaaatggtagctattattataccttatattggttatttatgcacatctcatttctccttctgttttacacattccatgagaaaggaaaagcatgcatgtagcacagattaactgcctcacatataattgctaataaagactgattggatgaacgatttaatatataaacaaaaagtattgtggttatcgctataaaagatggcataggttgggcattcacgcctgtaatcccagcactttgggaggccgagttgtgaggttcgcttgagcccaggagttcgagaccagcctaggcaatgtagggagacagtatctacaaaaaaaaaaaaaaaaaaaaaaaaggagggtacataaaattattatagtggctataggataatgtgcactgctaatgaagactacattatttaaatacagtgtctttccttctatttactgttatcgtttagcagaaaaacagtacgcaggatactaaagaaggaaaattcgatgtcccatattacatttgtgagagttctggaggtttctcccttcaaagccaaaaccaaaacacaaacataccatcccagtaacaaatgcgtcacttttctgaagaagacgttaagcccttccaattttaacagatcctttgttcaacagaggagagagactgggtaggcatcacctgccccagtagcttccgtacaaaatggcgttgcccgttcccacacgccagctgggattacgtcctccaggcctgtcgcaggaacggaagtggttacggccctagtgaatccgggtgggtgcgcgcaggcggccgcacaggttccaggtctttaacgtgagcccgctgcaggtgtgcggcccagtccgagacagcaggtaagtgaggctcagaagccggcgaagccttgcaccaggattgtgcgcggggcagggggtgcttccagtgcagactaagaggggtcgtggagcggggggatattaccgtgtacgggggtgacattgcggggcccccgctgtcccggagcgagttggccctgcccctctccccgcccctcggcgtgaccccctcgcccccgtcgcacacggcggggcggttcagcacccaggtgcgcaaggagggcctcacccctgcccgcggcctcccacgccctccttgggcctctcctttcgacccccttaccctctccctgggagactctaccagaccttcgaggctgcgtgtcccagtcagctaaaaaggaggccccgcccgcggcacctggtagctcctcgggcgctgcgggttcgacgcggcaacagctgctgttttctctcctgga

SEQ ID NO: 12591 - DNA, 2300 bp, Homo sapien
taaatagtaataaaaaccatacacattcagtgggaaaccttcagccatagagaagtataggcagggtgcagctgattgctctgtctttgggcaatttagcttttaggccagaggccacagatgggtagcctggtgtgtgcctagggtgtttttgtttggctggcgcaatattttttaaaactgtaagtttattgccagcatttaaaaatggtgacatttcatgtaaaattcagatacctgacttatcttaaacaagcaaagtatttgaccacactgggccttcttcctgcacaggatcatcagcttgtgccgaatggttgctgctccatgttttctccctggccctgagaccaaaggccatttactttttttttttttttcttttttgagacagagtcttactcttatcacccaggctggagtgcagtggctcagtttcggctgactgaaacctccacctcccaagttccagctattctcctgcctcagcctcctgagtagctgggattacaggtgcccaccaccacgcctggctaatttttgtgtttttagtagagatggggtttcaccatgttagccaggctggaacgaactcctgacctcaggtgatccacctgccttggcctcccaaagtcctgggattacaggcatgagccactgcacctggccaggccacttactattttttttttttttttttgagacggagtctcactctgtcacccagactggagtgcagtggcacgatctcggctcactgcaagctccgcctcccgggttcataccattctcctgcctcagcctcccaagtagctgcggcaacaggcgcccgccaccacgcctggctaatttcttgtctttttagtagagacggggtttcactgtgttagccgggatggtctcgatctcctgacctcgtgatccacctgcctcggcctcccaaagtgctgggattacaggcatgagccaccgcgcccggcccaggccacttactatttactgttgcacttttactgttattttaatagaacagaaatagtgctgtatactcatttctttctcacatataggaaaacagaaactacatggagaaagccacatgttacagaaaaatgaaaaaggaactattttgtggcttgcttcattgatttacattaacctgcctggcgctgtggacacttcagtttgcatccgccttctatgcatcttgtatatctctctaagttctacctttttcttttgcttttctgatcctttctcttttgtacccccgctggcttaccctacaataaccgtatcagtttctatggagaactgctgagccttctggagcaacagaaagtgttgagtcaaacctgtttcctccactccctcactgccgcaccttccagagaagtaaaaaaagtctccctaccaactgactgatgattacaattttttttaaattgagaagcagttttccttcaactgttaggtgatcaaaggtttaaaatacaaaatactttgaagaagatccattaactaaaaaattcattcattaatcagcagttagaggtgagagtctagcttattgtttttttttcttcctagatcacacttcattgtgtacatagcctgttgttttgactgatatgattttatatcattaagagagccatggggaactgtcagagggcagggagatttcctggggtgaggatggagatagagatggaatacagagattataaagatgaagaaattaaaccattgctactatttcacatggaaatttatagcagttgttttagtttgtgggcacagagattataaatggggcattttttagaggaaaacttgtttatgtaaaggtttatattctgtatataaatatatttttgccatttgttttgcagattgtgggattagtgatatgcttttctaaagagtagaaaagtcgaagatgtctagacagaacttagtggctttgacagtgactacccttctgggtgtggctgtaggggggtttgtcctctggaaaggcatccagcgccgccgaaggagtaaaacgagtcctgtgacccaacagccacagcagaaagtgctgggcagtagagagctgccccctccagaagatgatcagctgcactccagtgcccccagatcctcgtggaaggaacggatccttaaagcaaaggtggtgacggtgtctcaggaggcagagtgggatcaaatcgagcccttgcttagaagtgaattagaagattttccagtacttggaattgactgtgagtgggtaagttaaaaagcaaaagttaaaa

SEQ ID NO: 12592 - DNA, 2300 bp, Homo sapien
attctaggcagattgactatccctttaggagaaaaaattaaacttaaccctaccacacatcatatacaaacacacctaaaaaatcaatttcaggtggattgtaaatctgaatcgccaaggttaaaaccataaaactccaagaaaatgacatggggagaatatgttcatgactgtgtatagggaaagacttgatcaactgtactacacagatcttctgtttatcaaaattaaacatcaaaagaatgtaaaggcaattcacagaatgggagaaaacattcacaacacaaatttaactcccggagggttcatatgcagaatatgtaaagaacttctataaagacaactcgatagaaaatgaggcaaaaaaaaaaaagaaaatgaggcaagagacttgaatggacactgcataaaagaggatatctaaatgaccattaaaatacaaaaagatgttcaatttcattagtaatctggaatatgcaaattaaaataatagtgaactattactacaagcccaacagaatggataaaattttaaaatatgacagtaccaaatgtggacaaggatgtaaaacaaaggcaattttcatatatagggaggttaaattagtgtaatcacttctgaaaacagctagaaacaatggaatcagtcatatgctacggatgggaaggtaaattcataaaaagatcttggtaaacagtttggcatcatctataaaagttaaaattgtgcgtgcatgtgcacacaaactccttgacccagaactccactcatagacacatacgcccaataatgagtgtaaatgttcaattgcaccattctttgcaagagcccccaaatgtaaatgatatattgtattatacacacacacacacacacacacacacacacacacatatatttttgagatggagtctcgctgtgtcacccaggctggagtgcagtggcacactctcagctcactgcaacctctgcctcctgggttccagcaattcttctgcctcagcctcccaagtaactgggattatacctgtatgcatcaccacacctggctaatttttgtatttttagtagagacggggtttcaccatgttggccaggctggtcttgaactcctgacctcaggttcaggtgatccacccaccttggcctcccaaagtgctgagattacaggtgttagccaccacgcccggactatactgtattttatatatatatataaatgtccatcaataatagaatggaaaaataagtcatggtatatttataccatggaacactatatggcaacaaatcatagtcacacccaacacaggtaaatctcacaatgtttggaaaaagaagcaagacaaaaaagagcacatactcgatgattcatttatactaaatttaaaaaacaggtaaaattaaactatagtgatgagggaggcatgcctaagcagtaaaagtataaagaaaacaagaaagtaaatagactttcttgagacaggataatggtaaccctcagagggcagtgaggggacaatgatttcaagtggacacaacaggagctcctggagtcctagcaatcttacgtttcttgacctagtttctagttacacagctgagctgttctctttacataaatcattcagtgtttatttttgttccaggcacttttcttgatgtgttatatttcacaataaaaaagtctaaaaaaagactcaggggcaggttaaacagattagacaaagccaaataaagaaaaagggaattgtaaaagagaccagaagaaatcgtatataatgaatctagagagactaagatatgttaaatattaaattccagcaagaaagaagaaaggataaagacaatctttaaagagaaattttaaattgataaaacatcaatcctattatccagatatttttctgaatcccaagctagaaataaaacacctagactcatcatagtgaaccttcagaaccataaactcaaagagaagatcttaagaagagatatgaaaaaattacattacttacaaagaatcaaggtatagactgacagttatcttcaacagcaataacggaagccagaaggcaatggaatactatcctgaaaatgataaactgccaaaccagaactttacacccagagaaaatctctttaagattaaaatcaaaatacagacattttcaaaatgatgaagtttattatcaatgggccctaaactgttaaagaacgattttaaggaaaatgatccccaaaagaaggtcagagatataagaaaaatgtaagcaaagaaaaaggtaaatacaaggtc

SEQ ID NO: 12593 - DNA, 2300 bp, Homo sapien
gtaacatgcgggccgatttaacagcctcatataaatactgtgtcccagaatgaacaacttaaaagaggggtgaactggtcactgggtaatcctggaagaaatggaagaccagcattcttcatccattatcagctggatggtagtgcccctctcgtgggagctgaacattatgaagtggccttcctgtcagtagagctcagaaccctcaaataccttctgttgggattgcgagtcgtatgttcagactataaaaagggcagagataagaaagaggatgtttcgaaaacaccaaagtaactaaccctttaggagtccttcaacctccccagttacccttggcgcgcagcatttgaagctgtctgtgaggccatcctgcgcttgtttccctcagacactttgtttttcatgttttggcagaatctccaatgaaaactatgttcctcacgggctgaaggtggtgcagtgtcacagccagggtggcctgcgctccctcatgcagctggagagccgctggcgtcagcacttcctggactccatgcagcccaagcacctgccccagcagtggtcagtggaccacaaccatcagaagctgctccggaaattcggggaagatcttcccatccagctgtcttgatagctgctttcctcccagttaggacaagtgggaagctggagccaaggttgaagagtcacctcttcccattttagtacatcattaattgtcaaagcctgtgtgacacaactcagaatactaacctagactaatcccaggatgcttctgctggagcaaagatattgtttgaaggagagtttatggttttggattttaaacgggcagggtcttttttcctctcatttttgtggacaagagaggccttcgcctttatttttactctccctcttctgctgtccctgtgcagaggaaaaatgaagaattctcccagaagtgacttgtcaagacttaaaaaaaatgtttttaatgcatttcttccttgtctagtgcctcggtttatctctaacaggggctgtccagtatatcggtcctgttaggaggggagaaaaagttcttccaaaggctggagaagtgaacaaggagtcaaatttattttcccaattcaacttcataattatcatttctttggcttcatgctctcccgtaactcatgtggttgggatccatcccatctgggtcacttcagtctacttcacgtacttgaaaaggctttcctttacacttccaggaccaaacagcaacttcctgccacacacttccaccctatcactgggagaaatccttttctggacatgagcctttgacctgggtggggcagaaagaaccacaaactccatctcccaatagaactttgaaattcactcagcttttcctttcatgctgtttgttgcctgcttgttgcactcctcctgccccagaactgcaagatttttagcttcacccctttctgagagtaatgttatcttttatcagaatcagtatcagttcccctgtattctgtgcttcatcgaatttgcaagactgacctcttttaagcatttaattcactcccagagtcatctggtcaggttgcaatatgaggacttctctgtctcctctgaagcctgggacactgagcttacttaatacattagatgttcaaaagaggagcgttgtttcatctttcaaaatgttaggccattactttgagtataaaatcgacttattaatgattagtaatttttctaaagtattgggaaaactttcttattttataagatcttaacaagcttaaaaaagaattttatgaccagaatccaacaagagctctattttggaattgtgcccaagttggtgatgtttactctaaaattaataataaaactacttgtaagcacaaggctcactggatgtaaatgtaaaacttcgcgactttataaaactggcattcctaggggaggggctatttatcctacaggtccctgcctcctggcagtgccatggtatgtgtgcatggatataccagacacagtcaccatcggccatcagtagcagcccatgaacccacgtgcacatcctgcatcttgctcttctgacccttcattcccacttgtcttcaggcaggcatttctgggatctaaactagaaatccttgaaaacaaatagtaccagccactttgaggaatgtgcattcactgtagtgggttattatggggtctctgcctcctggctgtgttatgcggagcccaggagtggaggagagccgtggaaatagacagggagaggctggtacttgggttgtggtaat

SEQ ID NO: 12594 - DNA, 2300 bp, Homo sapien
caggagggtagttcccttacattttcttggttgacctgagaggcctgtggagcctgattcccaaggagcaaggtctttcctggcctcccacaaatggcaccgctggatctgccccatgattcctgcggaaaccagatggaggtttggcagtggttttctccatctatgcaaacaagccctggcccctggcgcagtcttattaaactccccaggggagagagacctgggagagcatctggcgtctccagactcctgcccctgttgtgactgccacaccttatgcctgaaattccctgctacttgtgtagaccctttgtgaggccctctttgtgcattctcttctttctaggtcccattcctgcgtgggtcacttttggacttgtctaagtgtcatcgtaattagtcttctgagtgaggatatcgtattgcagtaatgaccctgggttttcctcagcaaaaacccaactagggtttcttcacctcaacagaaatgtattgagcatctattatatgtgcggttcagtctcgagtgctggagaaatggagaaaagccacctgattttacttctatctgtcagggtggtgctcatgggatgcttgtgggggggcatgatgctgtgacttcagtttgcctgattccccagatggcttcatttagaggctggaccctatgtgggtcttcggagtagccatggtgtccagcagtgccagcaggaagcagactcctcaacaactctgccccggcattcaaggacctcctgagttcagactcacccagcctggccaacctcaactcctatcaaatcctaggccccctgcaacgcctggcagctctctctcttgaacacatcaagctcttccatcctctggatttttgcaaggcctatttctgcagtctctcccctgtcctcacctcccccttccttacctcttaagtgattcatccacctttctgagagctttcccaaaggccaccttacaataaattatttcttcctctgttggatccctactttgttgttacacatctattcattgagcgctctgtgcccgacactgtgctggtttcctaaaactcatccaagcctcttgctttctgcctggagtgaagagtagttcacgttctgattctcagtgcctctagggctggagcggaatcttaatgtctgtgtcctcgtctctcaccaccgcgttttgcactttgtcgaaaggtgtcagatggtgagatggcttctagactgggctctgcccactaattagctgtgtggccttgggagaatcatccggcctctcttgctgcccttctttccgatgaaataatgctgacgatgatatttcagggttgtccaggggtcaatgaggcgggatagagggaagcatcgtgaaatctgggagccccaggccagcgaaaaatgtggaagggccgtacccgcactctcctagcactgggtgtgaggcagcgtcgtttccccttcgcgctcttcgaatgtcaagtgcaccagcttccaatccctcctctgggcgggcccggtctggctaatctcagctgcagattccagtacaaactcaggactctcccccgcccagccgcccctacacaaggactcgccgaacacaccttgaatcccgcgccagagcgcagcccggaactgcagctcgcggcgcgggcccaggtcgggggtcgcgcgtctccagtcggtgactcaaggccgctcggtccgggggtgggtgtgggtcggcaggaccgaccagggccgcgcgggggcagctgccgggcgttcggtcacctagcggtgggagccgaggctggctttggccagtcgccattccgccgcgggcgtctgtctcgccgggttcccgggcgcgggaggaaggcccgcgccgcttcccactcggcgcgcttctctcccagtgcgcagtggcctggtgggtcagccggcggcggctggagcgcggggccggccctgcgcacgaatgaatgggcgcccgggggacgcgcgcgctcggggctgaagggcattaggaccgtgaggatcgctccgcgatcctgtctctccctatcacccccccgcccccccacctctctcctttttctgctctgcaggactgagcagctaggcgcgagcgaaaacaaacagctggggctgcgagcgcccccgccccggccccgagagcacgccggcccagtcccccacctggggcgcccgtctgcccaccatgaggaagatccgcgccaatgccatcgccatcctgaccgtagcctggatcctgggcactttctactacttatggcaggacaa

SEQ ID NO: 12595 - DNA, 2300 bp, Homo sapien
tggaacagaaatagctgaagcccagactttctgaataaacaatggaaaaatagtacatttaacatgacatgcaaaaccaagggttatcatacccttctctccccatcaagaactaaaccactttgactaaaagtttcagagggtttgacataaaaacggaacttggtgacaagagacgaaggattaactctcacctgtaataacctgagcagtcaaagcctttgttaaatcgatttaaaagccacagaaagcatcatattagattatttgttatacagaagtctttgtaagctagctactcaaaaagtttcaacgagtcatttaagaaaaaataattttgtagaaaccacgtgcattcttgcaacagaggttgccctatacactagctatctcaactgctactataataattgtattccaattctaatgcaaattaaaggactaatttgaaagggtaagaatggaaaaagctatacagcatgttgctttttatatctagtcttaaaatgaacaccgggcaaagtttactattttcagtacttactgcccaaagacaaggattaaaaatcactaagaacataacatgatacattttaaaaactgtggtcaagtggttatcatttttaaatggcaatgctttcctgctcaaattctttacagattataccacctctcaagccagttttggtcactttcttcgaattggagcttactgatcatcccggttgggttctaatagagctggtctctgagctgagcctacttttcagcctccagccccaagaggatataaatacagataagtacaggatcgagggctgagggacgcgccacacgcaatacctagaggtctcaaaaacaggaaaaaaaaaaaaaaggcagagcacaggaaaacgaaagctgaaaaaacactgcaaagcaaatacgtcctctcctggcccacatgctgggtatagctggatctgtcagcttcgagaatagttagacaaccctggcccattgttcctacagcaggctagagcatttggagggaaaaataccatatccggcagggcccggtggctcacgcctgtaatcccagcactttgggatgccgaggcgggtggattgcttgaggtcaggagttcgagaccagcctggccaacatggtgaaacgccgtctctgctaaaataaaaaaattagccgagcgaggtggcgggcgcctgtaatcccagctactagggaggctgagacaggagaattgcttcaacccaggaggcagaggttgcaggggtctgagatcccgccactgcactccagcctgggcgatagagtgagactctctatctcaaaaaacaaaacacctcccccacgtctccctctaccgagtaacaatcgggagagagttcatcctcaggcccaaggcacgccggacccgagcgagcaggcgggcgcgcaaccgcagggcggaccggggctccgaggcctagagtcaggcctggcgtccctgcggcgggaagaagggtcaatccaccgactagagtggcggggagcatcacgcggcgctgcatggggctcgtggggaggggaaaacgtatggggctggggtcgctctggaggccggggactcggactcgggtagccgcggaggcctttctcaccatcgcgccaaactctcttcgctacagcagctgccgacaccgccgccgttacacgagcttaactacaacgccgctaacagccaatcctcgcgagaggagccgccggaagtcgtcgaaagtgcaacgcaaaagagccttttggatcatagaggcacagtcacttccggcagctagagcagctactgactctgtttcagccatcttcgataaaggcaaaaaggtaagggaaagtttccaagctttaggaagaattattttttttcaagacgctgtcttccgtactttcgttattaaacatacggctcaagtgatcaccggtatagacagtgacatcagacatctttcattagccctactcaaaaatggcggcaacgtaagtatcctgggccggaggtcggttgtaacccggaagtgcctttgtaaaggagggggtggttagacaatccggaagtggatggaatgaagagatgccacttggcggccatggcagctgtagtatcggcgactccgggtcaaggcccggtcgagtgcagtaccatgggcagcaccgggtatagggcagagacagctttgtgtcaactttgctgctgaacccctaggacccatcgttagagacctgcaggactcctttcctcatcccaggctcggaggagagtttg

SEQ ID NO: 12596 - DNA, 2300 bp, Homo sapien
tgcccaaagacaaggattaaaaatcactaagaacataacatgatacattttaaaaactgtggtcaagtggttatcatttttaaatggcaatgctttcctgctcaaattctttacagattataccacctctcaagccagttttggtcactttcttcgaattggagcttactgatcatcccggttgggttctaatagagctggtctctgagctgagcctacttttcagcctccagccccaagaggatataaatacagataagtacaggatcgagggctgagggacgcgccacacgcaatacctagaggtctcaaaaacaggaaaaaaaaaaaaaaggcagagcacaggaaaacgaaagctgaaaaaacactgcaaagcaaatacgtcctctcctggcccacatgctgggtatagctggatctgtcagcttcgagaatagttagacaaccctggcccattgttcctacagcaggctagagcatttggagggaaaaataccatatccggcagggcccggtggctcacgcctgtaatcccagcactttgggatgccgaggcgggtggattgcttgaggtcaggagttcgagaccagcctggccaacatggtgaaacgccgtctctgctaaaataaaaaaattagccgagcgaggtggcgggcgcctgtaatcccagctactagggaggctgagacaggagaattgcttcaacccaggaggcagaggttgcaggggtctgagatcccgccactgcactccagcctgggcgatagagtgagactctctatctcaaaaaacaaaacacctcccccacgtctccctctaccgagtaacaatcgggagagagttcatcctcaggcccaaggcacgccggacccgagcgagcaggcgggcgcgcaaccgcagggcggaccggggctccgaggcctagagtcaggcctggcgtccctgcggcgggaagaagggtcaatccaccgactagagtggcggggagcatcacgcggcgctgcatggggctcgtggggaggggaaaacgtatggggctggggtcgctctggaggccggggactcggactcgggtagccgcggaggcctttctcaccatcgcgccaaactctcttcgctacagcagctgccgacaccgccgccgttacacgagcttaactacaacgccgctaacagccaatcctcgcgagaggagccgccggaagtcgtcgaaagtgcaacgcaaaagagccttttggatcatagaggcacagtcacttccggcagctagagcagctactgactctgtttcagccatcttcgataaaggcaaaaaggtaagggaaagtttccaagctttaggaagaattattttttttcaagacgctgtcttccgtactttcgttattaaacatacggctcaagtgatcaccggtatagacagtgacatcagacatctttcattagccctactcaaaaatggcggcaacgtaagtatcctgggccggaggtcggttgtaacccggaagtgcctttgtaaaggagggggtggttagacaatccggaagtggatggaatgaagagatgccacttggcggccatggcagctgtagtatcggcgactccgggtcaaggcccggtcgagtgcagtaccatgggcagcaccgggtatagggcagagacagctttgtgtcaactttgctgctgaacccctaggacccatcgttagagacctgcaggactcctttcctcatcccaggctcggaggagagtttgctgggactggtgggctggtttcctgctctggggggcggatcaccttcggggccgcctcttggagacaggggcgcctagggaacgaacaggttcgcttgagtcacttacccgccgccgcctaagacattgtgccaccctcaatccgacaatcgaagaaatcgatcattcgcacattttccccattgacttttcccatctctgttaacccacgagaatctaatgactggcatctgagaacccagagcctgggaccttagattgctgtaagctttctctggtgctaatatcagcaaaaagggtctgttgccgggtacgttcaagaggaaggtgcctcgtgaacacatctgctggtgggaaggcctaaagaactggaaagcccactctcttggaaccaccacacctgtttaaagaacctaagcaccatttaaagccactggaaatttgttgtctagtggttgtgggtgaataaaggagggcagaatggatgatttcatctccattagcctgctgtctctggctatgttggtgggatgttacgtggccg

SEQ ID NO: 12597 - DNA, 2300 bp, Homo sapien
agtgctttcatctatccctcttcccgggaccctcgcttaacatctgttcaaggtgccaatcaaattaacgaaaatgtcaaaacgtattaaccaaaaattcattgctaagcaaatagatttgaaacaacttcagaatatcaattccaaggctccccttctttaaaaggaaatgtgagttaagaacaatcttagttttttcttacattcattctagtacagacatccaaaaaacaaaacagctttcctcagaaaggtgtgtttgactttctcaaaaggaagttatcatattgatttcagttcatgtagaaaaataacattctccatttctttttttttcttttttggagacaggatctcactctgctgtccaggctggagtgcagtggcccaaacacggctcactgcagcctcaaccacttggggtcaagcgatcctcctgcctcagcctcatttgtagggacaaagtcccgccacgttgcccaggctggtctagaactcctgggcccaagcgatccttccacctcagcctcccaaagtgctgagattacaggcgtgagccaccgcgcccagccctccatttattttcttgataacaatctggaatcttgattccatgaaacctctgagaatcaaaagaaatgttatggtgcctctctccaggtaaatgcacagaacctcaaatttttgtaagcaattctaggggattcagaatactccaggatcttccgtggaatatctatccaccccaggttaagaattccactaatgaatatgaggtttctttctattattaagtgtcatgtatcttttaaaaaagatagtctttcttaatgagaccttcagctttgagatttaactagggaagcagcttccctttgcaactaaaactactatctcacagccatcctgacagctgacagaaaattgagaatttcttacctctgagaaattaacagccaagggaatgattccggccacgtaacatcccaccaacatagccagagacagcaggctaatggagatgaaatcatccattctgccctcctttattcacccacaaccactagacaacaaatttccagtggctttaaatggtgcttaggttctttaaacaggtgtggtggttccaagagagtgggctttccagttctttaggccttcccaccagcagatgtgttcacgaggcaccttcctcttgaacgtacccggcaacagaccctttttgctgatattagcaccagagaaagcttacagcaatctaaggtcccaggctctgggttctcagatgccagtcattagattctcgtgggttaacagagatgggaaaagtcaatggggaaaatgtgcgaatgatcgatttcttcgattgtcggattgagggtggcacaatgtcttaggcggcggcgggtaagtgactcaagcgaacctgttcgttccctaggcgcccctgtctccaagaggcggccccgaaggtgatccgccccccagagcaggaaaccagcccaccagtcccagcaaactctcctccgagcctgggatgaggaaaggagtcctgcaggtctctaacgatgggtcctaggggttcagcagcaaagttgacacaaagctgtctctgccctatacccggtgctgcccatggtactgcactcgaccgggccttgacccggagtcgccgatactacagctgccatggccgccaagtggcatctcttcattccatccacttccggattgtctaaccaccccctcctttacaaaggcacttccgggttacaaccgacctccggcccaggatacttacgttgccgccatttttgagtagggctaatgaaagatgtctgatgtcactgtctataccggtgatcacttgagccgtatgtttaataacgaaagtacggaagacagcgtcttgaaaaaaaataattcttcctaaagcttggaaactttcccttacctttttgcctttatcgaagatggctgaaacagagtcagtagctgctctagctgccggaagtgactgtgcctctatgatccaaaaggctcttttgcgttgcactttcgacgacttccggcggctcctctcgcgaggattggctgttagcggcgttgtagttaagctcgtgtaacggcggcggtgtcggcagctgctgtagcgaagagagtttggcgcgatggtgagaaaggcctccgcggctacccgagtccgagtccccggcctccagagcgaccccagccccatacgttttcccctccccacgagccccatgcagcgccgcgtgatgctccccgccactctagtc

SEQ ID NO: 12598 - DNA, 2300 bp, Homo sapien
tgccaccccaggagcacacagctgtcacccaaggcacgtcagatgcatgtgccaccatgttcccttgaaaagtgcaagcctgtgtatgctttttcctcacatttgttacctgcaactcaaagtcaggggcccttgactggtgaactccagaccacaggctcctaacacaagttttctagctttcatcttagaaaagcaggacacctgtaatcccagcattttgggaggctgaggtgggaagatcacttgtggccaggaattcaagaccagcctgggcaacataatgagacccccatctctctaaaaaaaaaaaaagaaagaaagaaaaaaagaaagaaagaaaaaagaaagaaaagaaaagcagggctcctaaagtgggaagatttccaagcattagaccatgtgtcagaaatagacaaaaaatatacagaaaatgtccactttgtactctggccccgggctctcatcatcttcccagtcccacctcctcccacctgatggagccaagccccgggccctgtgttaaggcttggcctgagatgttctgcatgggggcctgagccatgagagaagtgcaaggaattcagatgggcacttcttgacagtgagcaacaaggggatgctgtctgagcttgggaaccccagagggggttaagggaagagtaccagggtgatgattagctagagtcataaaatggggagatctagcatggccttggggaacatctagtgggcgtcacacatccaaatgcctgcagaggggccaggcaggtcagacaataggggatgatggggcctgtggggatgcgcctttaggcattacattcaaagacttaagtctactgtgcagaggtggtaagaatgatacaagtggttgttgttggggggctgattgactataaaggggcatgaagaaactttctgcaggtgatggaaatgttctgtctgttgctttgggtggggttacatcttatataccttcatcaaagaaataacttagatgtgtgcattttaccatgaagtatacctcaatttaaaaacttggggcaaattcataaagcaatgtggatctggctctcgggctaaccatttgtaaacttctgttgcaatccgacttccagaggcgtccttggctcctcatcttggaaaagcgcgactgcggcgtggtctggcgggcggccgctcactgcgcggtctccacgcctggcaggtggcgcggggcaggcagctgtgccagcctagcatttccacctgccgggaggaggcggtcccctggggcccggccggcatctccctggcctgaaaatgagccggtcaccccaaacgccaactccgaaaggagcggaagcggatggaacagctggtcccagggagcgcgggccaggcgcgcagataaatcacggacacacactgcacggatagctccagactggcgttgagtgccaaatgccgacacagacacggtcaggttccaggaagagaaatccgatccgatgcgcgctaggcggcggcggcggagcacagtgaaacccacctgagggggaagggttggggggaacccaatcttgatggagcccctccccatgcgggcactttgggcacttcctgaagtcctacctggccacccgcctgcccggggcatcaggcatcgccacttcactggggagaaaagccagaccgccgcagttcacggagcggtaggaattgcggtggaattccaggccggagtgtgtgaccctacgccctagctccgtcctctcctccaccccgaggcgagcaggtgtctgcaggagtgcctccaaccccattgcaaagcggacgtggccctcgtctcgatgtcggcgctgctcgccgagagggaccccggggtggtgttgggcgcgcggggcggggacggggacgcgctgcggccaagtccccgggccctgcgacccgcagggaccttctggacgcacggagcccggccctccagccggcgcccgccctgattggcgcccgaggccggcctcccgccggctcacctgccactcccagccaatcggggccaccagaattggggctgtcgccgggggggtgggtggctagggcgggaggggaggagatgctgccggcccgaggctgagccaccctccccgcggagttcccgcccggccctctgcaatccggagcccaagccgccggctacgcgccctgcgcccccttggtgccgcgtccagtgcccagcgcgctttgatgctgcagctccgggccgggccgctctgcttctctgctcgctgggacgctctccgacggctccgccc

SEQ ID NO: 12599 - DNA, 2300 bp, Homo sapien
gtggagctgctgccacgggccctggccgacctggtgcgagaggctccgggccgctccatgcgggtggccaccggcctgtatgaggcctacgaggcggagcggcgcgccaagctgcagcaatgccgggccgagcgcgagcgcatcatgcgcgaggagaagcggcgtcttttcacgcctttgagccccgcggccgccgccgccgccgccgccgccgcggcctcggccccgagcgcgggcagcagcagcagctgcagcagcgccagcctcccggcctcgcccgcgccgcgtgcggcccgcaaggcttcccctagtccctcctccgcccggacccaacctccgccagcgggttctcgaacaggcaggaagagccattcgctggactcactgtcccgccggcgtgagggcgccctcagctccgagtcgggcgcatcgtcgtcatcctacagtggggaaagcttgagggagctgcgctggccgcctcgggcctcggccaggaacagctgcccagcggggtcggcgtcctccaccaccaacgctccgggccgcccgtctgccctgaccctggttccgatcaccggccgcagcttcagcctcggcgacctgagccattcgccgcagaccgctcagcacgtggagcgcatcgtgcgtcaagtgcgtgcagagcgcggcctgcgcggggtgccggagcgtgaccggaagatcgcggcgctcatgctggcgcggcaccaggaggagctcctgctgctggagcaacgcgcggctgcccacggccagtgggagctgcagcgcgtgcacgccaagcagcggcgggagcgcgaggagcgggagaagcagcgcgccctagagcagggccgccgagcctgggccgcgcaggtggaggagcggcgaggccgccgtggccgcgaagagcgcgaggcggcgcggcggcggcagcggcagtacgagcgcagcgaggagcggcggcgggagctggccgaacgccagggcctcctgcggcgggagcgggcggagcgcgcggcccgggaggatcggctgcgcaagcttcagcaggagcagaacctgaagcaacgtgaggaaggtctacaggaagggcgggagcgggctgagcagatccgcagggagcgcgcccagcgcgcggcccgcgccaagcagcggcaggagggccagctgcagcgggagaagcgggagctgagccgggccgagcgggcgcgccacgaggcgctgctacagggtcggacccggcagcagcgccaggagcgagagggcctgcggagctcgctggaagccagtttgggccgtgcgcaggagaactacgagcatttggtggagcagcgcacccgggagctgcgggagcgggcccggcgagaggagctgcagggtcggcgggccaaggaggcggcagagcgcaaagagcgggaacatcaggcgcacctggaggcgctggcccgggcgggggagcgacggctgcagcacgcgacgcaggtggccgaggaagcagtgcagcagaaggcgcggcgcgtgggccagagccggctggagaaggaacgagcccagcgcgccaacaaggagaaggtggagagggacgaagactgccgccggcgagagctactccaggccatcgggcgcaagctggagcgcagcgagcagctgacgcgggaacggcgcagtgcgctggagagcgcccgctccacagcccgggcttccttccacgtgcgtgagaaggtgcgcgaggagaccaacacgcgatccttcgaccgcatggtgcgggaggcccagctacacgccagcctggaccgcaaataactgcggctctttgccagccagattggcacgcacagccccctggggcctccctcaaccactgaccatcgtgggagtccccgctcggtgcgcagcgcggtggcctctcgaggcttctgaccaatgaggcaacaacagtacagacgtttgggacctgtcagctggccccctttgtttttaaaacttacttcatttggagatgacagcacaatctgcccacatccacccttgatggctcccgcaccgacccttgccaaacttccctatgtgtctcttgggctggaatagagaagcttgggggaaaggggctgatcaggactggtgagagggccccccaggagagggcagaggtggttgtccccaccccttctgcagcagttgccccaggcacctgttcgacattggtgtctgagacagtgttgctactgctgagggaacatcaccctggctcacctccatctttcaaaatatggcaagctgcacaaatcgcggaggcctcc

SEQ ID NO: 12600 - DNA, 2300 bp, Homo sapien
ctttgagttcattctgtggaccctgaaggtctgggagaggattttttttttttgagacagtctcactctgtcacccaggctggaatgcaatggcacgatctcggctcactgcaacctctgcttcctgagttcaagcaattctcctgcctcaggctcctgaatagctaggattacaggcatgtgccaccacgcctggctaatttttgtatttttagtagagaaggggtttcgccatgttgtccaggctggtctcaaactcctgacttcgtgatctgcctgccttagcctcccaaagtgctgggattacaggcgtgagctaccgcgcccgactgaggatttttgggtagtgatggacagatctgcatagggtctcacaagggattttataaggtggcagttcttgtatgaagttactgagcctcttaatggccaaactgacttcagtgcacagccaggggctcagttactttggcagttgatctgacctgaaccatccatgcctgctttcttccctttcctttctttctttttctccttcctccattcatcttctccaattcttcctccatccctttcccttgcttccttcccccttgtcccctccctgagccttgggtctgcctggcatgttcctgctgcccacactgatttggttgtgctctgaggcagacccaggtagttctgaattgtgcttttcaatcttctagtggtctgggcagtgtggccccaaatgagcaggaagggaggggtgcccatcttctctaatgagtctggacccaagaaggcaaggaagaaagaaggcagaacaaggatagacttatgaaaaaggcattatagcaacgagccacaggttgctgtggggcccagaagggaagggttcttttggggatgggtctgtgtgcatggggaggagcatcctgtttatttggttcaagctacttcacaaggacatgccctgttaattcacagtgcttttcccgaaagcctactagaactaggcctggtgagaggccctgagaaggtgtatccttttgtccaagagcatctgggagaagaggcctgcctgacccaagctgcagcaaagacacaagtctgtaggtccagatgtggactctaccactgatttacaagtaggagttccttaacacttatggaggacctctgagaccgacacggtgcaaggccctggggtacaaagataaaaagccagagtcctccccatcaaggcgccacgggccctgtaaacacataaaccgaggacacactgcatgagagatcaccaataaacgatgtagccatacagtgcacaaactgctcactcagtatgtgctagaaaatagccccagaaggcaaggctcaagaggggaaatacagttaggaatgtggcaggcttctagcccgggctctgccagtcctggctctgaactgcggttttctcaaccttgagatcccttgtgtgcttttagtatgctgaaggatcactcacttcagaatgctagtgaaaatacagattcccaagtccgaccccactgaatcacaatggctggaggtcattcggggccccgaatctgcattttcacccccacccaccccccgggcagctttaatgttggcaggctaggaaccacagttcggattactgcttaacagggagataataacctgcttcagacgagctaggtcagacgagcaattcaagagctaacaaggcaacatgcgccaaaagccttgtaaacctcagggcagtacaattctttgcaaataatagtaattcaatcatgcaaataataataatagtaaacgaactggagagcgcactggaaacgccgcatagtccagctgagtcggtgccaccgccccatccactccagcgcagagggactgtctctttaaggaccccccacctccccaaccgcgtcgcttctcccttgggtacctggcccggccggcggcgcgtgcgtgcagggcctcccggcggggcggtcgcggcggcgcgacgccggcgccgttgcgtgcgcgcctggccctgcccctttcccgccccttccccgccccctcccctccgcggggcctcccccgcccgcgcggtacagctgggtcagtgacgcgggcgctgcagccgtcgctaccgccgcgttctattctccgaagccggcgaccgccccacctcctccctccctcccgcccgcttcctctgcccacagcgccggccagagcgagctagacaagggcacgcggggcctcgcctagacccgagaagactgcgggcgcgcgcaagcggcggcgtggaagctgtgagc

SEQ ID NO: 12601 - DNA, 2300 bp, Homo sapien
taagaacaataaacaattctcattgcctgctattttcatctacttaacccggaaaaataaaattatttgttgggactttcagtattatggatggaattgtgcccccttccccctgttcatatgttggagtgttgaaatcctaactctcagtccctcagaatgtgatcatatttggagatagggtctttaaagagggaattaagttaaaataaggtcactatgatggccctaatgcaatataactggtgtccctacaagaagaggaaatggaagaagatgtgaagacacagggagaagacagccttgtataagccaaggagagttttggaacagattttgccctcacaggcctggggatgaaccaaacttgatgacatcctgatattggacttccagcctccagaatctaagaacataaacgtttgttgtttaaacgatagtctatggactgttcaggctgcccggtctatggaagattgtaaaggcagccctagcaaacccatacattcagtctcagaagtgggagctggaccagggcttcttcccacaacaagaacccatccaggccaggtgcggtggctcatgcctgtaatcccagcactttgggaggctgaggtgggtggatcacttgaggtcagaagtttgagaccagcctagccaacatgatgaaaccccatctctactaaaaatacaaaaattagcccagcatggtggctcatgcctgtagtttcagctactcgggagggtgaggcagaagaatcacttgaatctgggaggcagaagttacagtgagctgagatggcgccactgcattccagcctgggtgacagagtgagactctgtctcaaaaaaaaaaaaaaaaaaggaacacatccagagaatgggcaggcagccagcatggaaggggctggtgagggaactagtgagaaagggaagaaaacacccagtggggcaggactttgaatgccatactaaggatatggatgtgattccataggcaaatgggagccgttgaaggatactgaagagaagaatggtgtgctgtcagtgtaacataacgggaaagaacttgatggacaatggattggagtggacactaactggaaagaccactgtaggcatctggtaaaagatgttcattagccctcagatgatgagagcacaaggtgggcttgacttagctaggaagagttgacagaattgctcatgtatttgggaaaatcattcaggcgaaggggtcttgagctttgtggcggactgcatggaaaggaatgagaaacagacaaaggagtcaaaaagtctgcttatgtctatgcatagcaaggagaagaaaggcgggaaggacagaggaatgaacaaattgctttgatttggaaaagagtgtgcagggaacctgtgcagagggctgggacacatgggtctgtggactgtgaccaggatgcggagcagggtccatcacacttgttcagaggggaggaccaaagcctgtttcaggaaattgcttctggggtgaaatggaagtggtgtgtctcccacaggaagacgtaagggaacttgaaggaccagagtatagcccacctgtgagaggcagtaatttaaaaccctctcatttttctccatggccagatcttggaggcaccatgcccacggctctgccaggtctgttgcaggcctagtttttcattcctgggatggagtatggaggctgcggtgggaggatcacctgagcccaggagatcgaggctgcagagagcagtgtttgcgccactgcactccagcctaggcgccagagtgacaccctgtctcaaaacaagcaaacaaaaaaccaaaacaaaactaatgatgcaaaattttaaaattgaaaaaaaaagaagaaaatacagggtccacgaagaggagtggatccaccccgtcttctttccctgctgccatgccctttggcaggcagccgtccccacgcccggaaagccccagcttcggctcagcccacagcacaagggcatatccttctgcctgcgcaggccagggtgctcgacgccctcgcggtccgcctgcgcgcccccacgcaggctcagcagcgcccgggcctgcagcagaggccggaggaagcgccacgggcggctcagacctgaggccgcaagggcgcgccgggcgggcagggcggagggtccgatttcctccctctgaacggaaaaaaagccactttccctgggaagaactcgaagaagttggatgtctgatcttcaccttggatttgtggtctcggcccgcgggcgactcaccccacccaccaggatccc

SEQ ID NO: 12602 - DNA, 2300 bp, Homo sapien
cgtgagccaccacgcccagtcagcaccatttttttttttcaccaccagaaaatcttttccagattactttttcttattgcagccaaaataaagtgtagttgtttgttccttctccagtcgcactggttcactttactagccttaaaaacaaaacaaggccgggcgcggtggctcacgcctgtaatcccagcactttgggaggccgaggcgggcggatcacgaggtcaggagatcgagaccatcccggctaaaatggtgaaaccccgtctctactaaaaatacaaaaaattagccgggcgtagtggcggtcgcctgtagtcccagctacttgggaggctgaggcaggagaatggcgtgaacccgggaggcggagcttgcagtgagccgagatcccgccactgcactccagcctgggcgacagagcgagactccgtctcaaaaaaaaaaaaaaaaaaaaaaacaaaaaagtggtagtgagtgaaataaaaatagttgctttcacagtaaacataaatgtagaaagtaatcggaagacttgtttattatgcagaaaccaaacaaatgtaattaaataccaactggtttgggacaatttgtgcattataaaatgccaatgttcatcaggccaacaactaggtaacatttttttcttttcattgaacaaatacattaaatacatattgtgttataaacccatccttaactcccacattataggtaactaacttcactgaggctctttttatttgtacatataactatgaatggacaagcttatcccttacaaactatccaagtttcagttctgagtgcctaaaggcccctgaggtcgagttaagggtcagttgctctccttccggaactactttttctctgtttaactctagttgcaagcatgcaactccacattccaggcacttctcaaaaatggggtgcactgggttctacataaaagcattaaagcgaagttaagcaatctctttatgcctaagtttctaggtctaccaaccttatcgggacaacgcgggagttaatatggagggctgtgttttacacccactttgaaagcacggcattgtctgtttctaaagaattgtaaactttcatgtgttacattacagaaatctgaacggagaggattaaccaaataccatttggacttaaaagcagcttgaggccgggcgcggtggctcatgcctgtaatcccagcactttgggaggccgagacgggccgatcacgaggtcaggagatcgagaccatcccggctaacacggtgaaaccccgtctctactaaaaatacaaaaaaattagccggtgtggtggcgggcgcctgtagtcgcagctactcgggaggctgaggcagaagaatggcgtgaacccgggaggcggagcccagatcgcgccactgcactccagcctgggcgacagagcaagactgtctcaaaaaaaacaacaaaaaacagcttgaaacctcttccagccactctcccagagtgacggacatgcagaaatctgtattccagcctcaattcaagacagccttctagctgcagtcccattttcaacatttcatcagtgaaaatcctttcatttaaaaaatacttcagtgccttagtcttctcaccacaacaaaaccacacagctgtggcatggttgaaaaaagaactcgaacatctaggagctccctgctttgagggcaaatttaaattgcaagcagcaagagctaaggaaaggccaggtatttctgcaaagctaagtttctcctaattagtaatcttctgggtgtctaagaaaaactttagatacaagaagggttgccacttttctcaggagactcttctgggagagatgatgatgaaccgaacgccaaggacttagcaggggcgaacgacgtcaacagatgtccctccagactccggcaccagccggccgagcccaaacgagttctcgcccccgaccccacccaccgcgggagcagggttcggtcactcgcagtgtcagagaggcccacatcctcctaaatttccggccctcccaaaacttccgtcttccctaggtccaacggggtggacccaaggcccaggggcgtccccggaagtgacgtaggacgcgccctccattttgtggagcgccagagctgctaagtgcgtcagttgtggagtggcgtagacgagttaagtcctggtctgcgtggaggtcgacgactccgtcgcagactacggacctgtctgggtctcagccgccaaagaccccgtccggtaggtgagtggctcactttgagggcaagccttctcggatc

SEQ ID NO: 12603 - DNA, 2300 bp, Homo sapien
cgcgccctccattttgtggagcgccagagctgctaagtgcgtcagttgtggagtggcgtagacgagttaagtcctggtctgcgtggaggtcgacgactccgtcgcagactacggacctgtctgggtctcagccgccaaagaccccgtccggtaggtgagtggctcactttgagggcaagccttctcggatcgaggcttcttcatggccgctcagatcgtgagcggccggggctgctctctttgcggaggatggcgtctaatgagcgcagttgattcgaggtgggcgctggggcacgtctcccttttggcatactgtttgaggggtactgaggtgaaagggcggtcactgttcgggtcgtttttacacagcggttgtgcgcccgtccctgccagtcttaatgtcttcatctcctggacacgtagaatagtgggccgggatctccctgactttgctggcgatgcggctgggccttttgtagggcggccgcagtgacccccgagaagggggttgctgggaggagaagggaagagggaatttggcacgcgcagctctgctgcctttgattccaccgccgccattttgtggccgcagagcgcccgcccgctgctgttggcgcaggcgcggtcgaggcgtcgcgagattctggcttccacccgctgtgacgcgcccgcgaggccgccattgggctggctttgcggagggcgcgggcggctccgcccgcacttctcggcctttcctaactgcggcagatgggagggggccggagagcccggagagtgtgcggctgcgcagttggaaaggtggcagtgggcgttgcggttgctgcggtctgggcccagtagcggaccgtgttgggagggagctgggttttcattttgtctgcaggtaacctggcctcattagaggctctgttggcaatctcgttcataacatcactgtgtaaacattttatgccgttgatgtttttgattgtttaatcaggcgtttctctgtgacagtcattgctattatctcgattgaattactttctaataggaagtactagccggacatcatgagtggctgtcgggtattcatcgggagactaaatccagcggccagggagaaggacgtggaaagattcttcaagggatatggacggataagagatattgatctgaaaagaggctttggttttgtggtaagtatttagaactgggtgaattatctgctaagtaggtagagttttgataagcagttgttttcgatcttgagtccgggtggaatatttgccttcagaaaatgttacccagccttatgtctgaattttattgaggctgaaaacaactttaacttgccggctcactggaaccccactcccagtggctccttgattaggtttgactgtatggcagtgtcgttaagatactcttcccattctgtctcctgatttcagtgctcttaatgtgttgtagaatactcttctaaagccaatgttaagagtcttatgcttacattttaggaatttgaggatccaagggatgcagatgatgctgtgtatgagcttgatggaaaagaactctgtagtgaaaggtgagattcctgtgtaactagataaccctgggacatagagcagactgggtctgctggcatatttttctaagtagatttatgtagcttaagtgtgtaacggagatttttcttccctttttgtagggttactattgaacatgctagggctcggtcacgaggtggaagaggtagaggacgatactctgaccgttttagtagtcgcagacctcgaaatgatagacggtatgtgaagggtggatggctgcattgaacaattattgtaggggtagcatttaagattcaggagtcattagcagtgatgattttgggtcctgccgtataatctgttcttctattcccacgttagccagttgttcttgatgaatctatatgagtcatagaacacaaatctattgacggaagtcattagaatggcttgtgatatctgatggcttgaacttgcccacagttgaacacaagtgctgtcattgcatttcttccattgtgaatacgaattttcttcctcagaaatgctccacctgtaagaacagaaaatcgtcttatagttgagaatttatcctcaagagtcagctggcaggtttgttgaaatacagttttgagttattttgatgtggctttttaaaaaagttaatgggtagctaatgttgtattgttttattaaaagtagttttaaattaatggatttaatggaattgtaattttaaacatttaattaaatgtaatttgg

SEQ ID NO: 12604 - DNA, 2300 bp, Homo sapien
ctcacagtaggaggtggaaggattttgggttcctgagaagaggtgaggaggaagagttgatagagactacgtggtttagaatccaggttacaaatgtgttcataggaactcttcttctctttggatgtgcacaatagacacatgcccagaccctgatctttaacagatattggtcaattcctcctcaccctttggcatcaggcaaatgtgtaaaaacctaacgtctccctttgacttcaaggcctcatgtacggttgcacaagacatctgtagagtggcgtccctagcattgtgtagtgcccaacctgaacaggtgtacctggcagccctgcatggcctccaccctcacgtgcttccatattgcattgtgtaccatctggccatctgtggtcttgtacagaccatcaggtccctgagaacaggaacatgaattatatagttttttttatttatttatttttattttttttgcctcccatggtgcctggtactcagttagtgatcaataattctcccctagcaactctgttcccttctgattagccccagggagaggaagcagcctcctctgagactcaaccctaccctgtgggaacgctcagtccaggcatcacatccagtgcccagtcctctgcctgccctccctttgataccagcccaactcaagcaccaggaaatcattagcagagactctcaaaggaaaagaggcttcaagttcatgtcacccagggccacagtatacggccccgcaggctgcccaccgcgcaagcccagggagcagccttttcatggatatgatgcaatatgtatggatcctgccatccaacccttatccaagcaggattccagaggcctcaaggccattcttggagagctctcattttcaggtggttccttgcaccaagccaaaatctgtccccacctccacccaacagtggttcacaccctggtccctattctgccctctggagtcctacatacaaagcctaatcacctgtttcagaccccacccaggcctcctaggttccaaccaagccaagaagcaattgtgtttctgaaggagacccctcctcccttgtcccacctctgcagtggggatagatggaaagagcaaggcctaggataacctcacacactaggtggccccgcccctggcatgcccacctctctctgcttctgctccacgccccaagcctggctcccagcctgaaacacacaggcccagtgcaaaagtaaagcaatcaggaagtcaggaagaaaagactgcattcctgcttccttctcagcaagttttgcaagcaatgggcctcctcgggcacaaagcaatctccacagccagggttctctcaggttgcttttcggggaaagagcctccaagcttcctgagagcccacccaccatcccagctggttattccctctgatggtaagcattccaggtagtgtggagcagccaccaccagtattcctccctgggactcatacagtcccagtttggggataaaacaaacatttccccagaacaggcagggaggatactggcatcctctcagctcccaggaaaagggtcatggacacatcccctcctggaggccagtgacattgcctgtcccacacccccttggactatgctacctgtatctaggaaccaaaggcaacacccagctcctttcactctcatgggttctggggacaaatgataacccactggacatggggagggcaccttcccccaaccaagaaactaaggaatcaagagcggagctgggaaaaggagctgcagggaaggagatgggctggacctagattcaggtgggccctgggcaggtccccagtaactgaatgaatgcccatgaggcacactcagtggagggcaaaggggagaaataagcccagaagcagcaaagtgacaagggaggagtacaagtagcacccaggaatccagcagaggtcagggagcttgggagagctagggcaggcagataaggttctgggctgttcctctttggggcgacagccagagaaatagctcagatagttgcataacccttctatttgcccagagcttttgtccagaaactctctgtcctgagaggtgattaaagaaggcatccagcaagaactgcacaagaaacggagtcagccggagaacaaggagtggtcttccactgcctcacaggaggatggaggcccacaacgcgtctgccccattcaacttcaccctgccacccaactttggcaagcgccccacagacctggcactgagcgtcatcctggtgttcatgttgttcttcatcatgc

SEQ ID NO: 12605 - DNA, 2300 bp, Homo sapien
ctattcatggtttagtctgactgtttacaactgggttcctagatgtcctggggttctatggaggtgcttctaagacgccttaaatacttagaatttaaccaaagaatggccgggtgcagtggctcatgcctgtaatctcagcactttgggaggccgaagcaggtggatcacctgaggccagaagttcgagaccagcctagccaacatggtgaaactccatttctactgtaaatacaaaaaaaaaaaaaaaaaaaaaaaggccaggcgcggtggctcatgcctgtaatcccagcactttgggaggccgaggcaggtggatcacgaaatcaggaaatcgagaccatcctggctaacatggtgaaaccccatctctaccaaaaaaaaaaaaaaaaaaaaaaaagccgggcctagtggccagtgcctgcagtcccagctactcaggaggctgaggcaggagaatggcatgaacccgggaggcggaggttgcagtgagccgagatcgcgccactgcactccagcctgcgtgatagagtgagactccattaaaaaaaaaaaattaatcaaagtagaaaatattttgaccacataaaaatggcaataaccaaaaaaataacagcaaccttggggcaaacagcagtcttatggagaccaccagcatgtgatcgtgtgtgtctctgccagcctcagcccagctcctcctgctgtccctgggtggttatttgcacttgtcatgaatgtgccttggttggaaggctggagccctgcagacccacaggtctatcagagggctcagggccttaccttctgtatgttcacctcatgaggaaatcgtggggtgtgtaagaagtgaatttgtaacacatcgtggtgtgattccattgtattatggatcactttagcacctgtcttttatttttattattgaggtatggtaaatacctcttaatagaaatacatttcagtaagtggcaggatacagaatgctgagtactaaccttccccaccccaagcccacaatatcctgtaacctgtggcccctcagctacctggctgggaagttccctcatgcctttagaggaggatttcagaaatgtggagagaaggaagcatgaggatactcagctttttcattgaaactgaaagcagaggaaagtactgatagctttcaagaccagaatctaggccaggtgtggtggctcatgcctgcaatcccagcactttgggaggccaaggcaggaggactgcttgagatcaggagtttgaaattagcctgggcaacataaggagaccccatctttacaaaacaatgaagaattagctgggcttggtggcgtgtgcctattgttccagctacttgggaggctgaggcaggaggatcccttgaacccaggaggtgggggctacagtgagccatgatggcaccactacactccatccttggcaacagagtgagactctgtctcaaaacaacaacaacaacaacaacaaaaacaaagaccagaatctaaacagttgtctaaacagcaaaagaagagctgggttggggaagggaagagaatcagagggaaagctggagagaaacaaagttcctgcaccctgacctactatcccacccaaggtcacaatcctgggttggagacagtcaccagaataaatgtggggactctgaggccagagaagacctgtgctccttcccaagcatggcctggggaagttggctgagatcctggagtaccctgtctggtcagctgtcattgtgtctgacgactgctggatggagcattggggcagagaggccacaagttggcaaagtcctcctccttgagactcccgtggctcaataggtacagggagccaaaggcccgtgggacgtgaccaactcagcattccactgagtctatatgatcaaacagcaaactgtttatcatgaatacagaatgtgggcaaactcacgaccgcgcctgccccagaaggtttgctgagggcaatcacttcctggcgccaagctccttgaggttatctactgggacatctagagaatgcagtcttgtgagactactctggacgagcagctgaccccttcttccaccccccttctcactatctcttttgcctaataaatacggagggctgtgtaaaggtcagggcccttgtccactagaggcaaggtgccccctgaccccttcttccaaatatacgcttttgtcttttattcctgcattcgcccgctttgttcagtccccctaggtccatgtgggttacatagtggcgccgcagaacagggacttcaaggacgtaaa

SEQ ID NO: 12606 - DNA, 2300 bp, Homo sapien
atcacatgatggaagcagaattagactccaaaaaccttgccttgagtctcggcgtctcggctctgtcatttgccagccaaatgaggccaggcaagtcacaatctcatggagtattcacttatctacctgtaaagtaggaatgtctgacctatttcagaagattgttctgaggataaaatgagatgaggcatttgtcctgtcctcttcaaatgccatattgtgatacttttcacttaattattttaagggctttaaagactccatctcctttacttttgacaacatctcatggcaggggatactatttttatccccattttacagagagaaaaacgggaccctggatgagtcaagtgacttcttcaagcttataccactaggtggcagactcaggatttgaaccctgctgtacagctccagagtctgtctgaccaaagcactcattcccagtggaggaaaagatagaccattcttttagaagtgcgcttcatttttgtttggagaaccacaagtactttgttattgttccagcatccagtctgagctttcttgtcagagggcaatggggagaggggaagtcgtttaagcagggaatggtgagttccggtttgctgcttaaaaggatcactggcttctaaatagcgaatagacacactggctgccgtgtggaggttggatggggccagtgtggagagagggcaaaactgaattcaggagtcaggtgcgaagctgtttcatggaatccaggagagaagccctgagggagcagagctaatcttaggacctctcagaccagatagggagggggagtgtggcactgatgcttacaatcaaattatagaaaagaatccctccctgcgaagtagcccatactgatggaagtaagcactaaaggttgttctccacataaggagatcgctctgggtttcattttgcgcccccccgcccccttccctgtgatttcctggagatgtcagtctcactgaaggcagctgagcaccttgctctgttgaggagccggtgtgatgcagctgtgaccattcccaagatggccttccggggatggccctgggcagagccccccaacatctgactgaagctccgctgagctgtcctctccaagagggtcgggcacccgggagagatctcctctccttgttctaccccatctctgggatctctgcatcctcagactgccgcctcctcatctatacttttcctccttgtctcccatcaggggaccagggcctctctgcccgcctcttccagagctgctgggctatagagaggctgccccttgccctccagttcagagggggaagctaggatgcctgagttccaatcctggatcatacggaccatagggctgggagatgtgtgtgtgtgtgtgtgtgtgtgtgtgtgtgtgtgtgtgtgtgtgtgtgtgtgtagggggttaccgtacccaagaggccctccccagcggccaatgcccagcacacgcttcaccttgtcccttgcgacttctcccggggcagccgctgtgagactcaggatgtcacctcccagggagagtctttgaaagaagtggatgctcccattccccactccaacgccacagcccaccctgtgcgggtcatccagcgacttcccagttactcttcccagatgcagcagggaggcagatctctcggcgccttcgtgtcacagcattctcatctgataaatggggctaggagtattttccctgcctacttcaccaggatgttgggacaatcacgagcttgagctaagaaatatacatgcttaaggcattattattagccaggtgagccttctggtgggtgccggctgctggggctctctcaggcttcctcgggcaggagtgccgggagaaagttactctttatcccactctctcccggggcctactcccgcggagctcctcggcggggggttgaccacgagtggctcctcttgcccctctcccattggctttcacctgccagagggtcggcttcaacaggcctcttggcccgtcaatcaggcccgccgtgctccgccccgcccctcccgggggtttataacgggaattcccatggcccgggctcaggcgtccaacctgctgccgcctgggccccgccgagcggagctagcgccgcgcgcagagcacacgctcgcgctccagctcccctcctgcgcggttcatgactgtgtcccctgaccgcagcctctgcgagcccccgccgcaggaccacggcccgctccccgccgccgcgagggccccgagcgaaggaaggaagggaggcgcgctgtgcgcc

SEQ ID NO: 12607 - DNA, 2300 bp, Homo sapien
ccaaggagggactggttttatagctgggatgtggtctgtgtatttatggacaggttcgggccctctttgagtttggccagtgtggggtgtgtatttccagtactcccttgaagggtgtggtactacctctgaaactttctctgctgttctagaaaagggtcaacaagttctcatctatttgcttcacacaaagggcccacaaatacattagagacagagcttgtgttcacaccttcccaaaacctctatgagcttggtttgattacatagtcaactctatgattaccgatggcctgatttgtgctcatgacattgccattcattattgtgggacattcattccctcaacccaatctgatgaagagcctcattctgtgtgctcaggactctgctatatgggagtagataagggtggacccaggtctcaaggcctgtacaatctaatcatgggttatggagcagaagctcatggattgtaatagcccaattattgttctccaactgtattctgttgttgttaacagggggttccctgatataggggttcatggttaagtaactggaagatgcttcattgtatatgccccttgatctggtcgattgttgtgtaacaaactaccacaaaacttaacggcttaaaacaatttattattataatctttctcagttctgtgggttaactgggctcagctgggtggttctgactttggggtctctcatgcaattatttattttcatctctctgagttgcaattagatgacagctgggactagactcacctgaaggcttcttcactcagcatgtctctgtgcctgggttggttgggcatttctctgtctgcatggttttgacatgggtaaacttgggcttcctcataatatggtggtctcagggttgttaggcttcttacacagcagctggtttcctcaagagtgattattacaagaggcccaggaaggagctgcaaggcttcgtgtaacctaactttgaagtccccagacaccactcccatagtattttcttggtcaagcaagtttctgaggccagtccagattcaagggagaggaaattagactccatagctcaatgagaggagtagcaaataatttgtagctgtctttaatttactatgcgtcttggaggttcacaatgcataagaatgtatcagagtcatctgagaagcccttcaccaagaaaatctgcttaactcagcattttccaagctgattattgttgttattttaaaaatcaggaaatctgtttctcacagaaaattatttaacttctgtattctgccagagagaggtgggcaaaaattggagggatgatagatttggagctcactacgatctaataaataaaactttcccgagatggaatttggagatttatggtatattcctgatttgaggatacacccaaatagaggctgcatggccatctgcatggatgaagaggctggacatcctagaggataaagctttgattttacttctgacagatttaggttctaattcagcctccactgcttatagctatgtgacactgggcaagttacgtctctgggcttcagtttccttgtctacagaatagagtttctatttcatagggttgttgtgaggactgagatcctggatgtgaattacttggcacaatgcctgttaatggtcagtaattgttagacattattgttcttatgatgcatagaggatgccttccttggttagactttgtggctgctccgttcccttcacctttagggttttatttgggtttattagggacttactttctaaaggcaaacaagtactgtaagtcatggactcgcccctacttttcttgcaaaagtaacctctgtaccctttcacttttttccaacctagtttctaataagtgaccgtgacccacagtgcaacctccactgctccaggactcaacccaaacccatctgtgcctctgatggcaggtcctacgagtccatgtgtgagtaccagcgagccaagtgccgagacccgaccctgggcgtggtgcatcgaggtagatgcaaaggtgagtgtgtgcacccctgcccagccaaggagaggttcctgggcaccccagctccctcactatgcatttgcaacagggaagcttggagtaagtctgtccactcactttgctttcctatctctccaccccttccaccagggccaagggaagaaagcctggtctacctgaaggaatgagcatttttctatctttcaaacactgcccccaggctagggcttaaagagatgtgctgctatctggccagcgcttt

SEQ ID NO: 12608 - DNA, 2300 bp, Homo sapien
ctcctatggttcattccagcttctgttttgacaaagcctaacacctggataacccagaaaggactcagaaaatgggagcgatgatggacacaaatggattttgtgattttgtgattttgcatctaccatttaatctgctaaaaggtttttttttttttcatttttaatttagtggctggcaaaaaactgaatgaggcttttagtccaaccatttttccctgcctgctttttgtgctaatctgtttcactcacaaattccattgacatcttgttcttagcctccatggtaggaattgtgttcctgatgctgctttatcagccccaattttggccataagtttaagcccaggaccctactgcagacaccttctaaacctcagcagagggcacagtggggccacaggtaggatccacttacccttagccttcctcttgacctctatcctagccatgcttactgctgccattccatgactgtgccgtgtcatgctttacccttgtgcctttgaatgtgctgttcactttttgtccatccttcaatatgaagcccctcaccaaagtaaatcatgatttcatcttccttcaagatcctacttacctgttacattctctgtgaagtctttcccaattcttccaggctgagttaatgtttccttccattgtgttcccatggcattctgtttaggtcactcttagagtgttcagggcataggactgccattagcatttgcactttggtgtccacatgcatcataaacctcttcccatcacttggcttttagaaggggcaatagtacctacaatgtgatcatcaccctcctctccacacctgggttgtttgtaccagaagtgaacatttgacacaaagcacccagtccataggcactgtgactgccttctacaaaggattctgccttctcagaatggccctctggagatggagagttgaccatattctcttgatagagaatttgcactcagaggaaaagagggaagttccagttcattgtggtgatcaaagctgtgaggtcatgatatagtgtcagggctggtgactgtgctgggctatgtgcaagaaaataaatcagaggaagcaccttgggagataaaggaagaggatgggcccaatgggcagagggaagcaagggtgagagaggccaggtggcttgggggaggtagggaatgtgggctcagttcctgatggctttcaggctcctacggcctggctgtgcctcctgccttgggttccacaagatcctgccaccaggccttcgcagtattgcccctgttctttgaacaagtttagtgggcttcttgatcacttgccccatgtagactgtgagttcttttgtttgtttgtttgtttgttttgttttgttttagagagagtcttgctctgtcgcctaggctggagtgcagtggcacaatcttggctcactgcaacctctgcctcctgggttaagcaattattgtgcctcagcctcctgagtgactgggattacaggcatgtgccaccatgcctggctaacttttaaaaattttagtagagctgttagccaggcttgtcttgaactcctggcctcaagcgatccacccacctcagcctcccaaagtgctgggattataggcatgagccaccatgcccagcctagactgtgagtttcttgaggtcaggaactatgtcttgctcttctttgtatcaccagagtgtcattcaatatattcaacatgctcctaaattttttgttgaatgaatgatgagtaaatgaatgagtgaagacatgtctgttggtaataggtgcagggcactgttttcctagctggagtctgtcacggccaatgcctttctgatacagaaacctccttcctccataattaccacagcttttactactacttacatcttccaacttcgcaaagtccaggttttgacaagtggcattttcctgaagtatttttgcttagaatatactgggtctgacacattggcacctgagtgtgagaggaggtgacaccttcacctgagtcacgtctcctcacaagaagcccacagtggccccctggacctttcactgaagaaacacaggtagaagcaagctgtatgtagagagatatagtatagcttttattttttttttgaaccaacccaacatttccactggcaactgtcaacatagcttatgacatgagcactgtttcttttttaattatttttttcttaaaaaatgtgtttaaaattaacaggtgttttttaatttcttcccccccccccttagaaaatgtatttatgtcaatgcaga

SEQ ID NO: 12609 - DNA, 2300 bp, Homo sapien
gaaggacagcaccacggacagctcccagacattttaggattgccttctgtgtttggtgcccgaacactgagcaaaacagcgaactcaggaagtctccacacactctcataccatcttcatgcagtccaactaagaaaattcttacataaaatataaggctgtctgcttggtaatttaaacccttggcttatagtcttttcagtgaatttctttccttgcaaactcgagagttggagtctcacgactgcccttgcttcaccaattccccagctagagacaaaagaccttcttggcctctgacccattttgtccttgagattatccaaggactacaggattcccctaggaggtttactgtgtggaatgaaagcaattaaggagctgaataaaagaaataattgcatgtgagaatgtggacttggatgggaagatgtttaaatgagctctgaaagaaacaagctgccaagagcaattttctaattaaaggggaataaaaagattcaatctctatttcactctaatccagaaaacatgtcttcatggagaagtgctcttaaaatggactcatcagccaaagtggaaaaacaaaaaacaaaaaaactgttcaacatgagaagggaccattggtaaatgagtcaagatgctgtgaaaccagtagacatttcctttgaataaatgtacttctgcaccttcaagaactcttacaggaagtggttgaacaaacaggcccaaaagttcaaaatagttcaaggtcaaaacacttgccctttcttcccagttccccaacatctcactgagtgtcttgagaacttcacttgatgctatttctcaggagatgtttaggtcaggttgtccacccaggtataaaagagaaagaggaacgcttatcccagtctgcaaggcacattctcatggtctggttataaagtgtttagtacttcataaaaaaggcactaaaaatatatataaactccccattcccaagagttatttgctttgtacccactgcccatgcctaatactctgagctgtatccttccagggaatggaaaaggtgttaaagcgagtctgattttgttttgttgcagatgtgacagacaggaagctgactatggaagaagaggaggccaagaggatagcagagatgggaaagccagtattgggtgaacaccccaaactagaagtcatcattgaagagtcctatgagttcaaggtcaggcaaacagtgaggtctaattgaataataaataaattaaagtgggaggcagaagacctggggtgtttttttccactttcactagtgaatatgtgaagttgaaactgaacaaatcacttacccaccccaggtctcagtttccccatttgtaacatgaaacaaatagtgctgaccatttgtatgctaggaatattgttaggaaacataatatagaatgtgaaataagtggactagaaagtcctgagatgtattatcattattgtttaactgtgtttttaaagcaaaaatattaaaactcactactacagggcaagatatattaacatcattattattattcattattgtattattctaaatagccaatttcaaaagtcacaaccaggccaggcagtgagggactcacgcctgtaatctcagcactttgagaggccgagatgggagggtcacttatacctaggaatttgagaccagcctgggcaacatagggagactccatctctataaaaaataaaacaaaataaaaatcagctcagtgtggttgtacatgcctgtggtcccagctactcaggaggctgaggtgggaggatggcttgagcccaggaggttgaggttgcaatgagccatgattgcaccactgcactccagcctgggtgacaaagtgagaccctgtctcaaacaaaacaaaacaaaaagattacaaccaaaaacaaagggaaatagaaggattgcctcaaaagagatcgcccaaggccattccatgcgtaactgtcagaacaccttggagacagggcatctttcattcctttgaagaaccagactcctcattggttctgagcattctaacctcatggttccaagtttttctcttcttaacagactacggtggacaaactgatcaagaagacaaacctggccttggttgtggggacccattcctggagggaccagttcatggaggccatcaccgtcagtgcaggtgagaagtgtctcaggctggccttgctgggagaagcaggcaacctctgagaaggaagcgtaaagccacgttaacagcctgccagtccctaggaaggcttgtgtg

SEQ ID NO: 12610 - DNA, 2300 bp, Homo sapien
ctaagtagggtcacccccccaagaaattattttaaaaaaattgaaatctgatatttttagaaaatcttatcaaggatatttaattggactatttacacctatttagggtcagtcggttttggacaagtatgcaggggtcttggaatcagaccactggggtcaaatcctagttctgtcacttcctagctgggtgaccttggacaaagttacctgacttctaatagcttcagattcctcatgggcaaaatagaaatgctactagtacttaatagtgctctgagaaggattcaatgagaaggattaaatgtatgtaaagcacagtgtttgcccataggaagctgttatttataagggaggggagcatcctaaggtcctccgaatttaggagaactaaaaatcttacactgacttctcccttcaacagcaccttcagaatctccttcatttttcatactgttctttcaaccctttgatgaatgagaaattaggcattctttccctgcagattttcccaaaccttctgctttggccaataaacatatttttagtcccaatcttgcatgctcctttgggacttttcatctgataaacatcccctcctgtgctcttgaatccaatacccttcttccctgccctccacccagagtctccttgtatctgctgttaggcacaatgatgaccccaccaaggtcagacaatggctgtggcctcacctggaccttgatgacccacatagcctagagcccagggatcagccactgatggaggcccagagggcagttggaaaacttcacaagacaatccagcctgattgttttgacatgcctgacttcaggctgctaaaaatgagctcgaggaatcagataggaaaaagagataggtgatgcaattttattccatctcccaattttctgagtcaagagttgtttgtttaactccagttaaattagtatttatccaaatttcctgggtgcttgtccaaagaaaagtaccccagatctacaaattagaatctgggactgggacttaggaattggcacttttacaattataccagatgtttctaatatgggtacttcaaccactacccttatagaagtgctgcctaggaccctctcttctggcaggtgaagtggaaggaggttttgtcgaagggagattctccacttcaacttgagtgtctcggcttgtatccgctttgtttggttctatttcaccaaaggctttcatcttcacataaattttcttcagctttaaataattagttttggtaaccattggtatactggaaagaacattagatttggagtccaggtggcttgagttcaattctctgctctgccatttaccagctgtgtgacattgggcaagttgccaacctatctatgtcatttcctcatgtaaagataatcccacttcaccaggccacttttgaggacccagtgaaatgatgtgtaaccattttaggaacactggatcattctacagtgcaattttttacatcagcttggagcctaccatgtaggcattcaaatccactgagtgtatggagctccgtgcacaaataaaaggacttctcttttctgcccgtgtacaactttggtttccttaatcaatagaatccatgacaatcctgggccatggtataaagatgggactttcttcctgtgaaggagtctggtctgaacatcttccaaactccaacataactgatgtcatttctccacccaaccccatttgctgtctcctgactcaattgctagagaagccacttaaggaaggttcctggagttaaggctgtgtctgggccagtgtagcgagcagttttcaacagtcagtcctctttatcttctcttttcctgcgagcctttactaagcactgcctcctcctgtctccttactgcatctcctgatggaatgcacaggtaaatctccttggagagtaccagccaggaacagtccacagccaaggccaccgatcctcaccgctgagctccatctttcctttcaagctgtccttcccctcccctccccaccatcaccatagcaacacagtggtataaaaaaatgaaagcgctaaggcatctaaatatagtctgagtatcaactcttccagcatggagccgaaaacctagggaatgacagctagaggcatccagacgataactggcagccaggagggtggataagtcaaaggaaggggtcaaggaaagaggggaaggaaagggaaccatcacttgctgagcctgctgcctgtgctttctcatgtcacccgcacgacaacccaatgtgaatgttat

SEQ ID NO: 12611 - DNA, 2300 bp, Homo sapien
ccaagagataaccactaccattttggggtttttatgctgccagggcattcatccccaccccgccacccccgcacatgctgtgttacactgtgttctggggttttttttctctctgtctacgatatattataaaaacctttccacaccagtacacagaatgctgcatctgtatttttacagtggtagaatacagcattatgtcaacaaaacatgtttacttcaccaatttgttgtgttggaaaattaagatgtttccaatttttcactcttaaaaacactaccatgaatatccttgtaactaaatatttgagcatatccttaatgattgccatagaataaatttcttccagtaaaattactgggtcacaggcattcacgtttttaaggaatttgatgtatctttcaaaattgccctacctaaaaactctatcaatttaggtgcccattagccatctctttgtctctactgtagactctcaatgtgtagactcagcattgtgactctccacgggagcagacacaaggtaagtcccagtaactgacatatcctgagatcccacaactttagaagctattgaaacctttcaaagtcagtcccagccctaactttaaatgaaattcaagacccataaaggttcaggggtctgaaagcactcctactgctcctactgagcacatccaggattctgactccggactcaggccagaaaccaccacacagcttgctaacggaacactgagtcaaaggaccagcaaagacctcctgccatctcaggcttagagattccctagtctctacacccccttaatctgtttgaaccaagccttgctccagagcagccgggcaaaggagccagggatctcaggagtcacacacactgttgacgtctcagcacaactccggttggttgcattttatttcaatccttggctctgctgcacgtggccttgggatggttatttaacctaaggctcaatttcctcaacaaaaaaatggagttggtaattgtacctagctcacagagttttagtaggatggcatgaggtaatacaatcaaattcactagcaccactcctggcccttaaaaggtgctgctatttggtaagtattattatcatttgttggcccctcacacttagcctcaggcagcagagaggcctgaaagagaacaacttcctgcccttacattctgacttttctgcactggtgtcgctacagaaggccagccaccaggctcattttagatctgcctaatgccaccgataagctgagggcttgaaaccccattcttaggagtggcttgcccaccccgcatgcctctaggaccaagcctgacaaatatagcagaaattacaggcatctgatttaaggctacgtgtgtacacttcgcctgagccaagccccaagccctagtcccgctgctgcatcaaaggaccagctctcttccagcctccaggcccagagtaagcagcaatttgggaggcagccccctcttatttttagctttagaaacccgaaaagccaacataccagagctcacccaagcgtctctcacaaactgttgtttgacttgggttgagaaaatgacaggctgggttctgcaccaagaagagaagaaaaaaagagggggaaaaaaggagttttcttttccctccgctgccaatctccatccccctcaactcctcccctaggcctgggtggaccctgcctgggtaatagttccctgctatatttaaaaaccacagatgtgtttggtggagacttaatttcggaattgcaggcagcgtctcctgaggacaaggggaaagccggtgccgcgcgcccgcctgctgcctggagctcccaactcggcggaatccaggtcaggacgcgccgccgttttgacgtgctgccggccgggaggcgcgggcgccaggctccaacgactagggtgggtggccgcggggcaggggttggatctgaattcgtccctcgggggctctggatgcgggatgcgggatgcgggatgcgggctcgacttcctcgctgctggtcgaggagcgttctgagagtctcccctccgcgcgcgaggataaatatgcgcggcttgtcagtcagtgcggcgctgtctcccagctgatagggtgacgttccgtttggaggcttggagattggctttttgatttggcttcttccggcagcttaatgggcaaagctctccgctcgcccagaaaccagcctctccgcgcgtcccctctgcgcgcggcgaggccgagacgtctcccgcggtgacagcgtgcaaggcggagacccggcgcgc

SEQ ID NO: 12612 - DNA, 2300 bp, Homo sapien
cctgtaattcctactgttcacagttactccttcagggccatttcaaggttctcaataaatgcttatttgagtgattgaacaaacaagatactaaagacatagagtgccttaaattggatagatgccttatctgaaaagtgtaagattatcgactctagcattattttgaatatatgtatacgatttaacccattattagctactacttaggtgccgggttttgatggagtagtatccagtaggctgatgttttatgtagtgaagatgtaggaaaacgctagagttttagagcagcgcctttggcttctaggatcttagggaaagtaggagatgtgatacgcttaactaacctggatgccacgtgagatttatttatttatttttgaaacagggtctagctgtgtcacccaggctgcagtgcagtggcatgatcacggctcactgtagcctggacctcctgggctcaagtgatcttcccacctcagcttcccaagtagctgagaccccaccatgcctggctaatttattattattattattatttgtaaagatggggtcttgctttgttgctcaggctggtctcgaactcctgggctcaaatgatcctcctgcctcagcctcccaaactgcaggtattacaggcatgagccaccatgcctggtctgcatgaattttgaaatatcaaaaggaagtaaataagatgggagagatgcaccgttcctgggtttctggaggtattgaaatacaggttgatgtgtagagtggtggagcaaactcctattccatctccttgcttcaaaaacccatttaacatattttccttggatagagaatgtgtcaaatattaaactgttaagaacagatactacacttgatcttagccaaaaggataagtttcactggagtagcctgcagtagatctggagcttctcttctggagaccacttaagaggctactttaataggtgaaaagatgataaggaattaaaaaaaggaacatttcagtggtaacagagaggcagggacagatggaaatatttcaggaatagcatggaagataatattccgcatcacctgcactctgattcactctggtaaatgggacacgtgggggatcggcttcctaagctatcccagtacttcacacatgtttgtttctgtgcccatgaaatcgccagtgtctttaaggtaaggatcatatatttttatctgtgttcctagaaccctttcaaagacacgctgaaaggtggcctgtatggttgctgaatcattggtaaatagacattcataaatgactaaagattacaggttatctcacagtaaaatcattagcattaaaagttcagtaatgactgatgagacactacactgattacatttcaacctaatctttcaaaagcgatttatttttaaaagtctccattaaactggcaaattcctcatcccacaaatagccataaagactggagtaccagcttcaaaatacttttttttcttttttctttttgagacgaagtctcgctcttgttccccaggctggagtgcgatggcgcgatctctgctcattgcaacctccgcctcccgggttcaagcgattctcctgcctcggccccccagtagctgggattacaggcgcctgccaccacgcccggctaatttttgtattttttttttttaatagagacggggttttaccatgttgaccaggctgatctagaactcctgacctcaggtgatctaccggcctcggcctcccaaagtgctgggattacaggccacccacccaggccaccgcgcccggcctcaaaatacttttttccttagctgattttatcgagtggctatgtgcctaagggagtgttctaagcagacgttagttaggacccagaacgtgggaagtactggtttccagatcaatttggtggtgatcgtaaaccgattcaaatctctaaatcccaattgcacgccgacgttacggaaccaaaaacgctgacgcccacatttctgggcggacgcacaagtatgttacgatggctcgattgcttttgcctagcggaaaccattcactaaggaccgagcaccaaataaccaaggaaaaggaagtgagttaaggacgtactcgtcttggtgagagcgtgagctgctgagatttgggagtctgcgctaggcccgcttggagttctgagccgatggaagagttcactcatgtttgcacccgcggtgatgcgtgcttttcgcaagaacaagactctcggctatggagtccccatgttggtgagtggagtgaggaggatcttccg

SEQ ID NO: 12613 - DNA, 2300 bp, Homo sapien
ccccatttctatttgatcttttctctcttgacattccaatgtcatttattttattttatctatttattttttgagatggagtcttgctccgtcacccagcgtagagtgcagtggcacgatctccactcactgcaacctccgcctcctgggttcaagtgattctcctgcctcagcctcccatgtagctgggactacaggcctgcgccaccacgcccagctaatttttttgtatttttagtagagatggggtttcaccatgttggccaggctgctctggaactcctgacctcaagtgatctgcccaccttggcctcccaaagtgctgggattacaggtgtgagccaccccgcccagcccccaatgtcatttatttatattacacatttttttaatttatcattctctgccttttataatgatcattttattcactcatccaaccaacatatgaagagctactatcaatcccattttaagatggggaaacagagttcagagatgttggattccttgctcaaagacagacaagtttaagggaatggaatggaaacttgagcccaagttgtaagtcataatctgtgttatttccactatcccatcttttttttttgagacaaagtttcgctcttgttgcccaggctggagtgcaatggtgcaatctcggctcactgcaacctccgcctcccgggttcaagcgattcttctgcctcagccccccgagtagctgggattataggtacctgcaaccacaccgagctaattttttgtatatttagtggagacagggtttcaccatgttgaccaggctggtcttgaacttctgacctcaggtgatccacccgcctcggcctcccaaagtgctgggattacaggcgtgagccactgtgctcagcctccactattccatcttaacttctctcagagtgagcaaataagaggtcttcctgccgaatctgcccctatctccttctgtttggtaaacatagtagctgctgctttggttttttactctaaatttaaatgtctttacattggccttgcactttctagtcctctaagatccccaccaatccctgtggtctaactccaggttgcttcacaaggttgtcaccttcctggctctttaggcttttgtgtttttgacccctgaagtttcattcaagttcagtttggaatgtctcattccaaaagtcaggaagactggcctaaagttatacctaagccatgcgttaaccttattgtaagagttaaaacattaaaaagattgaattttcccagttgccaaaagaatgagacattcccccacccccctttcttaaaacattttcttgagcaaattgtaattataatccgtgtgtagtgtgtgtgtgtgtgtgtatctttttaaaagctaaataagcctcttgtcagataaaacccaggaattgttttcgtcaggtcccgggagccaactccttgaaatttaagtatcaaggtagacagtgcccctatgttccaggctcgcgggagttacccgaagcgccttgctccaagccgtaagtacctgtttgtcacagagataacgttttatttttcctttggataaaggcaattaaccaacacaggcggccactccaacggtgaactaccaaaaattgaataccaaaccatgttaactcgtcttacatgagaagatgcgtgtgctttggctacataaaatgtgagatttttgtctctctttgcaatctcattagtggattgcctgtaacacccattccggtctggttcgatgcttacagaataatacaccttttttttcttttctacatttgtggagattttctaggatggcaggagatttttttaaaattttttttctcgacaatatcaatttatttaggtcccttacttttactagccacccccttcccacttgcttccaatggcaaattagaatggtaacttgccccttgctcacctcatgcttggctttgggaaccggtgagaaactgcaatccattggcggtaggaaccacgattcccagcattcccagtgctccgagtccttcgggcttccttttccgggtctcgaggctgctgaaaccgaaaccgctgtgctgtgggcgcagcgccgagattgattcaccttcacctgtgctgcactccagctgacccaagtaggaagccagacgagctgtaaaacatgaacggaagagtggattatttggtcactgaggaagagatcaatcttaccagagggccctcaggtatgtgcggaaagggtcatatctgacagtaggggattagagggtgtaattgca

SEQ ID NO: 12614 - DNA, 2300 bp, Homo sapien
cctgatgcacgtacaagatgaggggcccactttaagaaaaataataccaagttacaattgcagaaaataagtatgaaaatgaggatttatttagcataagaaagaagctgcaacaaattataaatattaaaaggttgaaaacaccataaacatcacaaaatttaatcccctcagtattacattaatcaacttcctaactcacttttatgataccttttccctatagtttttaaattgcttatttaattacctcccttaagagaattattttgttataatttctacggcaagaactgaaaggcatttgcctttccctagtatgtttaataaaaattcattttgtattattaatagtttagaaaagaaaattcagcttcacagcttgttattggtaatgagataaataattaaatttactattgtcaaattttagaaaacctctattaagtcttttatgtatgcgatgtaatatttcagggtgtttgagatttttcttgtatagtgactaattttgattactcataattatatgactttcataaagtccattgctgagccccttacagggtctttatagaggtctgtacagtgaggatccctgaagcataaactttgtctggttttgatcatattatattataattatctgttttttgtttgtttctacacatgctcagtgcttactagcctcacttttgacagtcatttgagactatgatgaaatatatggatactctcctcagcaaaaaaagtcatgaaatacataaaatattgaatacaatattactgacctcctaaagcttattcttgctcctgccacagtttctgcactaaattgataatttatttaatgctctgtattttgattttctttctctaatatctagcacaatgtcctgcactttgtatgctccaaacacataaagacttgtttaataaatagaaaaagaaatggataagtgttgccagccagactgtatgacaggtgcagaaattccccactttcaaaaactgttggtaaatatatttgagcaaacactcagactcttccctggcgatcctaaaatactagactctacaatggtttttgccctaataagaaaagagttccttttcggaagacctttaaactgcatagattctcattttctcttctgaaagcatttcgttttgtctttgggactctcctgtagctaactggagagaacaacattattctctccatacccttaaatgatgtcagtgtttcatgaattttcttttctaaaaattatactacaatatgaacacattttagtagcattcacttataatccaagacattttgcaatccctcctccgtttttccatttttcattgtacatagagctatatgaggcattacagaggatactaaaatgaacgaaaatcataaaccctgcagtcaagaatctttcagtctaatgaagttatgagtaaagatgaatacaatgaggaatagtaaataactttgagataaagaaactaaagtatatcataagactgatgcaacttgacacagaattgtgattatttttgatgtctccagttttgatagtcaaaggagacactatcaatagatattgcaagggcaacaggcataaactaatattatcttggacaatttgatatatagagtcaccctactcttaagtttctttacttttgcttttactttttattatggacattccatactgcctgtaaagactgagataactatttaagtacccatcttccaacttcaactattatcaccacgtggccaatgttgtctcctctataccccctaaatccccaccctcatttactaaaagcaaatccaaagcattttcttgattcatcaaccagtttttcactacttcattctttttctctcctgattccttacttatcacctttccaacccatctttttatttttacttccagcactgcagttctgatctaactctgccaggacacagatccacagggtcagccctgcatcctgagcagcttagagggagaagccagaccagcagtgcctcacaccttgtcctcttctgctctggacagatggctccataacgacagcttcataatggcagtggatgggaccctcgtgtacatcagagtcactcttctgctgctctggcttggggtatttttgtctatttccggctactgtcaggctgggccctcccagcatttcacttccccggaagtggtgatccccttgaaggtgatcagcaggggcagaagtgcaaaggctcctggatggctctcctatagtctgcggtt

SEQ ID NO: 12615 - DNA, 2300 bp, Homo sapien
tatctcctttggttttgatttgcatttctctgatgattagtgatgttgagcattttttcatatacctattgaccatttgtatatcttctttttaaaaatgtcgattcaggtctttttgcccattattaggttgaagtatttggtttttagctgttgaattgtttaagttctttatatattctgtatattaacctcttgtcagataaatagtcttaaaatttttttacattctgcaggttgtctcctcactctgttaatagtttattttgcagtgcaaaagtattttagtttgatataatcctgtttgtgtatctttgctttttttgcctgtgcttttgaggtcttatttttccaaattcttgaaaaattcagcccaatattgggaaggattttctttatgttttcttctactagtttcatagtttttgtgttttatatttaagattttaatccattttaagttaatttttgtatacggtgagagttagggatctggtctcattcttctgcatagaatatccaattttgctagcatcatttattaaagagactgtcttttctccaatgtgtgtccttggcacctttgtcaaggatcagggttgttgatttgtttctgggttttacattctattctattggtctatggatcagtttctatgtcactaccatgatgttttggttacaatagctttgtaatatattttcaagccaggtagtgtgaggcctccagcttcacactccaatggaatcttttatgatttcacataaattttatggtttgttttttctttatctgtgaagaatgtcattggtattttgatagggattgtattaaatctcattgctttgggtagtatggccattttaaaaacataaattcttccaatctatgaacacttctacttatttgtatcctcttcagtttctttcatcaaagttttatagttttcagtgtagaaatctttcacctgcatggttatgtttattcctaggagtttgctgttgttgtagttgttgttgcgattgtaaataaaattgttttcttgatttctttttaagatagttcactattagcatattgaaatggtaataatttttatgttgattttgtagcctgtaacttttaattgaatttgtttattatttctagaggttttttggtggagtctttagggttttctctatacaagatgaagtcatctgcaaacaggaccaatttgacttcctcttttccaatttggatgccttttacttctttctcttacctaattgatctggctaggacttccagtaaaatattgaaagtgggccttcttatttggttcctgagcttttcccttttcactatgatgttagctgggagtttgtcatatatggtctttattgcgtttaggtgcataactctatacctaattcgttgagaaattttgtcatgaaaggatgttgaatcttgtcaaattattttctgcatctattaaaatatcacatggtttctgtcactctttcttgtaacgtggtgtagtgcatttgttgatttgtgtatgctaaatcatcttgcatcactggcattaatcccacttgatcatattgaatagtcttcttaatatgctgttggatttggattgctaacaccttactaagaatttttgcatgtacattcatcaaggagtttttgttggcctgttgtttttgttgttgttgctgtgttgtttggttttggaatcagggcagtagtggcctggtaaaactagtttggcaatactcattccttttcagtttttctggaatagtttgaggagaataggcattagctcttcaaatgtttgtagaattcagcactgaagccattagttcctgagcttttctttgatgaaagactttttattactgattcagtttcctcgctcatgtattactgattcaatttcctcactcatcactggcctgttcaaattttctatttcttcataatttaatgttggtaggttatatctgtccaggaattgatccctttcttctgtgttatgaaatttgttgtcataatagtctcttatgaccctttatattcctgtactatcagttgtaacatctccttttcatctgcattttatttatttcagccttctctctctttttttcttagtctagataaaggcttgtggattttgttttttaaaccagctcttcatttcattgatctttattttagtctttttttgtttatttcttctctgagctttattatttcctttttagattgccaattttgccaattttgagtttggtttgttcctgcttat

SEQ ID NO: 12616 - DNA, 2300 bp, Homo sapien
ctgggttgcatgacagcctgtatccccaacacccatcccaggtttcagcaccaaatgtaagaagtaaagaaagagaaaagaaacatgaaaagtggctcaacagtcaaagacaagtttattttggagaataaacctgagaggggcttctggacaatttttttttttttttttggttaggagtgcttgctcctatggactaagagtttttattggttttagggtgagagagtttatcacaggcttggaatgtttctgtgtgggggagaagtttatggcagggttggaatgtctctggctggaggggaggttatcttggggctgacatctctccagctggaggggaggttatcttggggctggcatgtctctggttggggagaggtttatcttatggttggaatgtttctggttggagatgtcatttgtggtttatggtcatgctggccttagccattaggctgatgcactttggatttaggtagtttttgatcaaggtgaaccttaaaatggtgatgcttttataagacagcgatgctcctgctctgtaaatagctctttgtagttatataattttctttttaaattctgtagtcattaagggacatacactgtgcaattctttttttttttttttttttttttttttttttgagacagagttttgctctgttgcccaggctggagtgcaatgttgtgatctaggctcaccgcaacctctgcctcctggattcaagcaattcttctgcctcagcctcctgagtagctgggattacagatgcccaccaccacgcctggctaatttttgtatttttaatagagacaaggtttcaccatgttggtcaggctggtctcgaactcctgacctcaggtgatccacctgcctcaacctctcaaagtgctaggattacaggtgtgagccaccatgcctggccccaattcttatttttaggatttgctgatacttccattatgcccatggatattatgtattttggtatatgtcccatgcacatttgaacttcataactgtgctgcaattgttggatgtttttacatgtgtacattaggttaatttgattaacatttcttaagttttctatttccttactaattgttttttaaattgttctatcagttactgaatgaagcgttttataccaacaagtagactttgaagttttctatttatccttttatatctcttacaatttcgtttatatattttgaagctattttgttaaatacaaattcctgttgaatttcattctataaagtatatccactttatttttgttgctgtttcatcatttctgttattagtatggtttctttggctttcttttgctaatatgaattagtaaaatgttgcaaatattttggagtagaagttatttccttccaattcagatttggaactttttgctctggagcgtgttgagatctgattcttctttgcatctagagccaataaggggtggtaggagtatgtcttgaggagtctaggcatccgttttcaggataagttccccagctgagctcattgtaaggtctcaagcttgaggtgcatagacttctcagacaggagagctctgggctctttcactagtaaaggagactaggggatattttggaatgtttacatgtttaaaatcatccaaattcaccaggaattctctatttcaagtctcaaagttttcccccttcccagtcagtttcttccctttcccttgacgtatctatgtattcaacttatgttgtcactctgcaagcatttcaattaaattttgttttcagtgagcttggttgtatggttaaaacaaaggagagattcttttaggtccaccattataagctccctgtttgaactgtgaatttcaagactttggcctcatcatgtaaatttcccagtttacattaaattagcttaattacattaaattaaatatagctatttcacctctcagtctttgaggtactcatagtaattatcacagcagtcacttcatccccttacacacttgggtcaatagggcagttcactgcaatcaacattgagtagtaactaattgtgatgtcattacatgccattctccattggatgggagttcagcagtgtgtttaagactagggtcatgcccacatcaatctcagattcccattttatctttcttttttggtatcactcctagtaccaagtcttgtgtctgtcaatatcctgtccaaaaaagaaaaacacaccaaggaaaattaatataggaaaaatttaaaaagttattagaggactgaaaatataaaaatgg

SEQ ID NO: 12617 - DNA, 2300 bp, Homo sapien
aatcaggtgagcattcacagtgccccgttttgacttcttattgctgaagagggtaggaaagacaatcttgaattgctgacatgacccttcccccatcccacctggcacagagaatctgcgcacttgggagagggatggtgcagagattgtgaggttttgcattgaactcagtgcttccctgtcatggcagaaagcagaactgggctgtgctcacctgacacctgcccaaagagggagcatcaacaatctgctgcctacaagaaatgtacttcacctataaagacacacagagactaaaaataaagggatgggaaaagatatgcaatgccaatggaaaccaaaaaagagcaagagtcactatacatatatcagacaaaatagatttcaagaaaaaaagaagagacaaagaaggtcattacataatgataaaggggtcaattcatcaagaggatatgacaattgtaaatatatatgcacctaacactggagcatccagatatataaagcaaatattattagagctaaagcaagagatagactccaatacagtaatagctggagacctcaacatgccactttcagcattggacagatctcccaggcagaaaataaaaaagaaatatcagacttaacctgcagtatggatcaaatggacccaaaagacatttacagaacatttcatctaatggctacagaatataccttctttgcctcagcatatggatcattttcaaggacaagaccacaaaacaagtctgaaaacattcaaaaaactgaagtaacatcaaatatctcctctgacaacaatgaaatacaactagaaatcaataataaatggaattttggaaactgtacaaacatgtggaaattcgacaataagctcctgaatggccactgtgatcaatgaagaaattaagaagaaaattgaaaaatttcttgaaacaaatggtaatggaaacacaacatacaaaaacctatgagacacagcaaaagccatactaagagagaagtttacagatataagcactgtgaacccccaaaatttgagacaggtctcagttaatttagaaagtttattttgccaagtttgaggatgtgcacccatgacacagtgtcatgaagtcctgatgacatgtgcccaaggtggtcgaggcacagcttggttttatacattttagggagacatgagacatcaatcaatgtatgtaagaagtagattgattccatccagaaaggtggggacaactcaaagcaaagaggggacttccaggtcacagataggtgagagacaaatgtttgcattcttttgagtttctgacaaccctttctaaaggagacaatcagaatatgcatctatctagtgagcagagggatgactttgaatagaatggaaggcatgtttgccctgagcagttctgggtttgaattttccctttagcttagtgattttgggggtccaagatactttcctttcacagcacctacatcaacaaaaaggaaaatcttcaaataaacaacctaacaatgcatcttaaagaactagaaaagcaacagcaaaccaaaccccaaattagtaaaagaaaaaataacaaagatcagagcaaagataaatgaaattgaaatgaagaaaatacaaaagatcaacatttaaagaaattgaaatgaagaaaatacaaaaaacaacaacaacaacaacaaaaagctggttttttgaatagttaagcaaaattgacaaaccttcagcaagactaaggaaaaaagacagaagacccaaatcaataaaaccagagatgaaaaaggagacatcacaactgatgtcacagaaattcaaaggatcattagtggctactatgagcaactatatgccaataaattggaaaatctagaagaaatgtttaaattcctagacacacacaacctacaagattgaactatgaagatatccaaagcctgaacagaccaataaaaaataacgagatttaagccataatgaaaagtctctcagcaaagaaaaatccgggatgtgatggcttcattgctgaattctactcaagctttaaagagctaataccgagtagcagaggagggagccaagatggccgaataggaacagctccggtctacagctcccagcgtgagcgacgcagaagacgggtgatttctgcatttccatctgaggtaccgggttcatctcactagggagtgccagacagtgggcgcaggccagtgtgtgtgcgcaccgtgcgcgagccgaagcagggcgaggcattgcctcacctgggaagcgcaaggggtcaggg

SEQ ID NO: 12618 - DNA, 2300 bp, Homo sapien
taagtggctcaataagcacaacaaatacttttgacatccataaacaaatttccagtcagaacctttgtggcattctactcattcaaatcttttaatagcttcctatgttctttgaataaaaaataaattattgaccaggctctctatcatctggcccctgccttcattcccagtctcttttcccatcattcatccttcactcatacaacccggcttacactggcctttctgtggttctcagaccaacccctttcccactgtagggtccatggtcccctctgtctgatatgcttgtgccccagctcttcacatgagtgatttgctttcatcttccaggtctcatctcaggtatcacttcctcagagaggcctgtcctgactgtcctacccaaagtggcttcctccctatcttgtcttctcttgtttttgttaccacactttttaatttatatttctttattaactgaaacaattaatataaaagaaatagagatgggatctcgctatcttgaccaggctggtctccagctcctgggctcaagcaatcctcccatcttggcctcccaaagtgctgggattacaggcgtgagccaccttgccctgtcttcctcaagttatctttctaaaatggaagcttgatcacatttctcccattgcctacaaaataaaggttgagcttccaggtcttatttaccatgcataccatatgttttattatctacagatctgcattctgtcactattcttcctaatctccttctagcctaatcaaaacacaaggaaacaaaaaactagaaaaacaaaacaaaaagctttatggatcacactttttattggacacgatactcttcctttttgcaatgtcctcccactaggctcccaaccaggccctcctgaaaaattctctctcaaaactttactctgtgcatgcacatacttctgttgggacacctattttatacataccatctcaggcagaaaattcccaaactgaaatgtacaggcaacgtacttttattctacggagttaacaaatttttaattccttgtctatgaggttgaaaatcccaattaaatttctggtcttcccctcttgctcctgggttgtggttaaattcttggggagtcttcacagtacctaagttttggagaagatgtaggcacccgccctcatccctccttcagattttggcatcctcttcctagtatctgtgtgttgtttgcatatttctgtatcgttttgcttttacagagccacactgaagcttgagaatctgaggctttctgtagcttccccgtacacagaatcattccctctttggagccttgctacctactccagactacttggaatgcagacatttgctcattactctgggacccaggggtattccctttctcttaatcttattaatatttcacttcagaagcatttcctgtgttgtgaaatttttctcagaggcttctttaattggtttagatttttaatggatttagtcacataaaagccaatgactcccaaattcttaagtcctgtcccatcccaatacctgaggcagggagaaaaatataaatgaccatcgttcctaaatctgatagctcagtggatacacccggggagcttttaaaattaagagacactcccaagcacaactctacagcatcagaatttgttttcttgacgatcacagacgatcaaggcagaattcttccatcagtggtgggcgtggggcgggactccactcggtctttctgtcctctaagtcttctaatttttttcccagtaatccgccctcccgttctccttctttggcccatccctcttctagtctttccctgctcccctgcaccaatctttctgcgtcccgtcccctcccattcccctaccccaccccaccccaccccaccccacgtttcccgcctcccgcgcctctcccgctttccgccccctcgcgtctcctcccctcccacccgcacctccaccccctgcctctctcctgcccgccccgccccctcttccgctctacgtccctcctcacccatgcgcactctcttcaacccgctgcttccggcggcctaggcttacgtttactttgcgccggaaagagaacctgtaaacgctctcggaattatggcggcggtggatatccgaggtatactgtattgctatattttgtctcttgattgtctgtggaccagtttgggatgttatagctcgcggtttcaaggtttaggttcctttgtgtgaagtctcaagcttttttgagtggtttttgtggacaacccaaggctgtgatctag

SEQ ID NO: 12619 - DNA, 2300 bp, Homo sapien
tctagtctcaggtaatccacccacctccgcctcccaaagtgctgagattacaggcgtgagccactgcacccggccacttacaatggaatattgtacagaatattaaaaattaggctttaaaagaatatttaattacatataatgtaaagtaaaaagcacaggaagcaagcctggggaacattgcaagaccctgtctctacaaaaaaaataattaaccaggggtagtggtgtgcacctatagttgcaacttctcaggaggctaaagtaagaggtgagaggatcccttgagcccaggagtttgaggctgcagtgagcaattatcatgccactgcactgcagcctgggtgacagagaaagaccctgactcaaaaataaaaaagaaaagaaaacaacaacaacaacaacaaacagtaaatgaattgtgtatattgttccataccacttatgttggctaaaagagcactttttacaaatatagatgcctaggaaacaactggtaggaattacatcaaaatattaacaaagaatacaactgggtgtagactggggggttctttatactttactgtattttccaaagtctctacagcagtgtttctcacactttaataggtaaacaaatcacccagtatgctcgttaaaatgcagcttctgggttagtaggtgtgggattttcagattctgcatttctgataggttctcctgtgatgctgatgatattggcccaaggtctacattttgagtaggaaggttttaaagcagcatatctgaaccaatatactggttaactgagacccaccctcagagtttctgatttcttaagtctggagtaggatcctaggatttgcatttctaactgtttcccaggtgatgctgacactgcaggtctggggccagcactctgacaaccggtgctctagaatctttctttttcttaacattaaggaagggagggcactaaaaaatatgtcaggcttctccattgactccaaaatcaaatccaaactcttcatccaaaagcccccataatccaaccccgtcatttcccactacttctcattaggctataaaatcaaaccactatgccctaaacacacctgagatttcaaacatcaggacttccgctggatttcctcactccggctatgccacttccttctacttcttcatgccaaatcctacccagccttcaaggtcctcaaatgctatttcctccataaagcctcctgatctaccactactcaaaaagctacctctccctccccccctcagggctgcacagcacttttcgttcctccccaatgacaggcaccatctgtacctggtccagcgactctaccggtgggtggtgtatcttcgcctgtagactgggagtttcttgaggtcaggggagtgacttgcctatctttgcctcttagccttagcagatccccagtagacagctgacactcagaaccgaccaaaagaaggaaggaatgggacctcctgaggaagggcacagaactgtcctgtaaatggaaactagaccggacgcacgccaagccgatgacccacagtaacaggtgttctccatctctgatgtctgtgattcatcctgcacagctgcgcgcacacagcacacgcatacacaggctcccagaatacggcgccccacacgctgtaccgcccgtcgcgttctggacgccccggcgaccacacacaccgagacacacctcagcgacaacctggatccacaaaaaggaggccctgcccccttaaaaaatactaacaccttactgcaaagaactagcagctacggcttgcgcctgcgccccttgttccctgccgcaccttttcttgtagttaagaaatctatttctgcacgcatttcgtcgccgccgccccccatccctacacgcacgcacacacacacacacacacgcacacacacacactccccttcccctacacctacccccctccccccacctcctttcagactaggcgcgcctcgcagagcgggattgaatgggaaagagcggggccgtctttgtcattaatcctcccctccttcgggcaagccaagcttcttccgggtcagcgaccatccccgccaccccactcggggccacggtccccccgcagcgctagtcccgggcccgcgagcaccggcccccgccacccgcaggttgcggagggaggagggcgggagcgggcggcgcggagccgggaggcgggggaggggccggcgtccgaggcggcggcggcggcggctggagcagcctctggcagcagcggggagaatgggagtgcggggcgcc

SEQ ID NO: 12620 - DNA, 2300 bp, Homo sapien
ttttaagagactttaaatattcctgcgcctaaattaaacaatttttaaatccctgattttggctcttatccccaaagggaatgttggaatgtacaccttctttgcccaagagtagggcccccttttccttcacccctagcagccagctggcgtgaggactgatgctacacatagtgagaaacgggcagggaggagagggagaatgcagcatagttcaagcccaaccatgaaccaagcttcttttgagatagagatcttcacctggcaaccgggagccccagcagagctcagagagaagaaagtggcattctggaatccattttgctcaagatgctgaaggcatggtgtcaaactcccctttgctactggggccaaaaaacttggggaagatcttacctacagggatgcggttagttggggaaaaggcgaggaccaatcctggtgctcatgctacctaaggagagcagacaggtgcgtggcctcccttgggacccacccgcaggaaaaagctgggctagcggtggctgcgggggcccaccccgggcgctgcttccgcattttggacccaggtccactggtgagcagtagcagcagcagccatagccaggccagctgggtccccttccagtcatttctaggtgagatttacgatgtatgctagcgaagggacaagagatgattatggcctttgaaaggcataatcctgaaagtcacactttttccaaagcgcctccctcccgggttctccccagagcaacacagtcacagcaggagaatctgcaccgcgggagcgccgcagtggtccgcggagggaccgggccgaagaacggggaccgcggcgcggggggcgcggcgcggctcacctgccaggctgttgtaacagtcgatctcgatggcttccaccgtcttgctctgctcctccgagaggcggccgggcttcagggccccagccggggaggccgggcgcgagtcccgctcccgttccccggggggcggcagcagccccttcagctccagcaacgcccggtggtatttgcctatggcttcacggaatttcttgtccttgtagcactgcgccccttggcttttgaactcgtgcgctcgtcggatgagctcggccggctcggccgccgccccgacctggcccctcgctggggctcctccgccgccgcccgggacgcacagcggcggcggtggccgctgcccctctccggccgcgggcgggctcgggttccccttggccccggccgccgagccctttctctccattcggccgccgccccggcgcctggtgcgcgccgcgatctgcccgccgccgccgccgccgccgcgccttcccgggtttaaaagccgcgggcgccggccccgcgcctcgcaggcttcgtggcggccgtgacaccccgcggcggtctggcgccccgcactcccattctccccgctgctgccagaggctgctccagccgccgccgccgccgcctcggacgccggcccctcccccgcctcccggctccgcgccgcccgctcccgccctcctccctccgcaacctgcgggtggcgggggccggtgctcgcgggcccgggactagcgctgcggggggaccgtggccccgagtggggtggcggggatggtcgctgacccggaagaagcttggcttgcccgaaggaggggaggattaatgacaaagacggccccgctctttcccattcaatcccgctctgcgaggcgcgcctagtctgaaaggaggtggggggaggggggtaggtgtaggggaaggggagtgtgtgtgtgtgcgtgtgtgtgtgtgtgtgtgcgtgcgtgtagggatggggggcggcggcgacgaaatgcgtgcagaaatagatttcttaactacaagaaaaggtgcggcagggaacaaggggcgcaggcgcaagccgtagctgctagttctttgcagtaaggtgttagtattttttaagggggcagggcctcctttttgtggatccaggttgtcgctgaggtgtgtctcggtgtgtgtggtcgccggggcgtccagaacgcgacgggcggtacagcgtgtggggcgccgtattctgggagcctgtgtatgcgtgtgctgtgtgcgcgcagctgtgcaggatgaatcacagacatcagagatggagaacacctgttactgtgggtcatcggcttggcgtgcgtccggtctagtttccatttacaggacagttctgtgcccttcctcaggaggtcccattccttccttcttttggtcggttctgagtgtcagctgtctactggggatctgctaaggctaaga

SEQ ID NO: 12621 - DNA, 2300 bp, Homo sapien
gaccagtgcttctaggcctctggttcccccctcctacaaagtggttggcagggtgcccaggctgtatcctcggagagttaccggctttccatatgggctgatgacagggatttgaaagcgagctcctgtcctctgtctctccacccccagacagaccaagggctctgcttcagcactgtgcactacccacgtaggtctgtcccacagtgcactgggttggtgcagctttgtgggttggttttgccttttaaaaaggggatggctttgaaagttgcctaagcatgccataaagcttggaaggaaagcctgagaaatgccttatgtggagtagcctggtccacctctgctagctcggctgcccggtgcttgcctggcttcgcaggtctttgcatcaccgtaactgtcatgccatgaatgtgttgtgtccagtgtctgcttcgagtgcttctctcttgagatgggctcaggcaagacccccagccagcagggccatccttattctttctgtctgcttgccagcttgcccactagttctttctacagttccacagcagcatgtgagggggatgggtcatgtcattgcccttttcttccctggagcatgtgcatttctgtttgtgaagcaggtgggcttggtaagagtcattgcctgtatgtactccaaggttctttggtagaatgaagcaggcagggagaaacgtctccatagacccatggagctgagggtcaagtaagaaaggtaaccagttctgacagtttcctcttttcctctgattcagcctcaagtccctggtagatggatataagcagtggtcgtccagtgcccccaacctggtgaagggcccaaggagtagcccggccctgccagggttcaccagccttatggagatgggtaagcatagctcctcttgagagtcttggctgtctccctgctccctgggggcattcttgcccaagcttctaggaccatttaaggacccctagcactgcttcatggaggaaacattgggaatgtttttgttctagaatgttcagtgttctagaaactcatactacacttgtattaaggggccggtattagtcagggttctccagagggagagaaccaatagcaaccaaaaggaagtttattagggagaattgtctcacacagttacaaaggcaaagtcccatgacaggccgtctgcaagctggagaatgagaaaagcctgtagtatggctcccagggaagacagtagagtggctcaatcccagtttgaaagccttaacaccagggaaaccagcagtgcagctcccagtctgaggcctgagagcctccgaaaggcctcagttacaagtctgagagtccaaaggctgaagaacctggactctgatttccaagggcaagaggagaaaaagtgtccctctccagaagggagaaacagagagaggaagctcagcaaactgagcatccccctttttctgcctgctttgttctagccttgctggcagccagttgggtggtgcccatcgacattgaaggtgggtcttcctctccctgccccctgactcccatcttagtctcccctggaaacagcctcacagacacacccagcaactgtgcttcaccagccatgcaggcatccctcagtccagtcaagtggatacccaagtcactatcacagatcccttatgaaagaaatggcaaattagcggatcttttattctgctctaaggaaatgggctctggaatggagagtggtttccctgtgttggggggtggataaagcccccttggttcagtgttcaattccatgtcctgctcatcacaccattgaacctttgtgtccctgagactgagacaggaggcctggggtgaggggaaagggccagattcttattcctgccacctcatttccatttcctgtttctcttccactcttgtcatcttcacagaggatgaggacagtgaaggcccagggagtggagagagtcgcctacagcattcacccagccagtcctacctctgtatcccattccctcgtggagaggatggcgatggcccctccagtgatggaatccatgaggagcccaccccagtcaactcggccacgagtacccctcagctgacgccaaccaacagcctcaagcggggcggtgcccaccaccgccgctgcgaggtggctctgctcggctgtggggctgttctggcagccacaggcctagggtttgacttgctggaagctggcaagtgccagctgcttcccctggaggagcctgagccaccagcccgggaggagaagaaaagacgggagggtctt

SEQ ID NO: 12622 - DNA, 2300 bp, Homo sapien
cataacgtcacaagaagggcgaatacagtacaacaagatcttttcagagagagagagaaaccacattaataaaacttttcttatagtatagttgttctattttattgttagtgttaatctcttactgtgcctaatttataaattaaactttatcataggtatgaatgtataggaaaaaacagtatatacagggttctatccatggattggggcatccactggggatcctggaatgtgtcccctgaagataaggagggactcctgtaatcatgctttgtatttggtcctttagaattttatttgaaacagtatctacctgaggtactccaggaagaggtggtagtatccccattttataacagaggaagctgaggctcagggaggtttaacaatgccctgcccaagaacacatagctagagaatgatagggcctggactcaaataccaggctcttgagtgcttgcatggttttctttctgctctgcttgttggaaacagactgcaataggagatccttctctagcaccttgttctgcaggacggaccctgtgactcaccagagtctgggtgcaacagggctagacctggacattaaacctggtcttggggactttgtggggtagatcatccccacatttcgaactacagataggggatcctttatttctccaacccaggacctctggtacctccagacctgatggtcctaaaatgcacaagacctgagagctagtttctcatttctcttttccccagggcccctccaaaagcacaatttgaacctcagccatccttctgtagcctcaggtttgcttcttcttccatctcactcactctgtctcccaggctggagtacagtggcctccacttcccgggttcgagcagttctcctgcatcagcctcctgagtagctgggattactgacgcctgccaccacacctggctaatttttgtattttcagtagagatggggtttcaacatattggccaggctggtcttgaactcctgtcctcaagtgatctgcccacctcggcctcccaaagttgtgggattacaggcatgagccactgtgcccggcttcagctttgcttcttgttagtgtttgtcctgaaccaaaattgtgcttgcatacagctgtccagaagttgggccatcgcagaagcttccatgttattgggctcttgtacttacttgtgtttgtgttgtggttttgttttttattttattttatttattttagtatttttttttgttttgagacggagttttgctcttgtttcccaggctggagtgcagtggcgcgatctcagcttgctgcagcctccacctcccgggttcaagcgattctcctgcctcagcctctcaagtagctgggattacaggcatgcaccaccatgcccagctagttttgtatttttagtagaggtgcaatttcaccatgttggtcaagctggtctcgaactcctgacttcaggctatctgcctgcctcggcctcccaaagtgctgggattacaggcgtgagccactgcgcctggccgtggtttgtttttgtttaaacaaaagaagtatatatagatttcagatacattcacagatgattgtttatggaatttaaaaaattttaaccagaaaagtaatataaacattcaaaaagggtttggacacgtctgttaattgcagagccctgtgtggttattcagatgccacgtctttcagctctgtgtagtctgggaggtgagcgggcctttctggggtgtttctttgcagctgaatttatggccaaatggaccatgcgtgagcaagagagcagttccattcctcctggaggagcgctgagcatgctttgtggtgcccacttaacacttttagatgaatactatgaaagacaaatttgacttcactgttcattccttgaagctccaatttggattgattgctggtggaataacacctggactatcaatgagtgaagcctcccggctatttccttcgcccacctcacaaagagaatttggattttgctgctcctggaactttagagctttgtgatgggaggaaaggggaggggacaaagagtgaatccttcaggagctcttttgggaggaattttgagcaggaaatgagggagcttctttctataaggacagtggatggaattaaaaaggggtatttgaggaagcgttgctgtggatcatatgaaacctttggatgctcaagaaaaataagagtcagactaatttgaatttactttaggatgccgtcttccttcccaccttaccgttgtttggacacagtact

SEQ ID NO: 12623 - DNA, 2300 bp, Homo sapien
cagtgtagtcatattgatgagcgaaccacagaatgttcaaactatgaggacacaggatatcttccagttcactcccctcactttaagagtacagtgttaggacacctgcctgaagtcatgcagctgcctagttatctttccaaattgccccgctgtctttagtttgtgtaataataaaccccaaactaaaattcaacaaaagcactcacccttgctaaataaatcatgtctattcctaccactgaaggggaaaaggtaacaaagtttggtagaagttgggctagatccttcagcactggcttatttagaaatttcagaggactaggtgaggtggctaaggcctgtaatcctagcactttgggaggccgaggcaggtggatgacttcagcccagagttcaagacgagcctgtacttccagctactcgggagggtgaggtgggaggatggcttgagcctaggatgttgaggctgcagtgagccgagattgcgccactgcactctggcctggacaacaaactgagaccctggaagaaaagaaaagaaaagaaaggaaaagaaaagaaaagaaaagaaaagagaaaaaaagatcagagaacctttcttactggaagtcaacgttgccacgacaggattaaagcaagaagaaacattatgggcctcctatctcgtccttaatgttcaaaacgcagggtatagcaaagcatataggaagaggtcgtcctcactcgtgaactcagcatcgggttctacgtttattctgctttggttcttcttaatctgacctctatagacttcgccacgatccaaggtgtaattccaacaggcaaaagaagtctaaggattgtcgaaaaggtggctcccttcagacagaccaagcccaattcatggcagcgttcccagccccagtttgaagctcagtaaggtggtctcttgcctttctgaattctgaaaaaagagtggtattggaatctcttcttaccggaacccaggagagggcgagctgtggtgcagtcctcataaaggggagaactgtagttttcagagttctaatgaacatcccaatgggcctaaaaggcttcaataagagatgaaaggttccgggtgagagtgggcgtgggcgaagctgatccctctaggtcggactaaggcagagccagatccaagagggagaatccaactgtaaaagggatctggggaagaaagagctctgttgggggtgcagccggatgaagaacaccggtgctgctcagtgcagcccctacccatccatggcaaacaaaggcagctgcctcccttccagccttttagtttgaatgaaggctcagtattaccttttaggatccacccttcccttctcacgcacccaatgaggccggagcctcttcctgccgggaggtgctgaactctcccaggaaacggacaggtgccgcgagccaatggagggagctgcggcgggccagtgggcgggaagagtgggtcgacctgggtttgagaatgacagagcccgcaatgggggagggcacggtgcgacggcggcgcagggggtgagagggacctgcgagacggccagctaggctgccccaaccacggcggaggaaccggggactgggcggccgcagccaatgggaaggcagcgggcgcggggcggggcgggcgtggggcggagccccctggggtccgcagggctggggcggagccaggcccgcgtcaggtggtcccggcgagctggcggtgcggggggcggggcacggcacggcgcggagaggagagcggcggccggctggcagcggcgggcaccggctgcgcgagcaggtaccggcggcagaggtgacgaggccgcccccgggggggcgagcgggcaggcggggactcggcccgctgcgcccctaggctgcgcgaagagctcgcgctcggcgctcttctcgtaccgcggtaacagcgccggcgagccggctctcccagccctgccagcccgggccctacctgcggccgccgtcgttgggggggggtcctcccagctctgcggaggcgcatgaacaataggcggcggcggctcctgcgggcggcggcggccccgcaccctatggatcggccgctccatggagccctccagagcgcttctcggctgcctagcgagcgccgccgctgccgccccgccgggggaggatggagcaggggccggggccgaggaggaggaggaggaggaggaggaggcggcggcggcggtgggccccggggagctgggctgcgacgcgccgctgccctactggacggccgtgttcgagtacgaggcggcggg

SEQ ID NO: 12624 - DNA, 2300 bp, Homo sapien
ttccctgtagaaacgaaagggcagacctagaaaaccccagcactgaagctggggccttgctataagcaacacactttctcaaggcttgccgtgatttcccaatttttgcccactcctggattttccaaggctatgtgttccagctgtccattggcttacaacacccacattctctgtttaacaggcctgatgccggctgccttcctggcctgctgccggttccatatcctccagatactgcattctggctgaacgtttatcacgccagctgggttggcctccgattccacggatgtatctggttctagtttccatttctccccatccacctcaccctcattacagttaatccttttatattaaaccatagcggatctttgctgttgtggaaactgatgtggtattggaattttatccttgtttacatctttctttgtgttggaaaggttgggattacttccaaaaccttcccagagagctttcctgtctcctttaggggaaacaaatgaaaacttgacaatagctggtatctatgacaccagcttcaaggccactattttaattgtaaaattgcattatttaatcataattttgcttttagatatacaaatatattttaaagtatattttgtccagtgtttactcacagctctcaatttcaaggtatcttactggaactcagtggctttgtggttataaggacataaacaaatcaaggctagggatggtgtggtgttctacagtggtaagctacattagaatcctccggaggacttgttaaaacagattgctgggtaccaccccacagagtgtctatagaatgatgccctaagaatttgcactttgacgaaaactggtcatgtatttaagctggtcacagataaccagaaggtgctgaactgttcttaatcaattcaaacttttacctgaaatggataataaggtggagagccttgagaaatgaacttccaaagttcagtgcatgcagttagcatgactgctggttttagagttctcaaccacttattgcttatgagcaataagtggccataagcatttggccaatcacttacttgagtttacaggttttctcatccataaaataacaatagctgctatgctgccctcaaagggttgtcctgaggtctgaatggaatgggtgtgatagtgtctgagcaactataaagtggtatggcactgggaggtattgtaacggtttttcattactcttcttaaaatatcaccagtttcctttggctcttgtttccctcattaattatagcaactgtaatctgggaatacacagtacttttattgccataaaagccaaacttcaataaactcaaatttcaaacttttctataaaattttattcagtgagatcagacacgccttataaacattacacagagccaagaatgattccgtttttacagctataaaaagagatctacaagaccctattgtaatttggggtggcgtcacggttaatctttttcaaccctgtttagattggcccattaataaaaatggctgctagttacagcacatttaaaaatacaatcaccgcgtacaaatggtaacctgtccactccatacttccatgtcctgtgccgcttctattaacttgtctttggaagtagtaaattctcccagtctggacgtggctattttttctcacacacgggccaacacagttcttgctcaacttgggtgcgtttatgacttttcaacagtgtcatcagccgtacctaactcttccaggccttcagtatctcaggtgttagcttcagttgttcctaggtctttcacaaatatcataaatgacaggcaggacgcttttctggagtcaagatctgttagtttcggagtcagaaagaccccgtttagagactcgtaggcgaacttgccagggggcctaccaggggcagaatggggtcctccggaccagccagccgcgtctcagccacctccgcagcccccggggccctgaaccccggccgcgttgacgcgcgcttctcccggacgtcggcaggaggcgcccgcggcggaccaggcgcggcgcgcaccgtagccggcccagggggcggagggagcggagaggaggagctggagggggcgcggcttcctctcggtcgctccctggcgccgggcctctttctctgcctggcccagggctggcggccggcgggggtcgcggcggcggcagtgggggcgctggcgggccgcgggtggcgggggccgggccgcggctccgggtgttaggagacaagatggcggcggctctcagaaggccggtc

SEQ ID NO: 12625 - DNA, 2300 bp, Homo sapien
gtacagtctgcagaactgtgagccagttaaacctcttttcattacaaattaccctgtctcaggtagttctttacagcaacacaagaatggactaatgcatttggcttttgacatgccttcctcactaagcttccttatttctagcatttgatttgaagtgagacatgcaactgtttctttacttaaacacttagaggccattgtagtgttataaattgcccaaatttcaatattgctatgtcttagggaatgggaaggcctgaaaagagggagaggtaggggaatggctggtcagtggagcagtcagagttcatacaccatttgtcaatttaagtttgccatcttatatgggcataaattgtggtactccaaagtacttagaacactaacattaaagatcactgatcacaaatcaccattatagatacaacagtaatgaaatgtttgaaatattgagagaattaccaaaatgtgatccagagacaggaagtgagcacatgctgttggaaaaatggtaccaatagatttgcttgacacaaggttgtcaaaaaccttcaatttgtagatatcacagtgccttcaaagagcagtaaagcaaagtacaataaaacaaggtatgcctgtatatttttaggcagtatcatataaaatggtcacccacagcatgtattcctatcagtgtcaggttcaagtcaagggtttttcttgtcaacactatgtaacattattatggaagtgttggtgacagttattaaacaagaaaatgaattaatggaattattgagggctatagagtgctaaagagcactctgtagctgtgctaaacagcacagctccttagcttggctataaaaacctttttagccttatctttcatcgtaccaccaccaccatcagctgggactaggtgtcatggtatcagtttctctcaaagcagtggttttcagacatggatggtgtatgtattaatattacttttaaagaaaaaaaattattgtgcagcctgatttctgtacagttaagtatgattactttatagtctttacataatataaggaatttacaaattgagttgaaacaagaccacagaacaaaataaaaattaacattagtgtaacagatggtattttgctggcactagattgctatgggtctcattctatatttaatctgtttttgtatttttacttcaataacattccactggtttttgtatttctaaaattaactcagaccttcaggagatgtgcctttactctttggtccttcatttgatacaaacacaattgtaaacccatttgaaacatttagaaatcagtaagtcaaaattaaagttactttaccacacgaattatcagacccgtagtgtgagtgcggtggctcatgcctgtaatctcagcactttggaagcctgaggcaggcagatcgcaaggtctggagttcaagaccaacatggtgaaaccccgtctctactaaaaatacaaaaattagctgggcctggtggcgcatgcctgtaataccagctcctctggaggctaaggcaggaaattacttgaaccgggacccaggaggcagaggttgcagtgggctgagatcacgccactgcactccagcctgggctacagagggagactctgtctcaaaacaaacaaaaaaagcgtagtgtgctaatgctaatgcacattgtgtttttgcaggatatgaatatagaatatgcgtgatttctggagtttgctacaatttgttaatgaatattctaaggcaaatccatcacatactttcaattgcaataaaatatgtatttttttctaaatcttatgtgtccttgcattcatttttcccactttctggttttccccctttgtaaagctctctctctctctctaaggtacctactgtcaacaacgggaagtggaggccattactgaaggtgtagaggaagatgaaggattttgctgttgtgaacctggccatattcctcacatgctttcatttaatgctgcatttagccagcgatggctagcttgggaagtgatagtcacaaagtacattctggagggttatagcatcactgataacagtgctgcttctatgcttcaagtctttgatcttcggaaagtactcaccacttactatgtcaaggtaggagtatgtgcctacttagatctttagataatcagagtttcttcttgggaatgacatatataagtatatatatatgtatatacttttttttaacgtatgctttgcttccaagtacttatttaaattctctaggatccagaatactccataaaaat

SEQ ID NO: 12626 - DNA, 2300 bp, Homo sapien
gtgggtcagttttgattgagtggttaattgattgttattatgggtcctattttcctgctacttgcatgcctgtcaattttttattagatgccagtctttatgaattttactctgaagggtgctggatatttctgtattcctgtaaataattcttgaactttgttttgtgacacagttaaattctttggggacagtttgatcctttcagggcttgctttggagggaccagagcagctgttagtctggggctaattcttccccatgaccaagacaatgccatcctgagtgttctagccagtcccaaggtttttcgctgttcctttgtattccattcggatgattcttttctcagcctagggtcctctttgcgtgtgtgctgttgccgtagatctccgagttccctcgcctccctctctcagtagctctctctagcactctgccctgtgagctccagctggctcagaggcctctgtctcaatttgtgctcccctttcttgtgctgtggtctggaaactctctaggtaataagctcagtcagttgtagggctacctcatttgtttcctgtctctcagggaccggtgtccagtgtctaaaaactgttgtgtcatgtattctgcccagtctttggctgtttcagctaggggggtaaatatggtctctattgaatcatcttggctgaggtaaatctgaattaaaaaaaaaaatttctcatcacagaaacaatacatttttagtctagaaagttgacaggggaagggaggtagagaaaaagaaaaaaagaatgaagatcacccgtcattttatcacccgttgtaactacctttagtattttttctttatacaacttcaagtctacacccactctcttttatttttcttttgtatttctttaaactagtgctctcatactctttatttactgttttgtaacctggacccaaattttttttcaaaatgcctacttgatgaaactagagtacgtgctgtaagaggtaatatgtctttagaaacaatctaattggcaagcaactaggatatctctaacacagtcgccattaactaaattatcaagttaatgataattaacctatcaatagtaagttaatatcttagactgttcccctattgtatttataagttaatggtttataaagccaaaaataaataccattggcaaagttagaataattaagctaattattagcctgtatcattgattcttcacctttagcatgtattagaatcacctggagagtgattgcttgaccccacctccagaatttgatttcagagatctggagtggccagagatttgcatttctaacaagtttccaggtgatgttgatactgctggtcttaggactatactttgagaagcactgccctggattattttttggtaactgagatgctaccaagattttctttagtattatataaggtaatcagtgattattatttgggctttcttagagggagaaacagaggagacttagcagcttctttcaattgtaaggcatgtaattgttaaaaaataaaaaggttgaggggaaacaatattttatgaatatcaacttgattttcactatgtttatagtcactaataggctaactcacctgccactgatagcctgcttgtcaagttatggtcaaaaataagtagttaataaaaaaaaaagaaagaagtagctaatagatagaaatattgtattttcaagagagggtaatatcagtaatctcagtaagtactttaaaatctttagctaaaatcctaatattttataatagagtcagttttttttgttttattttgttccgttattatgaaattttagattttatttaaggattccaaagaaactccccatacacattcatgcttcatttcatacagttttattaagtttattttgaggagatagaaattatgtactctttgaattctttatcatttcgctatattatttcgatttatgatttgttaaatacttacatacctttctgataactaatgttttttgtttttttaaagcctgtggatgtggacaaagattcatccctagtgactctctgttatggactctgtgttctgggacggagagctttggggactgcatcccatcatatgtccaggtaaagaaggcatttctgttctgaggaagagagcatgggaagctgtatagcctaaatctaaaatgatttttcatggacgcatgtattctatgctaatttattgtaaagtctttttaggttttatatttctatacatcatcttcttgaacataggtgagctgtctta

SEQ ID NO: 12627 - DNA, 2300 bp, Homo sapien
tttactgttttgtaacctggacccaaattttttttcaaaatgcctacttgatgaaactagagtacgtgctgtaagaggtaatatgtctttagaaacaatctaattggcaagcaactaggatatctctaacacagtcgccattaactaaattatcaagttaatgataattaacctatcaatagtaagttaatatcttagactgttcccctattgtatttataagttaatggtttataaagccaaaaataaataccattggcaaagttagaataattaagctaattattagcctgtatcattgattcttcacctttagcatgtattagaatcacctggagagtgattgcttgaccccacctccagaatttgatttcagagatctggagtggccagagatttgcatttctaacaagtttccaggtgatgttgatactgctggtcttaggactatactttgagaagcactgccctggattattttttggtaactgagatgctaccaagattttctttagtattatataaggtaatcagtgattattatttgggctttcttagagggagaaacagaggagacttagcagcttctttcaattgtaaggcatgtaattgttaaaaaataaaaaggttgaggggaaacaatattttatgaatatcaacttgattttcactatgtttatagtcactaataggctaactcacctgccactgatagcctgcttgtcaagttatggtcaaaaataagtagttaataaaaaaaaaagaaagaagtagctaatagatagaaatattgtattttcaagagagggtaatatcagtaatctcagtaagtactttaaaatctttagctaaaatcctaatattttataatagagtcagttttttttgttttattttgttccgttattatgaaattttagattttatttaaggattccaaagaaactccccatacacattcatgcttcatttcatacagttttattaagtttattttgaggagatagaaattatgtactctttgaattctttatcatttcgctatattatttcgatttatgatttgttaaatacttacatacctttctgataactaatgttttttgtttttttaaagcctgtggatgtggacaaagattcatccctagtgactctctgttatggactctgtgttctgggacggagagctttggggactgcatcccatcatatgtccaggtaaagaaggcatttctgttctgaggaagagagcatgggaagctgtatagcctaaatctaaaatgatttttcatggacgcatgtattctatgctaatttattgtaaagtctttttaggttttatatttctatacatcatcttcttgaacataggtgagctgtcttaactggttaacagaactggtttttaaaattcacacgtgtgggtagccactgataatgagaatataatgaatttaagacattttaaaatacaaccaccccatgaattttgattggcctcctcctgtttacatctatttttctaataaattcattttccatatttccttgcagtctttgtccagggtatttatacttctaatatagtaatatattagattcggggattctaaatctaaactgaatttcctaacatatacatccaaatgaatcagaattaagaaataccacatattttaaatttttttctgtgataactacatgttttccgttaagcttttcttagtttattttaacttataggctctttgcctgttgtttattttcatggactcactattacagtggtttataaataagggtcccaggtcggacaggccctgtctcttgtgattctggttcagggttctgacattagttcctggaatctgtattttcaaaacactcccaggtgattctgatgcacacgcagatgtaagaatcagtgtcatggaagacctttgtcaaaacatgtgaacttttatctccaatcttaacagtaatttagagtcattcctctatggattgcatgccctatttaaaggagatttccgtatttcttcaattcgagatgaatggatctttgctgacatggaattgctaagaaaagtagtagtccctgggatccgtatgtccattaaacttcatcaggtaagaagatgagatttttctaattcattactggtgtttactgatccttcttcacatgatttcaatattagtccattctcacgctgctgtaaggaatacccgagactgggtaatttataaaggaaagaggtttaattgactcacagttccacaggggtggggaggcctca

SEQ ID NO: 12628 - DNA, 2300 bp, Homo sapien
aattaagttaaaaacctcacattctttaggaacatgactaataaaggacacattatttgaaaatctctgtgaaaaatggaatactatttgaggatgttgccctggggaaatattaatttgggatcaaatagaattgtccatcttcagactagttttagagttttgagacaaaattcagtgcatttcaaaaaaaggtaattcttcagattaaaatgtttttaaaacttagacatttctggaaaggtaccaactatgtatctgctttataagaaatattctctttcatatagcataattttctaatagcttctgacaaacttcttcaattaattctaaatgttatcacagatattttatctcagcttgtccgagatgaaactgagcacagaattaaagcctctgatgccttgggtgcctgcccctagtctctccttacaggactctcttgcctgttgctgccaggtctctttccttaaatattcctttggctgtggcattattgccgatatcagtgattctttactttatattctggcccaacacacttggatatagcacactcccatcattagcctggactgacaacatttataaacagggaggtgagaatgtagaattggaaccaagaagccatggagggctgaggggaggagaggaagtggagaatgtaatgcaacctggagaagttccttaattctgatataccttctaggagggtggagattgacctataaagtcacaaacaacagccatatattgatcgtcactttgagcaagacattaggttgtctatgaggatctctcaggcaggaaaatctaggtgtgtaaatcagtactcaccattgccaaagttcatgtgctcatgaaaatccataaaagtggacaataggcttatatactaaaagaaaggatatatgcatctaccttacaacccaacaattctacttctagatgtttatacaacagaattaaagtacaattgattcttgaacaacacaggtttgaactgcatagctacatttatacacagattttctcagtaaatgtattggaaacttttttggaaatttgcaacaatttgaaaaagatgaactagaaagcctagaaataccaataaaataagacaaacttaggtatgtcatgaatgcataaaatatacatagatactagtttattttattatttgctaccataaaacacacagaaatctattataaaaagttaaaatttatcaaaacttacaaaaacacagactatacatggcaacatctgcagttgaaagaaatgtaaacaaacaaagatgcagtattaaatcataactacataaagtcaactgtggtacatattaatattatatactacagtaatttcgtagtcaccttctgttgctattgcagtgagctcaaatgttgggagtatgcttaaaacgccgtgtggcactaatcatctctgtgtgagcagttcgcctttccagtaaattgtgtatttcaataaaaagtgatctgttgcagttcttgtgtatttctcattgtgtttagtgcagtaccataaaccttaaataacaccatgggacccatacaaagtgccactagtgatgctgaaagggccccacgaaacagagaaaagtcatgacattaaaaggaaaggttgagttgcttgatatgtgccgtagattgaggtttgcaactgtggttgcccaccattccgagataagtgaatccatcttaaggacaagtgtggaaaaaaagaaaattcgtgaagcttccactgttactacaccagcaggtggaaaaccttgcgcattttacaaaataccttttcatctcatgttgaaaataatagcttttatgttggatgcaggattgctgtaagaaaggcatacctatgaacactaatgttattcaagaaaaagcgacatcattatatggcagcttaaagcataaggaaggtgaaggacctaaagctggagaatttaatgccagcaaaggatggcttgataattttagaaagagctttggctttaaaaatgtcaagataacaggagaagcagcttctgccaaccaaaaggcagcagacaagttcccagatgccattaagaaaatcattgaggaaaaaggttatctgcctgaacagatctttaatgcaggtgaaagtgctctattctgcagcgggggttgggggtggggaagccacaaaggacatttttttagtaaggaagagcaccaagcaccaaaatttaaggcagggatgggtaagctaagtttactgttttgtgcaaatgcagagaggggtttatgatc

SEQ ID NO: 12629 - DNA, 2300 bp, Homo sapien
aattctcagcaatagatgttttttgttgatacacattttaggaaggtgtttggtatgtgctagctgtgagcattatatttctcacaagatccccattttaaaggggagagtaagagaggtttatagtcacacacttgcaggtgatatgtggcgggaacatactacagatcgctagtaaattttctgaatggtggcttcttttaagtccttacaattatgtgagttgaaataggtaacacgacggtatagtggtaatccagtcagttttgcaatacttcaggggaaaaggatggggcttgtattagggttctctagagggacagaactaatagaagatatgtaatatttaggatatctatctatctatccatccagagagagagagagagagagaggagtttattaagtattaacttacatgatcacaaggtcccacaatagtctgtctgcaagcttgaaggagcaaggagagccagtccgagtctcaaaactgaagaacttggagtctgatgttcaagggcaggaagcgtccagcatgggaaagagatgtaggctgggaggctaggccagtctcgccttttcgtgtttttctgcctgcttatattcactgacagccgattagattgtgcccaccagattaagggtgggtctgcctttcccagcccattgactcaaatgttaatcttttttggcagcacccttacagatatacacagcatgactacttcacactcttcaatctattcgagttgacccttagtattaaccattacaagtccgccccttgtcaccttggacccatacatatctcctgagatcatacataatcttcaaataaagacaataataaggtcataattacgcctaacataatacaactgtcttttgtacaactggaaatgtaccaatccccaacccaaataccattacataaagttaataatacataaatgctgatatgaagtcaataaatcttatgtctcatgataaaggaaaaggaaataaagatattttcttagtagaagtgtatacatgcacaaacatgtttttaacaaaagaaggaggaaatactcatgacaattacagtccttgtttctatagctgaccacgtggtcgtagctggtattgatgactacctttttctactacccattctgtattccctttgcattcagcaagcatgtcagcgggtcgtggttttctttcctggtggagtgacccaaatcttcattcctgaggagtctggaccatttgtagtcctgtctggattgggcgttgtagtttcccattgatcttaatcacagggcatagtaatactgagagacgccctaatggatctcctgtattccttgcatactcttctttacctttgttgtggagtagtagactgatttcatcttgatagtctgagtcaatcacccctgccaacactgtaactcccttcttagtcttgacttaaaggtaggaggagcccaaagtgtccaggtggcaatctcaacttccagtttaatggaatcatcgttgtgtctcctggtggcagcgttcctccctctggcactaagacccctgtgccagcagaacataatgttgcgggaacaggaagcaaagcttttgctagtggatcactaggggtgatggtgagtggtaccacttccacttccaccccttgattcctggacctgtgaatcctgactgtgggagaaacagtaccatatattattggacactgattcagagcatacatggccttctggagaactttgccccacctctacaaagtattgtcagctagttggcattgtaattgtgacttcaaaaggccattccaccgttctatcaatccagctgcttcaggattgggaacatggtaagaccagtgaattccatgagcatgagcccactgtcgcactttgttagctgtaaagttagtgccttggtcagaggcaatggtgtgtggaataccatgttggtggataaggcattccatgagtctacagatagtagtcttggcagaagcattgcatgcaggataggcaaacccatatctggagtaagtgtctattccagtgaggatgaacctctgccctttccgtgatggaagaggtccagtataatcaacctgccactaggtagctggctgatcaccccgaggaatggtgccatatcaaggactcagtgttggtctctgcagctggcaaattgggcactcagaagtggccgtagccaggacagccttggtgagtggaagtccatgttgttgagctcatatgtaacctccatctctgccactatgatcattt

SEQ ID NO: 12630 - DNA, 2300 bp, Homo sapien
atggggaagctgttgcttctggcaaaaaagcttcctcagagttcacaaacttagtgtccccattccaagttgcagggtcccattcttttccaatcagtgccctgactgtaatggtagacacctgatgaggatgtgtatgcaacttttgttgcaggtcagccatttacatgataagagcttgtgtctgttttccacaatttcagctctttctctacagcagataagactctcactcagggcaatcttagcagatttgaggctcagtatgtgcttctgaagccaggagacagaatccctgaattcatcattttccttcatcactttgtccactgaacttaggagcaaccaaccagcttcattatgttccttggttctccacatatggtattatgtagtcaccaaactccttgctgctcacagtggtgaatcagtagtgtcaaatgcatttattttgcataactctaaacagttcgtgccaaggactctcagtgttatctgtactattagaagtagagtccttagcattttcttattaagcagccaactccagaaaccccgaaaccaatgaaagaactccatccttaacattctgtttctttagaaccactcttggtaccaaaatctgtattagggttctctagagggacagaactaaggggagtttattaagtattaacttacacgatcacaagtttccacaataggctgtctgcaagcttgaggagcaaggagagccagtccgagtcccaaaactgaagaagttggagtccaaagttcaagggcaggaagcatccagcatgggagaaagatgtaggctgggaggctaggccagtctcgccttttcacattcttctgcctgcttatattcactgacagctgattagattgtgcccaccagattaaaggtgggcctgccttccgtagcccactgactcaaatgttaatcttttttggcagcaccctcacagacacacccaggatcaatacttcacatccttcaatccaatcaagttgacactcagtattaaccatcacagggcttcatatattgaatgagatcatgtccaagtcagtgtactttaggggtgttttgagcagggcagaaagaagctaatgctaccaccaaagagagctctgctttgttactggactgccatccactagaatttatgattaaacccattcctacctgctgtttactaggggagaggctgttgtttatttttggcagagcaaacgaacacagtgaggactactgggagactcacttgaagacaggcggattgcatctaagaggtggtgttgcccacactgcaaattgtgcttgtgtctgtctaaacagcaatgaaaactggccaggttcatagtaccctttcaaagtggagttctctaaggaaacattagcttcagttgataactctcaaagaaactaggacagttcccaggctgctctgtatttgtgtagataaacaacaggcattaatagagccatactgaaaaaaaaaaaaaaaacagtaataaaattcactgtgttctaattgtgtcctcatagcagcgttatattttttaaccccaaaatggtacctaaagtggagatttgtatgcattatgaactaaatacattttcttaagtagtatttattgtgtttagggtttgccactatttctgactaaaatggatgttcatggtctcaagcacattgaccagttatcttttaataaactattttttattgtgcacagaaccaatgtaatggcattagttacttgttctttcagtttattttgataacaattttctcttccatagtagttctctccatttaattgaatttgggcatgttatgtgagtgcttttgatctataaattagtcattaatagatgtaatatttaaatgattttagggatataacgcaaactattttatctcataactcagacacagttttcaacatttctagagagaaattttcctgcctgcttggaacaacactttgaattgtcatgtgaaagcaattccattgccatttcagtgtccagatttatgtcagcattaattactgtcgctggggagttctgtgagccaacattgtatgtgtgtggatatttacaaatgcaccgttggattctttgtcgttcaagtgaatgttgactatttacaggtaaagaactctcttgtctttgtagatatcaggttatttgaatcaagtaatatttgcctatctatttatacattaatatgtttaaaaagaaatttctccaagaagaagcattcgtcattcactatttgtttgatgag

SEQ ID NO: 12631 - DNA, 2300 bp, Homo sapien
gaagcctcgaactcctggggacaagcgatcctcctgcttcagcctcccaaatagctgggactataggcgcacaccaccatgcctagctaattttttatttttatttatttttattttttaaaccaaggaagatgttgaattttttttattttttaatttttttgtagtgacagggtcttgctatgttgcccaggctgttctcaaactcctgggctcaagcaatcctcctgcttcagcctcccaaaatgctgggattacagacatgagctactgtgcacagccctcttattaatttgtaaggagttctttatatgttctgaatctgtcctttggtagatatatgtattgcaaatatttccttctgttttgaggcgtccacttttcttcttttaatgcttaaaaattttttttttaaagcttattaactataatgaatacagcaacatggctgaatctcacacacactgaggcaagtgaagttagacactgtatttgtggatacatggacagtgatcctcagccttgtcatcatactacctggaaacttaattgtcttaaagcttagttagactttcatgtttttcagtccctcttaattgaaagtgtggtttgttatatagttatgtggtctgaggtttggataaggacagagttcttatctttccttttttttgttttgagaccgagtctcgctctatcgtccaggctggaggagtgcagcagcacaatctcagctcactgcaagctccgcctcccaggttcaagcgattttcgtgcctgggtccccagagtagttgggattacaggcgtgagccattgtaccggctattatctttcccttttgaatattaaaagcaattccagcatcttaaaaatctcaagttctgtgggtgtgtttgttcagcactccatagtgtgctgaatattcatagattttactaagtaagatgatgcagtatcagatattggaatcatatttttgcatttttttctcctgagaactgtctcctcagatcttcaagttaaggaatttagaaatcgaagcttatttatctagctttaaattgcattgggttgaacaggttagttgtgtcttgtagtgagtagactacatgatttttgaggtctgtttaataattctatttttcagctgggcgcagtatctcacgtctgtaatcccagcactttgggaggccgaggcaggtggattacctgaggtcaggggttcgagacctgtctgggcaatatggtgaaaccttgtctctactaaaaatacaaaaattagctgggcgtgatggtgcgcgcctctagttcagctactcgggaggctgggcaggagaattgcttgaacctgggaggcagaggttgtagtgagccaagattgtgccactgcagtgtagcctgggtgacagaatgatactccatctcaaaaagagaaaaataataattctattttttcccctttttgtttcagctttataaatagcagtccagggcaacagtacttgataaaaaggtattttgtttgttttggtttgttatggtcagctctacaaagatgcatgtgaccttaaaaatatttagaaatattataatactacagacaggccgggcgcggtggctcatgcctgtaatcccagcactttgggcggctgaggcgggcatatcacctgaggtcaggagttcgagaccagcctgactaacatggagaaacctcgtctctactaaaaatacaaaattagctgggcgtggtggcacacgcctgtaatctcagctactagggaggttgaggcagaagaatcgcttgaacctgggaggtggaggttgtggtgagccaagatcgcaccattgccctctagcctgggcaacaagagtgaaactccatcttaaaaaaaaaaaaagaaagaaatatgataatactagagacatttttctctaatgtctaatttaaaagcaactatttaccttagaaaggctggtttgcctcttctagaacaaagataagacctgtgtaagttatacagctattgtattttagtgaaatttattgtgcacttaaccaggttttttttctaattttatttcaggttataccttattggtgtggacgttgtctaaatttcggtagccatggcacaagaatatagtaagtactatgccatacttcctatgacctacctgctttacaaagtgttgattttctgtgtttaaatttctgattagagaaatgaaaacatagaaacaaaattttaaaaaatctacttttctcaaagagatgaagtcgtttgtcatctgctttt

SEQ ID NO: 12632 - DNA, 2300 bp, Homo sapien
aaatgaagaagcacatggttatcacagaggtccagaaaagagaggttcaggatggaggatgggttcaggagtacagatgcttcacagagccagaatgacaagggatttttggcaatcaagagatcccataagaggttctgctttcagcattctcagggacttgatattctaaatggctgacctactgtggtacaattagtcccagcaggagattgtaagctctgttattaaagagcttacaatcaaaatggaaagtgtataggaaggaggcatgacccatgcatcccccgtcatcttcttacttgtctgtgtctccctgctacacctggagctttccttgaaggagggactggtggatgtatggtccatgctctgaagacactacagaaacacagggggtgatttggatgagaggaggaagcatttcttctggaagaatggtgggttaggttgtgagagatcttgagtgatgaaaagactttcaactagttgaattgaactcattgaactaaactgtgggccctctagatggaattagtattctagctacctggatctaccatagacttagatagtatctagagctgtaaaattaaacatgtaataaggaaaatttttatatagcctgctctttcaacagatggaggtgacatgctgtgaattcgtattgctcttctgtttaattctattgctttttaccatattggtacttaggcaggtttgctgatatttaagagagttgctgatcattgtcaacataggtttgctgtttcagtcaaccctaaggaatagatgtgaaggtattattgatctgtcatcatatgatacacatcgatggacagcattatttttgactggtagtttaataagtgcaaagcatgtatatttccatatatgctagtcagtgcccaaagtttatattgtaccccaaaggggtttgatgctataaataagaatgagaaaagggagggagggagggagggagatggaaaatgagagggagaaaaaaaaaacatagaaaaggaaggtccttatgactgaaaaaaaatctgttatttaacataattgcccatctcgaacctcatcagtttttacaagccattaaaacgtggcttctctctctcccatgtgcttatttatattttgaaatgaaaagaaaacattgagtcgttgttatataatgtaatgggagtcttgaaatttcttttgaattggtaagaaatttttatatttaaaaataagattttataaactcattaaaaatattggaagtatatgagatggtttggaagagaaatactgatggtggagactgagcatttccaagtcagttttatttcttgtattttactgccagcttttagtttcctcctctaatggaaataacttcacatatcctgggaaagacagctgtgcagtaaagtattttctaaggcacatgaaatgtggcaagagtttttatcatggtgggattggtgtgttgtccttttagagaatgaatgtttggggaatgaaagatgatttatttggatttctgtgaggttgtgagaaatgttgaaagcatctaatttttataaaatctactttagaagtattatttatgctatgtagagtattcattgaaataatcagcttttggggagatgttgaacaggtgtttgcattttggttcagttgttcaattttccttccattttatgagaatcacttcttgaacctttgctatggccatatatgctgtcctttgatatcctcggaagcaacagttagcatgttttgtcacttgaagggttatcattgaaagaggaacatgtaaagttctggaatgtaaagggaataatagcagtctgacagtagaagtatctagaaagctcaaaagccatgtttaattaggtagcagtgcaaaactattatcccttttacaaaagatggtgaagaggagtgctagtgaaaacaaatggcatttatctgaatggctccacagactcagccagcacgagcccagccagagctcgcctcaccctgcattctgcaggcagcatgcattttttttttttttttttgaaacacccctacatgttccagcctttaaatagcagcgagtcttctaaagtgatgctgtgtgctgcaagagaaatgaaagcgcctgccttggaggcaggaagccgactagggagatgcttaattatcgtggaagtaggtgcttgttaccattgagtggagagtgcagcaagtgcaggtcgtcctccggtgtcagagccgtgatttgtagacaatgccgccctgtcagctcagtgctg

SEQ ID NO: 12633 - DNA, 2300 bp, Homo sapien
ttagctttccaacacacagacgtgaagcagcacactgggagccactaggactcagcaagcgcatgtataagcatgaccatcagcaacactgcgaaagagactgaaaacccagactgcaggactacacagcacagagcacaggaatacttagagcaaatggtctctcctacctgccccaactggccctgagggcataaatgtattatgacattaaataataatgaatattcatcattatggccgtataagtcatcaagaatagtttaattatgtctacagtattcagttacaaagcgttctgactaaaatgtaaagtgtctagccctgcagtgatcagcttcactcagctactccgtgtggcttccatctcttctccccacagatgcagtcagtggcagatgtgacacaaggtgcagagtactgcccttgcactgggaccaacctgctgtaaggcttcatctgggccagagcctggtcctccagctgatcactgttggatgcagcactcaaggggcgatggttttcatcactagcagcaaaaaatgaggctctctggactggaaaggagagaagaaaccatttagtattttggaaccacatccctggccctatctatcaaagtcaacaagtggtctagttggcagtcatgtctagtatttccagtgcaggatgcactggaaatcttatttcccaaccctcacagggaaaaatatgactgttttagctataagaggattgtagccatgtaatttccctttaagaaacatttgtgagtcaatttctagtcccccctcttccctgctcatcactgtagcattctatgaaatgtttctctggaaacagtccttgtgccaaatttccagaccaaggctttccactcagcaatgaaataaatgcgttcgagagctagcattatgcttaaaacttcttgaagtatgttttccaccacaagattcctggacactctggttggctttaacataaatccataccacctgtattccaaaacataccaagttaaaatttaagccaagaaaactaaatcaaatttaaaataatctcccattagaaaccaaaacttctaccatttgtatatgaaggagattaaccaacacactgaaaaatcaagttagaactgggaatttccatctgctaaataaacagcatgaaggtaaaaggattcactgctgaccattccatggttgcccgacgtacagattctgtggcctagtacatttctccccaaaattaaaacttgactaaatagcaattttcaattctcctaattaagagcaacaacaacaacaaaaacagaaaaaaaaatcacctgctataagtttgtaaagaataataaaaattttagaaagatctttaaacttagaaaaaagtcagtcttcattcaaaaaacaaaaaccccagctgacaatcttatgtcaacacacacatactgcactactttttgtgttttcattacagcaggcaagatcagcaccagtctgaggacctgcatttaagaaccgccagcctaaagcgagcacacggccagcaggctggcaaggagacaatgcagacagacaacgcgctaccgcgcacggagatgagggagaacggcaaagggggcgccccacatttgtgaggataggcgcgtggccaagcagggcaggcactgtgacatttagcaacaatgtcttgcgacgtgatgaaagatcctctctggatacatgttctttttagtcaagggacagctgggattcctctacccattgcccttcccatatacggaggaggcgaggcattcatgttatgaatcctgtggaggaaacaccaggtggcatctgattacataaaacatgtgcctaggtgtccagcttagggtctggtccctactgaatgctcagtaactgatagctcatctggtgaggcacatatgttttgagtgtgtccagagaagtagagtggatggagactgctcactccgctgcaggatcctgggctgtcttgtgtggattcagtggactcaccctcataggctttggcagcatctaccaggttggaccaatccaagtctgcagcagtgtcaggcaggggcatcaggccagggtcgggcataggctgcctgcgggtctcctggatgtcagtgagggagctgtccgaggctgagaactctcctgcgggaagggaggaggaatgagatgcttcttgtgcctgtggaagagccactcaaaacttacctctttcctgttaccacaatagattgtaagccatttgtgactgttatcaatgtccaggttagcaggctg

SEQ ID NO: 12634 - DNA, 2300 bp, Homo sapien
aagcagagctcctcaaagcggaagtttccctagttgctacctttcgctccatgtacagcctattctttaactgtgacaaacggccacagccagctccacaaccggcttgagccaagtattgagcctgaggaaagaaagattttatatttcagctttaataaacaactgggacatctgttacaattctattttcctcactaggctgggtatggtttctcttggttgcaggtttccccccaccccccgcctttctgtgtactaagcctaccataacacacatgtctgcttgtgtgttatcccattcgacgtgaaggcttcagggcagagactgcttcctttattatccatttctaatgttagaagagggtctaacacagagcaggtgctatttgtctattgaaggaaagaatgaatacatccattaatcaatgtagaatggcgggaaaagacacaatttgggaaggagactttactctttaacttctggacccatgtgaatgaggagtccaggtcatccatcgttaaaggcatttaggtattttatttcaagtatttttccccttttctggtgacatactacaattcaggactaaatctcaaatttattcttgatattgatagcattgatattgcacacaaatcccacggttaccgtccagcactagtgatcttgtcctatttccacctgcagctttttgaatctaagtacacatcgcatttcaaaactcccacgttaaagaaaggcatcagttcaagttactttctcattttctgtcttcgacttttttctgcttcccccaagaatatctgagagttacttttctcgaaagttcttttgtagtgttccagataggaatcatcctgtaatattccaaatgcagcgtgtggtgtgcatgttgaatacataaaaatgacgaggttaggaacaatatcgctgacggtcgcggtgtcccgttttaatttagagggcgccagcaacacgtcagtgagggagattcagaagccgccgggcacctcaccccgggccgggaatccctaagagaaccttgacgccgctgaagtttccggaccgggccagtttggaattgacgaaagcagcctccgcccggtcgagccagtctctcggttttctcggcggcttcttgaggatgaggcatttctaggttttctcctcctcgagcaaatcacggtctgcgccttccgcggctctgggaacaggtgagccgtgcggcggcgcccgcgggacgcgctcaggtgccggtccccgcccgccggcccctccctgcagcacgcggtccgggcccaggtgccggggcccaggtgccggcgcccaggtgcgcggggcacggggctgcagctccgctcggcatccgacagcgggcgccgctgcagcagctcgcgggccgcggagctgaacggcttcgcgagttggggcagctcctcgcgctcggccctgctcggcggcgagagctccgcctgggcgccgcgttcctacagccgccggagccgccaggcgccgagggaacggacagacctccgcgcacccttgccgaccggggcgggcagaggcgggcaagcggcgaacgcctgggagcgcggagagccaggccagcccggagcgcgccggggacaccctgtgcgccccgagtcccggcaccatgcgacccgccgcgcgtcctcgcgggcccggggcttcgctcttcgctcgctgagcccctgcgctcgccaccacggaaactcggaaagaggaggcgaggctgtggggagcggcgcggagacggactagacttcccctccgcccccaagaggctgccggtccccggttccctgggcttctccagctttatcatgaacctggcgcaaggttggctttaggaaaaattctggagccagagggagagtcaaggcaattctttggttgctaaggtaattgtagttgtgataaaaaatgggcaagaaacaaatgggggaaaaacatggtttaaaacagtatcctccctccccaccccattaatatgtgttgatttcatctcctgggtgtgggtgcttgtccatttcagatgcgtgacaggtgcccgtgtgtgtgtgtctgcagtttgggactgtggaagcacgagcttacataagtggttaggcaagctggcgtgtggacttgtgtgggatgggtgcaggtctgcatataaatcatgttcctgggtttctgggtgtgaagcgcacaccgacggggacgagagcgcagaggatggcgcttttagatacttccagtcttccgatgttgtgatcgcaggtagggcagcttt

SEQ ID NO: 12635 - DNA, 2300 bp, Homo sapien
cttgggtgtagtctctgacatacaacaattgaatgtggttcttcttgatatagaggcatgtgcaaataaagaaacaagttatctggccccatgcacccaacatgcaagggcaggataaggagaggataactgccatagacactccaactcacaaaggggaaaatgggaagtatgcaaggatagtagttctgaaatccaggcaagcaaatgatggaagctccttgatttggtctctaattaaggcctaggaatatttctctatggctttagtctcaccctttgaaatcttgagtgtgccctctcaggcatcctttcattttcatgaaaggtaacatgtgcttggggagttagttttctcagtctgctttttacttgttgacacttggtggtccaaaggcctctctgcattttgtactctttatgtctcttttctttccagctgatggtgtttcttcaagcacaaccccctttcaactccatgggtcttctgggaatccctttaggcttaattccactacacaaaagccacacccacaaatctctttgaaacaggtccttcttgagcttggactgaggtacaatgtctgtgagcttccagggagcactactggttgatagagaggatctgtaaggcaagcccttcgtccaagggtgtctaatcttttggcttccctgagatacataggaagaagaactgtcttggtccgcacataaaatatactaacaatagctgatgagctaaaaaataaaaataaaaataaaggtccacgcataatgttttgagaaagtttacaaatttgtgttgggccacgttcaaagccatcctgggttgcacgcagccggcgggccaagggttggacaagcttgtcttagtatctttaggtttttctgactaaacagtattctgagacactatctttgtttactgagatgttaagaaaagactttatagtcgcatccttggcttaatgtttggaccttgttttcctaaaagtgccctgaatttggtctttgctcagatgccatttcttaattttagcatcacgtaccatgtggggaggctgggaatctttaaaaccagcaagtcctggctcttttttatttaatagttttaccttcagtttctcctctcttcttgcagttttactctaagcaacaggaaaaaaaaaaaatcagaaagcactttcagcactctggttagaaatctccttaactatatcaccagtttatcaggcacattttctactttctacattactgcaggtgacagtgttgttaatttttctttcttttttttgccactacgtaacaaagattctctgttttccagtttccaataggatttctcccattttccttgaagccttcaatggcagcctcctcaaagtccaaacttctatggacagtgtgttcaaggcactttacacttttactaacatggtccttaatccttacagcttttccacagcccgctgcctcgttcaaagtcctatcacattttagtttcttgttacataagcactgcacctctagtaccaatgtggattagttatctactgatgcataataaactatcctaaaactcaaaactgaaaacaacaagaatttattgtttcacgtattttctgaaggtcaggaattgggagccatttagacggacggttttgactcagagtttcttatgagtttgcaatcaagctgatggccaggcctgtaatacctgaaggcttgacaagggggaggatctgcttcaaagctcactcacatgtgtgtggccagcttccattttttattagctcttgccacatgagcctctctgcatacattgcctatcgtcacaacagctagctttccataggttagtgggccaagagaaacagcccaacacggaaacctctgtctttcaaaacctaatcttggaagtgacatatggtcgcgtctgtcatcatctatttgtcaggggcttgaatatgaggaggtagggactgttggaagagtgttggtggatggcaaccatatttcctatctggtggtctaatgcattggtagacatcaataactacttaaaataagatttaataagaggcataataaacataaggagaagtcagcaccagcttaccctgggaaagtcaaggtgggcatcacagagaagtgatgtttaatttaggacctaaaggatagatgagatttgtcagacacattgaagagctcctgcctataggaagcatttgcatgcatttctctttttgcatgtcctacctgcttggtaaattttatagcctcaaagctttttccaa

SEQ ID NO: 12636 - DNA, 2300 bp, Homo sapien
tgaaccactcttatccattaggaaatggtgtcaggcctcccctaaatccaaattcctggatgccagccaagccaattttgcaagaagtctttgtaagtacagaagtctaaggcctacagcagtttttttctacatagtatctcatgaggttacagtcaaactgtcaatctggtctgcatcatctgaagccttgattggaactagagggtcacatggctattggctggaactgcttcaccatgtgggcctccaccagactgcctgaatgtcctcaacttatggcagctggctttccccaccgtgagggatccaggaaagcacgggattagagcaggaccaaaatggaagcttcagtctttaataaactaatattgagagcgacataccatcacttatgccatttgcaattggtcacacaggccaaccctagtacaatgtgggatggggaggggattaacaactctgtgagtccaggagtcagagatcaaagggagccatcttggaggctgcctaacacaggacaccctttggctcccaaggactcccacccctcctactgtccccaaaagtctcatcccaacagagcatcagttccaagtccagaccctcatcatctaaatcagccttcttgggtgtagtctctgacatacaacaattgaatgtggttcttcttgatatagaggcatgtgcaaataaagaaacaagttatctggccccatgcacccaacatgcaagggcaggataaggagaggataactgccatagacactccaactcacaaaggggaaaatgggaagtatgcaaggatagtagttctgaaatccaggcaagcaaatgatggaagctccttgatttggtctctaattaaggcctaggaatatttctctatggctttagtctcaccctttgaaatcttgagtgtgccctctcaggcatcctttcattttcatgaaaggtaacatgtgcttggggagttagttttctcagtctgctttttacttgttgacacttggtggtccaaaggcctctctgcattttgtactctttatgtctcttttctttccagctgatggtgtttcttcaagcacaaccccctttcaactccatgggtcttctgggaatccctttaggcttaattccactacacaaaagccacacccacaaatctctttgaaacaggtccttcttgagcttggactgaggtacaatgtctgtgagcttccagggagcactactggttgatagagaggatctgtaaggcaagcccttcgtccaagggtgtctaatcttttggcttccctgagatacataggaagaagaactgtcttggtccgcacataaaatatactaacaatagctgatgagctaaaaaataaaaataaaaataaaggtccacgcataatgttttgagaaagtttacaaatttgtgttgggccacgttcaaagccatcctgggttgcacgcagccggcgggccaagggttggacaagcttgtcttagtatctttaggtttttctgactaaacagtattctgagacactatctttgtttactgagatgttaagaaaagactttatagtcgcatccttggcttaatgtttggaccttgttttcctaaaagtgccctgaatttggtctttgctcagatgccatttcttaattttagcatcacgtaccatgtggggaggctgggaatctttaaaaccagcaagtcctggctcttttttatttaatagttttaccttcagtttctcctctcttcttgcagttttactctaagcaacaggaaaaaaaaaaaatcagaaagcactttcagcactctggttagaaatctccttaactatatcaccagtttatcaggcacattttctactttctacattactgcaggtgacagtgttgttaatttttctttcttttttttgccactacgtaacaaagattctctgttttccagtttccaataggatttctcccattttccttgaagccttcaatggcagcctcctcaaagtccaaacttctatggacagtgtgttcaaggcactttacacttttactaacatggtccttaatccttacagcttttccacagcccgctgcctcgttcaaagtcctatcacattttagtttcttgttacataagcactgcacctctagtaccaatgtggattagttatctactgatgcataataaactatcctaaaactcaaaactgaaaacaacaagaatttattgtttcacgtattttctgaaggtcaggaattgggagccatttagacggacggttttgactcag

SEQ ID NO: 12637 - DNA, 2300 bp, Homo sapien
agccagatccttggccaccctctatttgagtcaagcccccgtccctgatctcagaacaccccaagtccaccttttcctcccccacgtgaacaaaatcaatttcagggcagcccgccggcattaaaaattgctctacctaaaggtttaaatacctggtttttggtaagtaaaattcccataccacaaaaagagtaccaacaacacaccctcataaggggaccctccaggactccctgaaccttccctggagccctggtttctccagctgtccaaagttaaggctcccatacacctagagatcaaatatcaagatggtcagttgggttggttggtcgtttggcctacatggctcatgcaacaattaattcacctgtctggctctctgtctctgtccctctgtgtgtgcgcctgtgcgtgcctctctgtcgctgtctctctgcagggaaagtcgctggcgggcaagcgcctcacgggcctgatgcagtcctcctgaccgttcctaccgcaggtccagggcctgggcccgcggaccccacaggcaggcggcggcgctccacatctgcggacagagtttccttacgaggagacttggtcactgtgaaggagaaagagtgagggcaatgaagggcgatggtggggagactcggtgggtgaatggggagaccagaaagaaagagtccacagagcctgggctgggcccggtggaggctcctgtttacagccctctcttctttgtacagttgtattccaacactccactcgctaagaggccctgatcccagctcattcaggggagaacacgtcgtggggttcctgtcacgactatcacttgagattatattattatcctcactccctcgctgtctggagacggtcacaccttctggcaaattcaagaggcatgagtggaccgagagcacatccagcatttgcatcacctccctggcacctcccatagttacagccactacatccccaccgccgcctgtcatccctcacgtctctgtggccacccgggtgtcactgccagcaccaggcactgctttcacgtaaaatgtccaaatcacatcttcagcaagaaagcaacctcacggattgccccgcctcaaggtctttccaccctctttgagatcagcgttcggagaggtccccgccagcccggtggctgccctcaggtcccgtcacatgtctcaagggtccagcgttcgaggaagcactgttgtagatgacagagctttttgtttcacagctgcggggattctgctgaccatcttttagaaaattatttcataatttattctggctttgcccccttgctccttggtttattccctcatgttttactcaaaataaacatggccatgaactcaggggccattgggattctcccctctggcagccccaggtgggagctgggagggtccccagcccaggaggtggctggattgcagggctggcagcccccacgtggtggcatcctgacaggcacagtgagacccttgctgggtcaggtctcctttgtgtgtgaagctggggcagagtatgctacgaagggaccaggccaggccacagggctctcctcccagtctttatctgaaggcccagccaaagcacccctctaaaccggtcacctaggggaaatgcaaaaacctgcaaaagatccacctgtattccctgtgtgtgtgtgtcaaaatgaccatttgccaacctggctgtgaggtaatgtatgtaaagcaccgagtcaggtgcctgatacgcagtaggtgcttagcaaacggtagctaatactatcatcattgtcattgttattgtgacacccatgagcccacagacagagctgtattaagtaacctgttttgaatccagacattcactcccccacttgctatgactaccctcctttgatctatttttggtcataggtaaaaaaaaaaatctctcttgggagcatataaacaaaaaacatagaagcaataaagcgatcgctggtatttcttttctcatgcagccaaattcgccagctggtgaccaaaggctcagatgcttgcttatttgcagacccggcctcctgggtgctccccagtgacccatctttccaccccaccacctccaagtcctgtctatgtctgcttccacacagccctgtccccagggcaccagccttctgtccctcacagcagtgccatcgcgggcattaggagtcttcgttatgttgtatccttgtgagttcttgactaccatgcccaagtttcccccactggcaatggttcctctcttggaggtacagtggaaaccagaga

SEQ ID NO: 12638 - DNA, 2300 bp, Homo sapien
gtcacttgaagtgatggtctaagcaacacgttatggactgctgtaggtttggatgggttagagggggcagcttcagaattctcattgcaaactgctgtaatttctccccttcctttcttacaaaagaggggtgctagaatcgaagccatgggatgtcaggagtgggaagttgtttttttctatgcaaagcctctttccacaaccttccctcagctttccctccaaggttctgtctgctatgtggctcagggagccattttctaccagcctaggtattctcactgcatttgccaaggattggttttggtagatgatttagtcaaggtctgactctaatgttcctgaaatagttgataccatgggaagaaacaggtgtcattggcccatgagatgagatgtgcttgttaaggcaggtgggcgaatacttctctggagcctccctacggtccttccagagaagagtatggagcttggaagagcttccttcccctcccatctaccctaccactgctgtttcctgggagaaagtgaggttcctgaaattggcaccatgagggatgtatcattcctttatacaagagcagtcctggggctcatttagaatgcaaaaaagtttaaacctgagttttacaaatttcaggatgctctgatttattagggcttttctactcctatttctcacctttgtagtgccctgaatgagatttgacaactgaactttctggagtaaccgatacctgggcatggctggtggctgggtgtgtgtgtgtgtgtgtgtgtgtctgtgtgtgtgtgtgtgtgtgtgtgtgtgtggtgtgcacacgtgcacatgtatgtggatgcagatcacagaaatttcctcctgtggttaaaggaaacaaactattttatcacctaccacttatcagactttccaacttccttttgctttcagtgcaaatgaacgacatggcgtaaggggagaattgaaagggttctgaaagaatgggattagaagcgggtaaaataaaaatgaaatagatggaggcttaaccaccttgaatgggttatctgacagtaatacctttgtacagctgactgtcaaagtgaaggacaaacattgttcaaagaaacaccaacagaaaacaccaaagaaatcccaaccaggcttaaaaaccaccaatgaaaatcattgtctggggcagggttgagtgagcgtgcaagcgcctgtgtgtatgcacaacagaagaaagatcatggttgaatcttttgctgtcggaagctgtggacatatgtactatggtagagatgatgccttttcggggagtgggggaagcctcttccctggaaatgtttgctttgtcccaaatccccgtcaccaggtgatgcaccgggttaatccctttggtgtgcaaatggttttatatcttgctattaagaatagcattgtaataatgtaatgagaatattaataatgctgtctgttgcttaacccatgtgctgatatattcatcatacatgtcagctcatttgggaggagaaggcaggaaggagaaggaggcagcggccgcagcacgtaccacggaggacttattcggttccacgtcagaaagtgacacgtcaactttccacggctttgatgaggacgatttggaagagcctcgctcctgtcgaggacgccgcagtggccggggttcgcccacagcagataaaaagggcagttgctaaacccacggaacagactctctgggcaattagccatccccctctgactttggtcattgtgctggttctgatatatattttttttaatgaaaggcaactttagattttccctctatccttgctttttttcccttcacctcccacgtgtccctccatccctccccccacccctctgttttgggtatgtacaacagaagcacaaactactgaaacaaaacaaaacagcagaatgagcgttcttccgagagatggcatcgtgatgcgctatttattttccatagaaataggaagttagacggattgtctcttttctgaggggagggggtctttttgacaggagcagagttgatgtcctcaattttcatatttattggcaaaaggaagagaagaggaactttgggttggaaacaaagaaccaataacattaaaacattattatttatatattctagctgttattagaatcagactttttttgcgagagagagagagagagagagagaagggaaatcaaagaaatcgaagcaatatcctgtttagaggcaagccgcccggtggggagaatttcctcaatgggagacggttgcactattctg

SEQ ID NO: 12639 - DNA, 2300 bp, Homo sapien
cagcccctgatatgagtaggtgaaacagtttggttggatgctttgttccagcaatgaggagtcatttctcctttctacctttctatccagtgtctttttcactcccagtccccagagaagaactgagatgaccccatcatggttgactgtagcaactcagctctttccttgctctgtctgcaaaccttagctttagcccttttatattttgatggtagggctgtttagggcttaaggctggcttgagtagcaaatcagtaattttaaaaggactgtggtttctgctgcacacaaccctcaacgtgtgactctcaagggtggtccatttgtgcaattctgtcagttcatttactttccaaacatggtacctaacattgaattttttattctatggatgctagcgtagaagacagggcccttgtgatagcggactctgtttttttaagatacttaaaaaaaacagatgaaattcaatgcagtgtttttttaaaagcaagcaatcagatgaaatctctacttccagaagcaaggtcacttgaagtgatggtctaagcaacacgttatggactgctgtaggtttggatgggttagagggggcagcttcagaattctcattgcaaactgctgtaatttctccccttcctttcttacaaaagaggggtgctagaatcgaagccatgggatgtcaggagtgggaagttgtttttttctatgcaaagcctctttccacaaccttccctcagctttccctccaaggttctgtctgctatgtggctcagggagccattttctaccagcctaggtattctcactgcatttgccaaggattggttttggtagatgatttagtcaaggtctgactctaatgttcctgaaatagttgataccatgggaagaaacaggtgtcattggcccatgagatgagatgtgcttgttaaggcaggtgggcgaatacttctctggagcctccctacggtccttccagagaagagtatggagcttggaagagcttccttcccctcccatctaccctaccactgctgtttcctgggagaaagtgaggttcctgaaattggcaccatgagggatgtatcattcctttatacaagagcagtcctggggctcatttagaatgcaaaaaagtttaaacctgagttttacaaatttcaggatgctctgatttattagggcttttctactcctatttctcacctttgtagtgccctgaatgagatttgacaactgaactttctggagtaaccgatacctgggcatggctggtggctgggtgtgtgtgtgtgtgtgtgtgtgtctgtgtgtgtgtgtgtgtgtgtgtgtgtgtggtgtgcacacgtgcacatgtatgtggatgcagatcacagaaatttcctcctgtggttaaaggaaacaaactattttatcacctaccacttatcagactttccaacttccttttgctttcagtgcaaatgaacgacatggcgtaaggggagaattgaaagggttctgaaagaatgggattagaagcgggtaaaataaaaatgaaatagatggaggcttaaccaccttgaatgggttatctgacagtaatacctttgtacagctgactgtcaaagtgaaggacaaacattgttcaaagaaacaccaacagaaaacaccaaagaaatcccaaccaggcttaaaaaccaccaatgaaaatcattgtctggggcagggttgagtgagcgtgcaagcgcctgtgtgtatgcacaacagaagaaagatcatggttgaatcttttgctgtcggaagctgtggacatatgtactatggtagagatgatgccttttcggggagtgggggaagcctcttccctggaaatgtttgctttgtcccaaatccccgtcaccaggtgatgcaccgggttaatccctttggtgtgcaaatggttttatatcttgctattaagaatagcattgtaataatgtaatgagaatattaataatgctgtctgttgcttaacccatgtgctgatatattcatcatacatgtcagctcatttgggaggagaaggcaggaaggagaaggaggcagcggccgcagcacgtaccacggaggacttattcggttccacgtcagaaagtgacacgtcaactttccacggctttgatgaggacgatttggaagagcctcgctcctgtcgaggacgccgcagtggccggggttcgcccacagcagataaaaagggcagttgctaaacccacggaacagactctctgggcaattagccatccccctctgactttggtcattgtgctggt

SEQ ID NO: 12640 - DNA, 2300 bp, Homo sapien
atggttctacgaacagcaacaacagtcataaccagaccttatatttatactatgtctttgccccaaaggctgcagagcatttgacctgtcactgtctcagtcggcttttgctagtgttcccacctacaggtcaggaactcaagagacttatactgtgaatgggggctgacgtttcctagttatgggccagaggtcatgtccagcagacaatgcttcttctctgttagatggttaaggctggctcagagaccctttaagtgctgtcagctggtggattcccaaataaacctagtagaaaaggcaaagaagaatttactagacctgttttgagttctttggatggattgggtgactagaagtgtcctgatccctgtgatttagagcagaacattctagccaggggcagtggtggaagatcactgcctggtggctcaccccgggcttcctgctttgaggacaggccagaggtgtcatccaggaggcggcttaaacagcgatggttatcagacaacagtgcagtgtgtgccactgtctcagccttctcaacatatttgtgatctttgacccatcaccacaaggaagaggagatggggttaccctgtgtagtatggtacttgttccccttactagctccatcttatgccatctctccttgagccactaagcactggtcacactggcctttctgctccttggacaagccgtgttcctctccctgcctcagggagtttgcttatgctgtttcctctgcctagaaccttttccctccctcccctctgtcctcattcacaaggccagtctttgctcatcctccacatctcaacttctcagctcatgttctcatgtaggcctcccctggcccttggattagggaaaactccctcctaacaccctctcatagcactttgaacttgcctaccactgttttgagaagagttgtaattatatggtgacatatgcacattgtttaaatctgttctccctttcctagactggaaagtccatttggggctgggactgtagccattttgcagcttgcctagcatggagcctgccacgtagtcagcactagataaatgtttgtagatggaatgaatgaattcctattgtataattggggaaactgaaggatgaagagatgatgacttgccctagatcacacagtgagcccataaagaaacccccaggtggccaggtgtggtagctcatctgcatggtatgcctgtaatcctagcactttgggaggctggggtgggaggatcacttgagaccaggtgttcgaggtcagcccgggcaacatagtgagacccccatctctacaaaaaataaattagccaggcatggtggcatgtgcctgcagtcccagctacttggcaggctgaggtgggaggatcgcttaggcctgggaggttgaggctgcattgagccgtgattgtgccactgcactccagcctgggcaataaagtgagtccctgtctcagaaaaaaaaaaaaacaaacaaaaacccctctgggccccctgacatggagcccagtgagctccatgccccttccctcttttcctactcccattgtggggctgggtcctctgctacagtcttttatccctcccttaagcccagaggaacacatcctacctccttccttcctctaaagggagtgacgtgcttaggcccctacatggagagtatgccagattacatctggaattctcagccactgtgctgagaaatgaatggggaaccctgagccgatgaacctgaccttgctttggtcatggcttcactggatgatctggagcactcaaaactgttttcagcctcagcgtattcacctgcaaaatggaaattggattctatgttgcaatgtgactggcgggctgctggagagagataatttaaaattcattatctttaagctccatgacaagtcgggtactaaatgaaagtctatttttcttaaaaaaaaaaaaaagaaaaaaaagcagtggcttattatgaacagcacattcgtgttaaatctggtcagatgaacaggaagttacttgctttcatcagacagggcagggttccagaatggcagggaaaggagaaacattttcatatttctgaggtggccctttgggagcaaaaagaaacattacatttacaaaagtaaacattttggccccacatagaaaagggcccctaccagcatagtctcttgttagaaaactcttcttgggcaaaaagaatggaaaaaggtcagtgttctgggaggacttgtctggaaggggcccaagggcttaggagagcctcggta

SEQ ID NO: 12641 - DNA, 2300 bp, Homo sapien
gacattgagacgttccagggggagggtgagttgctgtcctggagtcgccaggaacagcagcgacagttccaagaagcgagagaggaaggtggccgagataaagagaacacttcgggaataagaatattaaaaagcggcaggacccagagcattagcaaacggcagagcacatgtagtaatttgttaacacgaaacggcagccttccaacttttgcactgaaacacggggatttaccctttgggggattaaaaatgttgatacgcaaagccaaaggctaatgaataggattcagtggcttgctggcaatatttaaatatttctgtccgggagcgcaaactcttctgcagttatttagaaaagtagggagttaaaccaaactataatactctcccgtgcgtctccactttccccagcccgaaaaggagctaccagcgctgtactgcccctttaagacctgctggctctcgggctctacaaaagggagtgacctctgggctttgacagctctcctaataactaccacggcgcaggccccgcccacctagctaccagcagcgccgattggccggcgggccggtatcccgcgctgtgattggcccgtcgcttcccctgagcgaacctttagaactctgagacaatattctgttacattgtagcaaaatggcgactgtcattcacaaccccctgaaagcgtaagtaagactaaaaaatgtacatattccgcgtggtttcaatatgaaaaaaaaggcgccttctgcgtggcgagcgctgccagagcattgcgcttgcaggcgcctccagccgcggcggggcttctctcttctttcagctcttacttcttcatcttctttttttcccccaacgcgcagaaatgtcaggagatgcaattaacaagaagaaaattgttacatttgtgttctgctaaattgcagagagagccagatataggggttgcaggcggagaagcccggcgctcgagcgctctacagcaggagggtcgcgggagctcggggacggcgcggtccccggagtcccccgcctcgcgggcagggagcgcggcttcgggggctgctgggcggggggcgagcgtcgggcagtggccgcctcggtgtacttggccgagccccgcgcccccgagcccgcggcccccgccccgccgctgggtccgctgggtccagcggacggaccgcggaggctccggagtttgcagggcgctcttcgccttccgatcgctcgcggggagtttgtgcaaaccttccggagttggagcaccgcgggggaagcagcgggtcccgggcgtgctggggcccaggtggtcgccccgggctttccccggcagcccccggatctcggaggcgctccgggcgatcgagcgtgtgtctgctcgtgtatttgcgagcgagctggctttagtggattaacgactcgggttaacttggggtggatttggaggcagggaagccgcaggtcttatgaatggtgttctcgccacctctgggtgaggcgctgaggcaggcggagaggcggttttggggctcctggcccgagggggcagcgtctgctcccggccgggcgaggggcaggtgcctctggccgcctcggggagactttgagcgcttgcccagatcctggacagagtggggcgggccgggcgaggactcgcgggggccagccccgggtccaacagccaatttctgcctgcctgccttcctcctccttttcatccttccttccttccttccttccttccttccttccttccttccttccttccttccttccttccttccttccttccttccttccagtcagtggaactgttaagccgccaagtccgctcgcgatcgcggagccaggggtggcctcggaaaactagtgtcgctctgaaaggggtgctattgggtgatgtcggcagagggtggctccctccgtatccgaggtgggctggggggtcctcaccccttcgaccgggacttccccgcccggacgaagccgcaggcgaagtggcagagggaggtgcaggtcgggtggggggcggttcatgccgaattctccctggtgcgtggccgctgtcgaccctggttcttttaattcagcgcattctcgtcttcacccctggccactcctggagttgaaaaccaggttcgctcccggggacggtagggggttcctaacgcaaaggaatgcacagggagaatcggacgtgtttgcgccagctcgtcgcccatcagaaatagggaaaggggtaggaaggccccaggtttcaaatatatttatatgaaagctgccgttaagagga

SEQ ID NO: 12642 - DNA, 2300 bp, Homo sapien
gtcataactgtattgatagagttaaaatgacattccattgggttacaaaaagcaaggctatcctttttttttttttaaagtactgtctttaattcactattttccaatccaatcaataaatctgatctgacattttcaagttcgttaggtagttagagattatgctggtttctgcatccaggccttaacacaataaatgatatgtacatgcttagagtatgtgttttctttaatatgtaatatacatttgttttttctctcttcccccattgtaaatcttgttcaggacatgctctacatttcctcctttatcaggctgcatgtaagaaaatacgttgtcgtctactaatctgaattgttgtgtctttgatacctcaaagaggttattgggagttctaactgataattcaaactcatacttcttgggtcagaatacagttcttgcttttcaatgatgtcaaggcccacctcaggcaaagtataggcttctgaaccaatttcttgtcaaattagtaaagaagggatttttcaaacttcaattttggaaaaggagataactttttcaaactgtaatctctgccaagatgctatgcaaaggatttacaaaggaatctatagaactcaattctgcttcttaaatacgcagagaggagttaaagatttcaaatcttttaaaaacatagtgattcagccacgttctgtttatctgtaaatctaatagtgtatgtagttgaactcttaaaattctggaatgtttattttattttattcattgtcttgagaggagcaaaaggaagcgagagggcatagctttgaagaactggcaatttggcaacttctctccccttgccacccctcccccactatcttagctatttgatctgattaaacagctttggaatggtagccagacttctgtatgctaacgaggcccctaccctattcgcgatttaatgcgatttcatccccccagagcttcccggtgcccagtggaagcctgacttcgcagaagtctcccaattttgtcaggggctcgccagtgaagagttcacactgacttgaagcagacacagactcattggacgcctcgggtcacatcggattattcattagcaaattctttccaccttctatctaagtagtgaaaggtgacgccagaatcgcgtgtgccactcctctaaagggaccctgataacacccagtccaggctctacaacttctgcctagtcacttgcttcctagcagtagaaagtttccaaaggttgccttaagtcctccctacccctaagcctaaagatcagagctccaggtcccaccacctagcaggaatctgagcattttggaagtttctggtgtagagggaagaaccgaaggggtggtagcggggaaccgcgcagagtaacccccctgcactacgtaaggaaagccctggctgcaggagggagcgagcctgacattgagacgttccagggggagggtgagttgctgtcctggagtcgccaggaacagcagcgacagttccaagaagcgagagaggaaggtggccgagataaagagaacacttcgggaataagaatattaaaaagcggcaggacccagagcattagcaaacggcagagcacatgtagtaatttgttaacacgaaacggcagccttccaacttttgcactgaaacacggggatttaccctttgggggattaaaaatgttgatacgcaaagccaaaggctaatgaataggattcagtggcttgctggcaatatttaaatatttctgtccgggagcgcaaactcttctgcagttatttagaaaagtagggagttaaaccaaactataatactctcccgtgcgtctccactttccccagcccgaaaaggagctaccagcgctgtactgcccctttaagacctgctggctctcgggctctacaaaagggagtgacctctgggctttgacagctctcctaataactaccacggcgcaggccccgcccacctagctaccagcagcgccgattggccggcgggccggtatcccgcgctgtgattggcccgtcgcttcccctgagcgaacctttagaactctgagacaatattctgttacattgtagcaaaatggcgactgtcattcacaaccccctgaaagcgtaagtaagactaaaaaatgtacatattccgcgtggtttcaatatgaaaaaaaaggcgccttctgcgtggcgagcgctgccagagcattgcgcttgcaggcgcctccagccgcggcggggcttctctcttctttcagctcttacttcttcatctt

SEQ ID NO: 12643 - DNA, 2300 bp, Homo sapien
accaatgggcgctgtgcaccaagtcctgggtgaggtactccatcatcagcgcttactccttacaacctttctcagtagatgtcttatcctcattctaatctgtgaagaaactgaggttggaatgcctcatgacttgcccaaggcccagcaagcttcatttgttcactgatttgcaaacattctttaatctttcatctgtgtgtgttgcaggtccccgaggtatatctcatgcccacgtcactgtcccctctgtggacattcaacagagcctgctggccggctgccagccactcattgactcagcaagcccaagccaactcctcctgccaccttcctcaagtgtcccctggctcttcagtggaaaatccagcttgactcctccccgagagttaagtctggccgattctccctctgaattctgcctcccatctgtaccccccttccatcctggctacccccaccctggtttggccctcactacctttcacaaggactgttgctgcaataagttccttaggggtctcccagctgacttccacaatcttttctccccaaccccctacacggtgatttcccagaagcacagctctagtcctgtcacttcccaactctagaaccctcagagcctcccattgtctacttttttttttcttgagacagggtctcactctgtcacccaggctggagtgcaatggcgctatctcggctcactgcaacccccgcctcccgggttcaagcaattctcctgcctcagcctcctgagtagctgggattacaggcgcccgccaccacgcccggctaattttttgtatttttagtagagttgggggtttcgccatgttggccaggctggtctggaactcctagcctcaagtgatccacccgcctcaacctcccaatgtgctgggatttcaggcgtgagccactgcacccggcctgactactctttccctggcaattgctgcgtcaccaagccccaacccaccctgctgagttttccttccaagactcccctcccatccagccggcttgaaccggcctccagtcacgttgtttgttcagctagaatttttctctgccttctcttcaaggccgctcaagcttcatgaagcggttctttattctgactatgcccacttctctcatttccctcatcacccggccccgctccacatactgcatttatctataaactcctgagagccaggagtttagcctgaaatcctagcttcctggttaagagctgaaatgccttcgcacggcgtgcaatgggtgaaccccaccgcctgctttctaacgggtccaagccgcgggcaggggcctgtgttacggagccgcatgacacaccaggcctactgctggaccccaacaagcctagcctctgtgaatccagctgtcctcacaaactgtctcttcgggacacaagcccatcagaggcttccgttttcctttcataagatctcataaccgtcagctgatacctgggacaggcacagcacacataggtcattctagaaatattggtggtctgaacaaactctaagctggagaggacatgagaatgatagatccgattccttctctcaacagaagaaatcaaggcacagagaagggaagagactcgccctaggtcccacagcaagcagcagtactggagccaacacggaggccccccggtttcacggtcagggctcgctacgctacaccctgaacgcagacccagggcagcggcctcggccgcctgaggccactgccgaagacttcgccgccagtcgtaacatcacgttacttctgtccctcgcctcacagactccttcgctctttccactacagcgagaggacttctccagggccgcatcaccctgcggagggaggaagacacggtctctcacgaaagggtctccagacagttccgctgctccgggagcagcccccggccccgcccccgcgtgcgcctggccccacccccaagcgctccatgaccagcctccacgtgcatccgccccagacaggccaggcctgggaggagccgaagccccactccccgccttcttcatgagatcgtccctattgacgtcgacagacagaagccgcgtccagtgagaaggaaagaacggccgctatagccctatcggctgctacaacaccaaaacgcatccacctaactggctgacgctacaccttggtctttccgggtccttgcacgcttcgctccaactcctgcagagctgagccggaggggaatccggaagggacacgctgaacaggtaagactgtgctgcctggggtgcctactggca

SEQ ID NO: 12644 - DNA, 2300 bp, Homo sapien
acttgggatgctgaggcagaatggcttgaacccctggaggtggaggttgcagtttgctgagattgcgccattgtactctgtcctgggcgacacagcaagactgtctcaaaaaaaaaaaaaaaaaaaagaagaaattgcaaatgctgtaaaagtgcatgtgcgtgtatgtatatatatccttcataaatgagatcataccatttatattattctatgatttggtttattttcactttttttttttttttttgagacagagtcttgctctgtcactcaggctggagtacagtgatgcaaacttggctcactgaaacctctgactcccaggttcaagtgattctcatgcctcagcctcccaagtagcctggattacgggcacacaccaccatgcctagctaatttttgtatttttagtagagacggggtttcaccatgttggccaggctggcctggaactcctgacctcaggtgacccgcccacctccgcctcccaaaatgttgggattacaggtgtgagccactgtgccaggcccgaaatgcctattttaaatgccattagtatatttaaaaaaaaagttattaggccaggtgcagtggctcacgcctgtaatcccagcactttgggaggctgaagcaggcagatcacctgaggtcacgagttcgagaccagcctggccaacacggcaaaaccccatctctgtgaaaaatacaaaaattagccagccgtgatggtgtgtgcctgtaatcccagctacccgggaggctgaatcaggagaatcccttgaaccccggagacggaggttgcagtgagctcagattgtgccactacactctagcctgggtgacagagcaagactctgtctcaaaaaaaaaaaaaaaaatgttgttagccctatcttatttttgaagttccacctgattgatgcagtactctgttggattcaaaggaagtcaaagtactactttttgtgtttattattgaccgggaaatgtggatttggaaatgtgatgaatgagaagaacagtttttggtgtgcacacatgcatgcacatatgtgtgtgtgtgagagagagacagagagagagctatgcagctgttttctgccctagtggcttgcccatacatacctgggagtggtttctctattcctcctgctgacaggatcacttttgatgtcattcagccacactgttgtgcaggccccaggcccctttttttctagctggcttatgtcccatttcttgactcctttgctcagggtccacaatagcaacagcccagatacctacaagcagcgcatacctgcactgagcagataaacctgcttgcaggaaataaatgctcaggtctctatcgaatagaggaattaatattcaatactggaattgaatattgagttaactatggttgtctgtacttacagttctgaatagttgggagaaccatttcatagttgaatttgtataggttttatgtaattttgtcttaatttttttttttaagacagggtctggctctgtgtcccctaggcaccatctagactcattgcaacctctgcctcctgggcccaagccatcatcccaccgcagcctctcaagtagctaggactaacaggcacacgccaccacacctggctaatttttgtattttttgtagagacagggtttttgcctgttgcccaggctggtcttgaactcctgagcttgaggtatctgtctgccttggcctcccaaagtgatgggattaccaggagtgatccactgtgcccagcctttatgtaccttctttaacctctgagctctaaatgtagaaactcttgacgttccaattctgtcacatcgggaagcatttatgaagtatttataaagttatgttttgttggggtgtgatgtcactgatgacagaagtgtgtcccttttgagtcaggaaattcattgctagcccttgatgactggggccagccctatagatacaatagaaagagccacactgttgtcaaggcaactaaagttcaagatcatctggtctccaggcaaccttttccagacttgcctcaaatgctttcccaagctttcttggggtaggtgggcccttccctgcctttctcttctagctttgggatctcaggaggaggagaacccaagaaactgtggaatgatgtgaggtttggaatttttgaacctgctaataagtatatggatcaggtggtatgtaaagaaaaatcagggccgggcgcagtggctcacgcctgtaatcccaacatttttgcaggctgaggcaggtggatcacttgaggtca

SEQ ID NO: 12645 - DNA, 2300 bp, Homo sapien
tctagagcaagcagtcaatctttggcaacacagactcaggctttctttcaatgttgtttcaagaaacaaacaaaaagtgaaagcactaaacaaatataaggccataaaaaaagaaaaaaaagcctgataaatgttaaccattagcctgcactgtagcctgaaaacttatctgaaaatttagcccatctaacgcaaagaaaatttctttctttttttttttttcttgtttgagacagagtcttgcactgttgcccaggctggagtgcaatggtgcgatcttggctcactgcaacctctgcctcccgggttcatgtgattctcctgcctcagcctcccgagtagctgggattacaggtgcacaccaccacacccagctaatgttttgtatttttagtagagatgaggtttcactatgttggccatgctggtcttgaactcctgagctcatgatccgctctccttggcctcccaaagtgctgggattacaggcatgagccaccgtgcctggccctcaaagataatttcaaattgagaagttctgaaagtataatagcttttttttttttttttttttgagacagagtttccctcttgttgcccaggctggagtgccatggcgtgatctcggcttactgcaacctctgcctcccaggttcaagcaattctcctgcctcagcctaccgagtagctgggattacaggcatgcatcatcacgcccggctaattttgtatctgttagtagagatggagtttctccatgttggtcaggctggtctcgaacgcccgacctcaggtgatccgtccacctcgacctcccaaagtgctgggattacaggcatgcgctaccgcgcccagcctgagaagttctgaaactatagaaggaaagatcagaaaaataataggtaggaaaaaaaattcatggttggcttggagaatacccttgaagggtgttaagtaaaaatgataggaggcctttgttttggactaaactcctgcaccaggccccaatagacctggctaaaataaaaatggagtcacccatgctaaagtttcacctcaccaaatccaaactaagttgttaccaaacccaagctaagttgttatctgaccttcagagaaatcaggaaagagggataaggacagccagtttcccaaacaggcttgttttaatgttgcatgataatgaagctccctctgttgtaatccttacacaaaagaagtagcctgaagtaactgatgtcaactaatcagttatttttctattgttctgtctctctgtcctcaccttccaaggaaagtagcttagaagtgaccaatatgtcaaggtcccatgagaagactgaaaaaaagagaagaaagaggaaagaaaagaatgacaagaaagagaaagaaagaaaccaatatgctctttgttctttgcttttgcttcctcaagcttttctctgtctacaaagccaacctctcctgctcagctcatcagaacattcactccactttctggaatgaagtgttgcctgatcctagagtcgcaataaagccaactgagatcttaaaactaaattcgttgtaattttgtcctttgccaaggggggaaaaacaacaaaaacttcccaagagtacctatatcctcttatcactttttctggtcttttccttagtttttgcgaagtgaaattgggaaggtggagactgtctgtgctcacacgtttctgagggaatggtgtgcaagaggttacttgaatccaaattaattgactcaccatttcccacttatactagacattattacatcagttctctaatgtagcaccatgccttccccagttacaacccaaaagaacgtgctgaaacctgcggacaccacactcaatgcaaaaactccaagtcccgaaatcctccgtagcctgtccccaccgcctcctcgcaagagcagcctcttcagtactgggagttgtagtcattcagagtcttcctttccgggatgaggggcgagagcgcgcctcgaggagctacatctcccaggaggcagtgcgcactacgcccttgctggcgccgggatcctccctctctcgctcctccctttctgggctgcaccgctcacgccttcctgttagtccgagctgggagaagttcactccgatcagctgatcccaactgacaacaggagaggaggaagcccgggaggcaacgaaggaggagggtggcggagatggagatgaggatggatctgccggtgtcctgaggaatagcctctgcccccactggcgccctgcggccccccgacgccgccttgctgcggc

SEQ ID NO: 12646 - DNA, 2300 bp, Homo sapien
ccctttattacacagtaaacacaaattcatgtacaatgtttctaataataaaaagggacacagattaatctgagatttctgtttatgccttttgttgtaaataggcacaaactcttgggcggccatggtggctcacagctttgatcccagcactttgggaggtccaggtgggcggattacctgaggtcaggagttggagatcaacctggccaacatggtgaaaccccatctctactaaaaatacaaaagttagccaggtatggtgacccacgcctataatcccagctactggggaggctgaggcacaagaatcgcttgaactgggaggcagagattgcagtgagccaagatcacgtcactgcactctagcctgggaaacagagacacctcctcaaaaaacaaaaacaaaacaaaacaaaaaaagaaactcattttatttacaaacaataaatagcattatagagtagcactataaaaactataaatttgaatagcactttactgaacaaagtacaaacatacataagttaatttcgtctcccaagtaactgggactacaagcactcgtcatcacgcacggccaaaggtattattaactttagttaatggtaaggaaacctagcaagcagaagtatagaaggatgtaaattttgcagatggtagtaattagtgctactttctcatttgtgctcccactaaattttgtgttctattggtactcatcatatgttaatcatttcttttcttttcttttctttttttttgagacaatgtctcactttgttgcccaggctggagtgcagtggtgccatctcggctcactgcaacctccgcctccagggttcaagcgattctcctgcctcagcctcccgagtagctgggattacaggcgcctgccaccacgcctagtttatttttgtattttcagtagagacggggttttgccatgttggccagggtggcctcgaactcctaacctcaggtgatccacccgcctcggcctcccaaagtgctggggttacaggcgtgagccaccgcgcccggccggtaatcatttctgtcactcaacaaatatttattgagcgcttgctatgtaccaggacctgttcttgcacaaaacaggcaatccatgcattgcttacattcacattctagtgggggtagtgacggaccataaaatcagcaagaaaaatgtatgttatgatagatggttatgagtgctttagagtaaaattaagtaggggaggcaggcaggaagtgtgtagtatgtttcaattttatattaggctggtcatggtttgtcatctatttcacctggctcacagttcttgcaggacaggaacaaatctcacttccatttgccttcatacttccagcacttaacacagcaccaggaactcagggaggcaataactttatactgaatccgttttatgccttcctagaggcaagcagttgagaaaggcgtgtaactagatattgcctataaggtccacaattggaataacgtaatcatttatgattaattttattcatttccattaacttaagctaagttcttttagcacgtttagattacagaacgaaagctgtgttaactagtattacaggacttttcacgtttttccaaacatcttctagccacctctttggccctacaactacgcataagcttttgcttttcaaaaaacctccacagcctttgccaattatttgttgatctcgagtagttgttataacagcacttggggtttaacactaaggttgcagatcgcgcccagttatcagttcctcgaacctcaaggaatcacaaagcaaggttccaccccccgaaaaactacgaaaagtgagaaagcctctaacactcctcgcgccgtgcccagccggaaccttgacctcaagatggcgtcccgtagtcgtaagattcagtcggctccaatcaaacatggtgggtcataatttacagttcgggcctttctagtaaccgctagacgctgcttctctatggttattcgtctcggcttggtgagtcagagccaacagcggagacgatctatatacgttcttctctatggttccgcgctccccgcccccggccgcagtgcacgccgggcaagaggaagacctccatcagctcgccgcgcagcgcggctgtatttgcggcctgtgcgagtaggcgcttgggcactcagtctccctggcgagcgacgggcagaaatctcgaaccagtggagcgcactcgtaacctggatcccagaaggtcgcgaaggcagtaccgtttcctcagcggcgggtgagtt

SEQ ID NO: 12647 - DNA, 2300 bp, Homo sapien
gattctcctgcctaagcctcccatgtagctgggattacaggcatgcaccaccatgcccagctaattttgtatttttagtggagatggggtttctccatgttagctagactggtcctgaactcccaacctcaggtcatgtgtccgcctcggcctcccaaaagtgttgggattacaggcatgagccaccgtgcctggccgaccctgtttcttaaaaaaaaaaaaaaaaaaaaaaaaaaaaaaaaagtgtgttgctgaaaataaagtttgaggtgaaaaaaaaatttttttctttcttttttttttttttttgagacagggtctttctctgtctctcagcctcaagccatcctcctgcatcagcctcccaagtagttgggaccataggtatgcactatcatgcttggctaatttggaaattgtttttaatactaaaaatgctaatgtttaaatattaacattaaatggcaatacttaataaaatgacaaagttttctttaacatgacaaactaagtgaaacagttaaatgtgttcttttttttctttttctttttcttcccaccccgagacagagtcttcccctgtcacccacgctggagtgcagtggattacaagtgattctcctgcctcagcctcccgagtagctgggattacaggcgcacaccaccataccctgctaatttttttttgtttgtttgttttagtggggacggggtttcgccatgttggtgaggctggtctcgaactcctgacctcaggttttccacccgctttgacctcccaaagtgttgggattacaggcgtgagccactgcaaccaacctgttcttaaactttaaaaaatcaaatgctagcttctgattcttcagttttgattcaagaatggttacaaagtttacttttaagtttaaaaaaaaaaactatgacttttttttctcttgtcaaaagttgtatgttctctttatatttgaatggttactatctgactggaagtcaggagtttatttccccctgctgagatgtatggttcatgagcacatttgtctcttaggtagtggccagcattgaagcaacaaatactgtgtaacttggtacctttagtttttaggattctgatagatataagaaaaatgggccgggcgcggtggctcaggcctgtaatcctagcgctttgggaagctgagtcaggcagatcgtgagatcaggagaccgagaccatcttggccaacatggtgaaaccccgtctctactaaaaagataaaaattagctgggcgtggtggcgcgcacatgtaatcccagctactcaggaagctgaggcaggagaattgcttgaacccaggaggtggagattgcagtaagccaagattgcaccactgcactccagcctggcgatagagcgagactccatctcaaaaaaaaaaaaaaggccaggcatggtggctcacgcctgtaatcccagcactttgggaggccgaggagggtggatcacttgaggtcaagagatggagaccatcctggccaacatggtgaaaccccgtctctactgaaaatacaaaaattagctgggcgtggtggtacgctcctgtagtcccagctacttgggaggctcaggcaggagaatcgcttgaacccgggaggcggaggttgcaatgagcagagattgcgccactgcactctagcctgtccacagagtgagactctgtctcaaaaaaaaaaaaaaaaaaaaatcagaacacttaaaaactattagatacccatctgaattctcagtttggtctaaaaagattcgtttatgtgtggtatttaatttttggatattaactgaacctcaaaatttttttcttcctttatatgtattcctacatgattgtaggagtctgtcctgaacttcgatcatgtacattttggaaacttattttagaaaaaatctaagtcgtaagaattctcaatgaaaagagggtctttgccaatttctttgggtaagaaaagttcagaattttgcagatactctaaaaatgaaagtcaacaaagaaggcatataaaattgtgacgttttcaaataaaatgatttgtcatgtccttttttctttagactgctgcagtaagaatgtcttttccacctcatttgaatcgccctcccatgggaatcccagcactcccaccagggatcccacccccgcagtttccaggatttcctccacctgtacctccaggtaagtttgttgatactgttttttgtcgttaaacttgtacttttgtctttgtgatactaacttcaggaaaatgttagatatgtgactgt

SEQ ID NO: 12648 - DNA, 2300 bp, Homo sapien
tattcagttttctttgtggccagatacatacatttttattatttggtatgtgtttcctcgtttggtcatagaacttttcttttttgttcccgcccctacccccacccaagacggagtctcactcacttgcccaggctggagtgcagcagctgcgatctcagctcactgcaagctctgcctcccgggttcaagcgattctcctgcctcagcctcctgagtagctgggactacacgtgcctgctgccacgcccagctacttttttgtatttttaatagagatgggtttcactgtgttagccaggatggtctcgatctgctgacctcgtgatccgcgtgagccaccgtgcccgacccataacttttctaaggaggtgtattctgttaggaatggtaattggtagggtcagtaaggtacagggtaattgaggcctgtagaattcattcttcctctttcttcattagtgggaaaggagaaaaataacatatttgtttgatgtggattgggaggagataataaattcttcctctgtggcaggagttatgggtaaatattgttggtatgattagaaagccctgctactatgagagcaccttctatatttccatttcttgggggtgttggagtatccagagaggagggtagtgtgtgatcagttattgtaaaaagagtgaaatcacttctattcccaagtaatttgaaatcaagaaagcatcacagaagtgtactgtattgttcacgtcataaatgtatagggcattgctttgcagattagtatgagctctgtttttcttttttaaaaaagattcttggtggattttttcacagattttccgcagatttccagtggccccactgatcccttatccactcatcactaaggttagtttaaattgtaggctttgacaatacctgtgtttactgctgattgttgatttgtcattcttgtctatctgatttttcactatttaactttagattgttagatttgttattgtggatattctgtttacttatttactctttgagacctatacagaatatctaacctttaactgtttatattgaagtagggtgttctttattcattccctcctgtgcccgttttcttttaggaggatataaatgctatagaaatggaagaagacaaaagagacctgatatctcgagagatcagcaaattcagagacacacataaggtagtattcttgtcttttcacttgataccaatctagactttttacagaatccaaagcaaagagacaaaaaaaatcaaccttaaattagaatataattttaaatgttttttataggtttaattgatatttagatagaaaaaagaaacagaagaccaataccatattaaagtggtccttgacatgttgtgcttagttttttcagttactgactattctgcagtcatctcactttaatatgaatagaagctaattttatttttagatttcaacataaacatcaaggtcagacttaaattagattcagggggcagcaggataacatacactgtagtgtatttctgggggcagttatttaacttgatcttaggaataccttttctttagagctgagattaaaatttacattttatatttgtatagatttaagttgagtgggggagattttaaacagtaggtcagtggttaccagacttaccaaattttagatgcatggaagaactgtaaattcccataaagctaatctattcattgacccccaccattatgatagagatcatatggtgactaatgcaagatgaaactctcagcttggaaagtaacaaggaataggatgtaagtatgagcttctgttttttattatatttatggatgccccctcagaaaaatatgcaaaggggtaactggcttggaaatgggtatttatgcatagtaaatcccactcacgagttttgcctatttgaagcttctctcaatgacagtgcatctgtgaatgttcgctggtgttgaaaatgatgcttttgaacggtgcaatgcaaacactgcatgaaatgtattttgatggtcgagataataaggtgttgctggttcttactgatagactgagagatctttaactcagtgaaatgttaaatgttcattttctcttttattcttactttttcccattgctttcaaaatctgcagttcacaaataatgccaatgaatcagtgctgctgaacacttactatccagatgcccagcccttgctcacaaacacaatgctttttcaagaattaaatgtgtctaagagcacaaacataattctcccaaaattaattttgag

SEQ ID NO: 12649 - DNA, 2300 bp, Homo sapien
tgtactcccaacctcaagtgatcctcctgccttggcctcccaaagtgctgggattacaggcatgagccaccgtgaccaggcgttcatgaaaaattttcatgacattctgtgaggtgggtggaccataatttattgtaccacatttatttatttatttatttatttatttatttatttatttatttatttttattttttgagacatagtttcgctcttgttgcccaggctggaatgcaatggcgcaatctcggttcactgcaacctctgccttccaggctcaagcaattctgcctcagcctcccaagtagctgggattacaggcatgcgccaccacgcctggctaactttttttgtatttttagtagagacggggtttctccatgttgatcaggctggtctcgaactcctgacctcagatgagccgcccaccttggcctcccaaagtgctggaattacaggcgtgagccaccgcaccctgcctattgtaccatatttagtttcccaattttttgctatataatattccatgaatatctttgcccaaaatttttgtagattgtttctaagaatagttcatcagcattttaagacatcctattaatattagcggactgcaatcagattgaagtagttcacaaatagatgggttttagcctgtatttgttcaatactgaactattgtatgtatcaggcactgttatgtatcaggcactgttctcagcacttgtaaaatgtatatgtgctgctgacaagcatgagcacttgtaaatgaacaaactaaaatccctactcttgttaaagtgggggaggtgaagaattttaaaaacatcttttttcgttcaaccttctcccacaacttatctttcattctgctaatggaaaatattacttttgttcttaaatatgaagcttttgtgtgtaaaaagtattagaatctcatgtttttgaacaaggttggcagtgggttgggaggagggattggagattgatgcgataggaatgtgaagggatagcttggggtggattttattttttaattttaatttttattttttgagatggagtcttgctctgtctcccaggctggagtgcagtggtgtgatctcagctcacgggttcaagcgattctcctgctgcagcctcccgagtagctgggattacaggagcgcgccaccacacccggctaatttttttgtatttttagtagagacggggtttcaccatgttggttaggctggtctagaactcccaacctcatgatccgcctgcttcggcctcccaaagtgccggaattacaggcgtgagcgactgcacccggccgcttgggggtggatttttaaagaaactttagaagaatgtaacttgcccagataccatgtaccgttaatttcattttcggttttttgaatacccatgtttgacatttctccgttcaccttgattaaataaggtagtattcattttttagttttagcttttggatatatgtgtaagtgtggtatgctgtctaatgaattagacattggtactgtctttaccaaaactggacaaagagcaggcagatgcaaaaatcaagtgacccagcaaaccagacacattttctgctctcagctagcttgccacctagaaagactggttgtcaaagttggagtccaagaatcgcggaggatgtttaaaatgcagtttctcaggttctcgccacccaccagaagttttgattcattgagtggtgggagagggcagagatatttgcgattttaacagcattctcttgattgtgatgcagctggttcgcaaataggtaccctaaagaaatgacaggtgttaaatttaggatggccatcgcttgtatgccgggagaagcacacgctgggcccaatttatataggggctttcgtcctcagctcgagcagcctcagaaccccgacaacccacgccagcgctctgggcggattccgtcaggtggggaaggccaggtggagctctgggttctccccgcaatcgtttctccaggccggaggccccgcccccttcctcctggctcctcccctcctccgtgggccggccgccaacgacgccagagccggaaatgacgacaacggtgagggttctcgggcggggcctgggacaggcagctccggggtccgcggtttcacatcggaaacaaaacagcggctggtctggaaggaacctgagctacgagccgcggcggcagcggggcggcggggaagcgtatgtgcgtgatggggagtccgggcaagccaggaaggcaccgcggacatgggcggccgcgggcagg

SEQ ID NO: 12650 - DNA, 2300 bp, Homo sapien
ggggtttctccatgttgatcaggctggtctcgaactcctgacctcagatgagccgcccaccttggcctcccaaagtgctggaattacaggcgtgagccaccgcaccctgcctattgtaccatatttagtttcccaattttttgctatataatattccatgaatatctttgcccaaaatttttgtagattgtttctaagaatagttcatcagcattttaagacatcctattaatattagcggactgcaatcagattgaagtagttcacaaatagatgggttttagcctgtatttgttcaatactgaactattgtatgtatcaggcactgttatgtatcaggcactgttctcagcacttgtaaaatgtatatgtgctgctgacaagcatgagcacttgtaaatgaacaaactaaaatccctactcttgttaaagtgggggaggtgaagaattttaaaaacatcttttttcgttcaaccttctcccacaacttatctttcattctgctaatggaaaatattacttttgttcttaaatatgaagcttttgtgtgtaaaaagtattagaatctcatgtttttgaacaaggttggcagtgggttgggaggagggattggagattgatgcgataggaatgtgaagggatagcttggggtggattttattttttaattttaatttttattttttgagatggagtcttgctctgtctcccaggctggagtgcagtggtgtgatctcagctcacgggttcaagcgattctcctgctgcagcctcccgagtagctgggattacaggagcgcgccaccacacccggctaatttttttgtatttttagtagagacggggtttcaccatgttggttaggctggtctagaactcccaacctcatgatccgcctgcttcggcctcccaaagtgccggaattacaggcgtgagcgactgcacccggccgcttgggggtggatttttaaagaaactttagaagaatgtaacttgcccagataccatgtaccgttaatttcattttcggttttttgaatacccatgtttgacatttctccgttcaccttgattaaataaggtagtattcattttttagttttagcttttggatatatgtgtaagtgtggtatgctgtctaatgaattagacattggtactgtctttaccaaaactggacaaagagcaggcagatgcaaaaatcaagtgacccagcaaaccagacacattttctgctctcagctagcttgccacctagaaagactggttgtcaaagttggagtccaagaatcgcggaggatgtttaaaatgcagtttctcaggttctcgccacccaccagaagttttgattcattgagtggtgggagagggcagagatatttgcgattttaacagcattctcttgattgtgatgcagctggttcgcaaataggtaccctaaagaaatgacaggtgttaaatttaggatggccatcgcttgtatgccgggagaagcacacgctgggcccaatttatataggggctttcgtcctcagctcgagcagcctcagaaccccgacaacccacgccagcgctctgggcggattccgtcaggtggggaaggccaggtggagctctgggttctccccgcaatcgtttctccaggccggaggccccgcccccttcctcctggctcctcccctcctccgtgggccggccgccaacgacgccagagccggaaatgacgacaacggtgagggttctcgggcggggcctgggacaggcagctccggggtccgcggtttcacatcggaaacaaaacagcggctggtctggaaggaacctgagctacgagccgcggcggcagcggggcggcggggaagcgtatgtgcgtgatggggagtccgggcaagccaggaaggcaccgcggacatgggcggccgcgggcagggcccggccctttgtggccgcccgggccgcgaagccggtgtcctaaaagatgaggggcggggcgcggccggttggggctggggaaccccgtgtgggaaaccaggaggggcggcccgtttctcgggcttcgggcgcggccgggtggagagagattccggggagccttggtccggaaatgctgtttgctcgaagacgtctcagggcgcaggtgccttgggccgggattagtagccgtctgaactggagtggagtaggagaaagaggaagcgtcttgggctgggtctgcttgagcaactggtgaaactccgcgcctcacgccccgggtgtgtccttgtccaggggcgacgagcattctgggcgaagtccgcacg

SEQ ID NO: 12651 - DNA, 2300 bp, Homo sapien
gtcaggagtttgagaccagcctggccaacatggtgaaacccagtctctactaaaaatacaaaaattagctggacatggtggtgcacacctgtaatcccagttattcggggggctgagacacgaaaattacttaaacccaggagttagaggttccagtgagcgagatcgtgccactacattgcagcctgggtgacagagcaagactgtgtctcaaaataaagacaggaacaaaggtatcgataactcttaagtataggttaaattcccacaaaaatctagttttaaaaaatctttttttttttttttttttttaaaaacagagtctcactctgttgcccaggctgagtacagtgacgagatcttggctcactgcagcctctaattcctggactcaagccatccccccacctcagcctcctgagcatttgggactacagatgcatcccacctgcacccagctaattatttttttgtagagatagtgttttcctatgttgcccaggctggagactgatctgcaactcctggccttaagctctttattttttaagcaaatttgcactgttttcaattaatatgaatttgcatttcgctgatctcatgctagctgacaatgggctgaaggtgaggggaggagaaagatggacatggtacataaaagcatgtatgataaagtggaatgtcaccttggttaaaaatgtgtaatgatttgaatgatacaaatataagtagttaagggttattttgaacttgatacctttgctggaggaaaaattactttatgcatttttgatgaaaaatcattagaagaaaaaaaatggaatatttagaggaaagagtatcctgatgttaaaagtgaaaatgaaataggacattgagaaaatttttttatgtaaatgtgtatatggtaatgtattaattagcgttaggtatgtacacggatttttgccttctatatttctgaaaaccttctgtgaaaaggaagagttgaaatcataaagaattggctgatggaaattaaggtagacaggcaaatgggaatgtggcccccctaggagggtgaactctgagagacacagtcatccctgtaaataaggctgcgccaagatcaaaggagaggtctgaggctgggagtcaggagtcagccattcttttttttttttttttctgcaacctccacctcctgggttcaagcttttctcctgcctcagcctcctgagtagctgggattacagatgcgcgccaccacacccggctaatttttgtatttttagtagagatggggtttcgccatgttggtcaggctggtttcgaactcctgacctcgtgatccgcccgccttggcctcccaaagtgctgggattacaggcatgagccaccgctcctggctgagtctgcgatttcttgccagctctacccagttgtgtcatcttaagcaagtcactgaacttctctggattcccttctccttttgtaaaataagcatgttatctgtccgtcctgccttgggcattgtgataaggataagatgacattatagaattttgcaaaattaaaagcgctagacaaatgattttatgaaaatataaagattaggttgaatttggtcagcatagaaaaaggaatgttgagaacattccttaagattactcagctccctttgctggaaatcagaagtcattaagtatctttgtggttgaaaatgtttggtgtctcaggcggttctacttattgctaaagaggtctaccttgagcttatagtaaatttgtcagttagttgaaagtcgtgacaaattaatacattcctggtttacaaattggtcttataagtatttgattggtttaaatgaatttactaggatttaactaacaatggatgacctggtgaaatcctatttcagacctaatctgggagcctgcaagtgacaacagcctttgcggtccttagacagcttggcctggaggagaacacatgaaagaaaggtttgtttctgcttaatgtaatctatgaaagtgttttttataacagtataattgtagtgcacaaagttctgtttttctttcccttttcagaacctcaagaggctttgttttctgtgaaacagtatttctatacagttgctccaatgacagagttacctgcaccgttgtcctacttccagaatgcacagatgtctgaggacaaccacctgagcaatactgtacgtagccaggtacagtgtcagtctctgaaactgcctttgccagactggattcacttatcatctcccctcacctctgagaaatgctgagggggctag

SEQ ID NO: 12652 - DNA, 2300 bp, Homo sapien
caagagtgaaactccgtcttaaaaaaaaaaaaaaaaaggtagtgtgtggccgggcgcggtggctcacgcctgtaatcccagcattttgtgaggccaaggtgggcggatcatgaggtcaggagttcgagaccagcctggccaacatggtgaaaccctgtctctactaaaaatacaaacattaagccggcgcagtggtggatgccgataatcccagctcctcgggaggctgacgcgggagaattgcttgaacctgagaggcagaggttgcagtgagccaagattgtgccactactaggcgacagaatgagactctgtctccaaaataataataataataataataaaataaaaataaaagtagtatccagcgtactacaaagaggaagagtttgtgaatgtgtatgttactgttaagttaaacagtgttctagtatccatctcattatcagccttgggcagggcagggttgagttggctaatgttcattataaaccagatcatccagttggggactctgaatgagcatatgattgcccctttcatgctagacttagctaattaaactgttcatatgacctaaaaggatggctgtggtgccatagaaagaaaacaagttttgaggcaagagactttagtttgattcctacctctgctgttttctggttgtgagatttttggatcagttgcttttgtgttcatttaccaaaacttctcaagacaaaaagaataaatgagataatgtgacagtgccttgtaaataccaaatactatatagagatagctattattacttgtatgtttattgtgaacattaatcagccaatcaagttgttcagacttgtactgctgaacatcaattgcagatataacattcttggcagatgacttagtcacctccttctgtggaagaatagaagatagacagctccttgctgtctatcacagtatgttctggtcccgttggcctcaccttccatataatcatttccattctactgggctttagccactctggtgacttgagttcagcaaaaataatctttcttgatgggtggtatatatatttctaccttttatgctttagaatagtttcctttccatttctcatagggtttggatcttcataactgtttgaagagaaatcctgacctccagactgaaggaaagcacaccatgcctttataacgccagcctcggtcttttttttgttcccctctgtcttagttccttttgtattgctataacagaataccgcagactgggtgatttatttatttatttattttgttgttgtcatttgttttcttcttttttgtatcttttgaaattcttttcattgttgttgttgttttgagactgggtgatttgtttattcagctcatggttcttgaggctggaaagcccaagagtatatggtaccagcagcacctgattatgccatggtggatagacagaacggcaagagagagcttgcttttgtaacaaagtcactcccatgataactaacctactcctgtgataacgacattgcaggttcagtatccctgatttgaaagtctgaaattcaaagtgctcccaaatctgaagctttctgagtatcaatgtgatgctcaaaggaaatgcttattggagtgttttagattttggatttttagatttggtatgttcaacctgtaagtataatggaaatattccaaaatgcaaaatctgaaacacttctggtcccaaacatttcagataaaggatactgaacctttaatccattcatgaaggcagagtcctcatgacccagtcacctcctaaaggcctcacctcttgatactaccacaatggcaaccaggtttccagtacatgaatttttagggggatcattcaaactatagcaccctcctttatcccttaccctattccattagttttaatccccactttgtctcttcctctaatcttcagtctacactgtgacatgataggtatgctcaagtctctaacagctctaaaataacgttttctgtttttttttttgtcttcatttctggtggggttggataagaaaagtttttcaagttaaatcactctctattgcaagcctcttccaccttttttttttttttttttgcttcgaagaatgattgcctttaccttctcagttctcagttattttccagcacattatgattttatgaccttgatacagaagggctgggctcctggctaaattccacccttaaacctggaactgcaaccctaagtgaaaacagctaaccccattttttttcccacccaaatgttgcctcttt

SEQ ID NO: 12653 - DNA, 2300 bp, Homo sapien
ctgacctcaactgatctgcctgcctcagccgcataaagtgctgggattacaggcatgagccactgtgcccaacctgaaaactatgatttaagtaaacaacccataaaatatttcttgctatttttactaaagatgtgttatcttggccgggtgaagactttctagtgtttccgtaactagggtaaaaaatgaactctattatatggcttgtacatgtgtttacaagaaagcagtgtactcctcataaataaacttttagtttattttattttttaaacactgcagcctcatcatgcttcacggaggagcctgtgcgggaagaatgctcccacacagcataaagaatgctcccgcacagcatagagaatgcccccgcacagcatagagaagcccccgcacagcatagagaatgcccccgcacagcatagagaagcccccgcacagcatagagaatgctcttcacctctgggtttttaaccagccaaactaaaatcacagaggccaacacatcatttaagatagaaatttctgtatcttttaatttttttcaaagtagttttacttattttcagattctatttctttactagaattaagggataaaataacaatgtgtgcataatgaaccctatgaaacaaacaaaagctaggtttttttcatagctcttcttccagattgaatgaacgtctgttctaaaatttaaccccaaaaggaaaatattcagttaactatgttaaaaaccaagacttgtgattgagttttgcctgaaaatgctttcataattatgtgtgaatgtgtgtctttcccatcttctccacagggtttgtgccttacattattactccttgccattttcaagaaagcattgccagctcttccaatctccatcacctttgggcttgttttctactttgccacagattatcttgtacagccttttatggaccaattagcattccatcaattttatatctagcatatttgcggttagaatcccatggatgtttcttctttgactataacaaaatctggggaggacaaaggtgattttcctgtgtccacatctaacaaagtcaagattcccggctggacttttgcagcttccttccaagtcttcctgaccaccttgcactattggactttggaaggaggtgcctatagaaaacgattttgaacatacttcatcgcagtggactgtgtccctcggtgcagaaactaccagatttgagggacgaggtcaaggagatatgataggcccggaagttgctgtgccccatcagcagcttgacgcgtggtcacaggacgatttcactgacactgcgaactctcaggactaccgttaccaagaggttaggtgaagtggtttaaaccaaacggaactcttcatcttaaactacacgttgaaaatcaacccaataattctgtattaactgaattctgaacttttcaggaggtactgtgaggaagagcaggcaccagcagcagaatggggaatggagaggtgggcaggggttccagcttccctttgattttttgctgcagactcatcctttttaaatgagacttgttttcccctctctttgagtcaagtcaaatatgtagattgcctttggcaattcttcttctcaagcactgacactcattaccgtctgtgattgccatttcttcccaaggccagtctgaacctgaggttgctttatcctaaaagttttaacctcaggttccaaattcagtaaattttggaaacagtacagctatttctcatcaattctctatcatgttgaagtcaaatttggattttccaccaaattctgaatttgtagacatacttgtacgctcacttgccccagatgcctcctctgtcctcattcttctctcccacacaagcagtctttttctacagccagtaaggcagctctgtcgtggtagcagatggtcccattattctagggtcttactctttgtatgatgaaaagaatgtgttatgaatcggtgctgtcagccctgctgtcagaccttcttccacagcaaatgagatgtatgcccaaagacggtagaattaaagaagagtaaaatggctgttgaagcactttctgtcctggtattttgtttttgcttttgccacacagtagctcagaatttgaacaaatagccaaaagctggtggttgatgaattatgaactagttgtatcaacacaaagcaagagttggggaaagccatatttaacttggtgagctgtgggagaacctggtggcagaaggagaaccaactgccaaggggaaagagaaggggcctcca

SEQ ID NO: 12654 - DNA, 2300 bp, Homo sapien
ggtctaagacagtcccttaccactgagtgtgggttctgcctcccaacctcagagtcctctttgcagctggcgtgaggcataagaaatcacagccctgggtgtctgagaagaaaggatcataggaaaagcagggacacagcaggaaagtgagctccttgggcctcagcttcccccaccctgcagcgggagaagcattttcctcccacttaacagaggacctttgaccaagctcagaaaagtcccagctggtgggggcagggagtggggcttgttgaatggaagaagcgcttttcctctttagagaggctgcatgattccactcccctttctctgccaagctttatctttgcttaagaattcacacaactccccaggggccccgctacagctgctgctcctcctgtcttcattgataggtaagaaatgcacctgatttaaactgatttaaactggccatgttctaataagcattttgtccaaacaggcagctgctggagccagggggctgaagtggggctgagcttcccgctggtgacttctctttgcccaaatgaggccaagggagaagtggcagggccagcaaggggctaaaggcagaacagcgtgggggaaggggaccagcctttgccaccaccccacccccaacctctccccaacttcttccccccaacctccctcgtgtccaggaccagtttctaaagatgagtgaattccagtttcaaaaaaagaatggtaggcaaagagtgtcttggttgtgaaaaaggacaaccaggaaaacaaatgaagttgatcacatgcgttgagcccctgccttgatgctaattagtgccctggcacaggtggtggggctgcattgcaggccctgccccccgggactcacagctgagcaaatcacagcaacagggacagaaaccgagggagcaggacatgcaccccatcggcctggggtggtgtggagacggcttcaaaagcaggtgacatgctgggcacggtggcactttggcaggccacggtgggaagattgcttgagctcaggagttcgagaccaggttgggcgagaccttgtttctatttaaaaaaagaagaagaaggctgggcgcagtggctcacgtctgtaatcccagcactttgggagtccgaggtgggtggatcacctgaagtcaggagttggagaccagtctggccaacaaggtgaaaacctgtctctactaaaaatacaaaaattagccaggcatcatacagacgcctgtaatcccagctactagggaggctgaggctggagaatcgcttgaacccaggaggcggaggttgcagtgagccaagatctagccattgctctctaccctgggcaacaagagtgaaactccgtctaaaaaaaaaaaaaagaaaaggagggaggaaagtagaaagaaagaaaagaaagaggaagaaagggagggaggaaagtagaaagaaagaaaagaggaagggagggagggaaagaaagaagaaagtgagggaggaaagtagaaagaaagaaaagaggaagggagggagggaaagaaagaagaaaggaaggaaagtgacatttgaccaaggttttgagggctgactacgggtttgagaggtagaggggattgggagagcgcattctgagtgagaaaacgtgctgggagatgggtaacagcagcgtgtgcggagaaactcagttgcggctgaagaataggatccaggggtggagaaggtggtggctggacacaggtgtgttgtgtgtaggataggcatgaagaggagcggatagggcaaagctagaaggcttgggcaaggggaaatgggattggagaggtgactggcgctgacccaagagaggacagacggggtgaccagagtggaggatgagccaagccttggcacagacccaagcgggtggaggccccgggcaacaccggtcaccacgagggcctctacgaagggctctgtcctcccacggggattggaggtgggtaagtgagacagggcggggtggagggtgaggccaggcagcggcggagagagaaagtcccacccctgcgggcgttccttgcggcccggccgacctcgcgggcttgggcctgggcgggcaccgacggagcggccctggctgcagcctcccggcgccagcgaagacaggtagggaggcggagggactggaagcccccgggcgcccagcggcggggaccccgcaccccggggcttctgcaggaatttgctcgcctggctcacggcgacgggggtgtcggagaaagtgggggccgcagagaagaccccgccccggctcgctc

SEQ ID NO: 12655 - DNA, 2300 bp, Homo sapien
cacagaggatatgagactcccactgggccacacccacagccacaatcccaacacacacacacacacacacacacacacacacacacacacacacagaggatatgagactcccagtgggccatgcccacagccacggtccccacaacacacacacacacacacacacacacacacacacacacacacacacggaggatatgagactcccactgggccacgcccacagccacgatcgccaccacacacacacacacacacacacacacacacacacacacacacgggataagagactcccactgggccacgcccactgccactatcggcacaacacacacacacacgcacagaggacatgagactcccactgggccatgcccacagccacgatccccacaacacacacacacacacacgcacacacacacaggataagagactcccactgggccacacccactgccacgatcggcacaacacacacacacacgcacagaggacatgagactcccactgcgccatgcccacagccacgatccccacaacacacacacacacatacacaggatatgagactcccactgggccatgcccacagccacgatccccaccacacacacacagagagaatataagtgctccttgatctggaatctagagtgccacagggtctccagaggtcatttgccgcaagcagggaaaacgaacactcagaagacttgtcttgaggaatcttctgattcatctaaaatgcttaatgacatacatgttggtgcttacctgggtgttttttccctgaactgtatttctctaaaaattaatgacttataccctcctcagaggtgcacagaccatctcctctggcccccagatccttgataaatgaagtcttggtgtaccaagccccttccagcccctcctgcaggatgaccgtggggcaccattgctaccgctcccggggttccccatctccgtctctgtgcgacgggaggaacgcttcccatagcagactgagcaaaaacagggctcaaaatggtatagacacaccatagcttcgtttgaaaatatacatacataaggggagaaaggatggaaagacctcaaaatggctgccatggtgttgccacgggcatgtgctggggggagcaggggtactggtgattgattcattatgggttgatcgatggggtatttgacaaatgctggctctggcagcacatatactaaaattggaacgatacagagattagcacagcccctgcccccttagctggtatggcatgcaaattcatgaagcattccatatttactttaaaaattatttgggaggctgaggtggaaggattgattgagcttgggaggtacatgctgcccagctgacatgacactgctgcactcaagcctgggcaagatcctgtctcaaaaaaaaaaaaaaaagaaagaaagaaaaaggaaaagaaaaaaaggaaaggaaaggaagagagaaaaaagagcaagcgagagagaacgagagagaaagaaaagaaaaaaagataaagaaaaagagagacctcttgctctctctcgagggacctctgcagaccctctcctccccaaaggtgggtcctgtggtctacaagatttcctgtacattgcgagcccccgcgcccacccaaaaaaaaaaaaaaaaaaaaaaaaaaaaattggtcgggtacagtggctcacgcctgcaatcccagcactctgggaggtcgctgccggcggatcccttgagcccaggagttcaagaccagcctgggcaacacagtgagactgtctctaatatatatatatatgacaacgcctctataatacggcaataggaactgtggcatcaacgtaggtatacaagaggccccgagagagcgagtcccggccgcgctcaccgctgtagtagggcagccaccgataccgccgcccctggaactccgctccgtcgaactccgcgcactgctcggcccggaagtcccgggcgccgtcggggcagctctgcggggcggaggggaagtcgggatccaggagggcggagtccgaggtccgcccacctcccgccccgcccgagcccagggagcccaggagtctcccttgcctgccccatcggagccgccggaggtggagtccgccccccggacccccgaactcctgtgcgtgcccctccatggtgctctaggctgtggagggcaaggccagtccccgggagcagggtgaggaaggggcccccacgcagccctgctgtggattggcgggaggaccccaggctgggccaacccagcagcccgcgg

SEQ ID NO: 12656 - DNA, 2300 bp, Homo sapien
ggagaattgcttaaactagggaggcggaggttgcagtgagtcgagatcgtgccactgcactccagcctgggcaacaagagcgagactccacctcaaaaaaaaaaaaaaaaaaaaagtagcctgttgtaaccacctcagctgtggtaaataatgctgaggtagacttctttaagtgtttcactttttcctgattctgggatttttcttcgacttgatccttagaggtgcaacagattcatggagacggtcccttctcctggggatggggcggggatctgtgctctgcggggcctgctgcagggctttctgacccatgctttcctgttgctagggtaagccttgggtcttggggaggggcatcatcaacctcaggatctcagtcttgccttcctgcccaccccagccccaaacaagtgtgaactgaactgcattcccaagggggagaacttctactacaagcacagggaggctgtggttgatgggacgccctgcgagcctggcaagagggatgtctgtgtggatggcagctgccgggtgagtggtgccccagcccctccctgcctccgggctgcctgggggctcagtgcgggtgtttccctgtccatcacccataggcccaggtagctgccatgagcttggtgtcttctcaagttaccaggacaccaagcccagctcctagggtaccttgcaggcatcacagatgccctatggcccctcaccttcatccttggagaacgctagccctacaataagagaaaccctctgggtggcagaaatccggctaaaaccgacttcagaaaaacaaacagcagggacagccgcaggcgcatgaatgaggtgccactcggctttcctctccttgggtccagcatcaggatctggcccattcttcccaggaggtgtggaggtggccgccagctgctccgaccttctgctccctagaaagggaattcccagggaaagggggcctcattcccaggagttctagccaccgggggttgtctctgattcgtcttggtttgggacttaccctgaaccactccaacctccccaaacccacatttggggagctccgttcaaactctgcgggagagaggtggcccctcaaggaaaacagggcattattaccagaaggggagatgggagctgagcagacagagaagtggattgtcagccacaggccagtcccctggctggtggctgaatcactcccgaccaccctatcctgcctgggctgcgtgggtgctggggttaggatgcgacggggcccaaggcctgatgtggccatgatgccgtctcccctgcctcccgcatctctgcccacaggttgtcggctgtgatcacgagctggactcgtccaagcaggaggacaagtgtctgcggtgtgggggtgacggcacgacctgctaccccgtcgcaggcacctttgacgctaatgacctcagccgaggtgggggtggttccgacaaggggcagttgcctgcccccttccttgcctgtcccttccttgcctgtccctgctctggcctagactccaggccaagtggccctcatggcactggaaggctctgatcatatcaggtcacatctgaaaggccccctgtggcctttggttaggactcgtgcccgctcgtgcagtcccatctcctgctgccaccgcctggatgccctccccatcccttcccactcccagtgtgctccgggtgccctgagccttcccgccaccctggcttttgtactgcggcctcttctgccagggttgcctttcccagcagctcggccctgtctggctcttgtgtaccctccctgcccccattctgtgctgtgtggcacttggagtcctgtttgagtggtgccgggagagggatagcccagcacacccagcacctgcgtctctgcccccaggctacaaccagatcctcatagttcccatgggtgccaccagcatcctcatcgacgaggctgctgccagcaggaacttcctgggtgagagcctagggttaggtcctaggcaggtctggggctgcagggggaggtgcggcactgctccctctggctgactgaggcggtctcctctgcgcagctgtgaagaatgttcgtggggaatactacctcaatgggcactggaccatcgaggcggcccgggccctgccagcagccagcaccatcctgcattacgagcggggtgctgagggggacctggcccctgagcgactccatgcccggggccccacctcggagcccctggtcatcgaggtaaatgggggtgtggggagagagggcgagtgggcagctcgtgg

SEQ ID NO: 12657 - DNA, 2300 bp, Homo sapien
ggcctaccccgaccacatgtgccagcgccagccacggccagctgaccggcgttcctgcaatcttcacccttgcccggagaccaagcggtgagaccttgccagcccctctacccatgatgaggcccaagaacttgggtgggaagggaacaaggcctccaagctgctttaggtgtagaacaaagaggtgggggtccagggccccccacgctgtggctggggtgtgggagaggtggcagctcttcctgggggaggcagagaataggcctgagcccggggctggtctctctgctctcctgtgaccacgaagtactcagaacacctaggcttggtggcaggagggttggagaaggttccagaggtccctgtctgtctgagccagcagagggtttggcttggcagatgccaaggggtgggccaggggtcaggccaaagggcctgttggcatcggccatggctttgttcgtgcacaaaggacctcttacctgcaccggcctggagcgtggcgccttgctggggcccagcgagtgtgtgggaacaggtaacctgcaggtcacaggctccccgcagggctggtgccaccctgtcaccgcttggccttggtggcagcgggcctcctgggatggtggcggacttggctttgcatggggccacagggctgctctttcctctgggtccttgcacccggggcctggcagagccgctccacgcatgggtgagcacagcctctccaggagctgccccttgactaaggtcagaccgagaggaatggagtctgactgggagacagggacctggtgggaaggagaaagggggatagggttgaggacaggaaagccaagggggaggcgcagggccccgagttgtggggagcgctcagagagccaggcccggtggtggggatgctaaggagcgcctgggtcgtagcctttgttcaggctggaggctcagaggatgggctggggtgggggtcctcaggccacctgtgtgagtgagggcagaaaccctcagggctgggtttctgcccatgctcctgggccagccttacctgattccccctcctgccagctggaaggcagggccatgggcaccctgctcagcctcctgtggaggaggctcccagtcccgctccgtgtactgcatctcgtctgacggggccggcatccaggaggccgtggaggaggctgagtgtgccgggctgcctgggaagccccctgccattcaggcctgtaacctgcagcgctgtgcagcctggagcccggagccctggggagaggtcaggcccctggcccgcatggggctggtgctggacctgggtagcagcagggaagggctggggtcttgttctctgctgtggaaaccgaggtcctgggaggtaaaataaccggtcaggtcatcttggaagctgtggccaaggctgggaccagaagcaagtgtctggatgagtggtccagggctcttcctttttctccaggatcccagggcagggcaggaaaggcctgggcaggaagaagctggtgtgttgtttgggggcaagggaggagctggaagtgtctaggctgccagtcattgcttctagcacctacgtatattcaagttgcaaatggatggaaaatacaaatgggtgacaacctcagtctgttgtcagtagccatggttcaggctgtgtgacctcaggggagtgagtcagcctctctgggcctgggaaggacatgggcagttgggtgctatctgcctccacaccaggctggtgggccgctagctgtccgaactggcgtggctcctgggggcaaggccgagcttctgctgacagccttgtccttgcagtgttctgtcagttgtggcgttggcgtccggaagcggagcgttacttgccggggtgaaaggggttctttgctccataccgcagcgtgctccttggaagaccggccacctctgactgagccctgtgtgcatgaggactgccccctcctcagtgaccaggcctggcatgttggcacctggggtctagtgagtgctctccacccccacacctgctgcctgaccctggtctctggcaggtggctgcacccgagcgccgtccttggacctgacacgcgccactgggcaccttcccctgcctctctccatgtgggtccccgcccccagcctcgccctcagcatctctctctctcccactcgtgggcctcagtgctccaagagctgcagctcgggcactcggaggcgacaggtcatctgtgccattgggccgcccagccactgcgggagcctgcagcactccaagcctgtggatgtggagcctt

SEQ ID NO: 12658 - DNA, 2300 bp, Homo sapien
actttcttccattatatagtaatatgcttattttggaaaatttgaagcacgcaaatagaagggaagggcaccctgcctcccaagcactcagagcaactttcactatgggcattatttcagggggggtcctacaggttttctcttatgtagcattaaaaaaaaattcttattgtcctaattttatctacttatccatttgcattttccaacaatattttgtgacgaaaaatctttttgaaaattttagggatgttgtttaaataattccatataccctaaaaaccacccattctaatggcacaatgattttttgtaaatttacaagttgaacaatatgatagaaactttaaacatgccaaaaagttgaaagaaatgcatagtgagcagccatgtacacactatctcaatcccacaactagtatttggctatatttgtgttttcattatctagtctctttcttcttttttttttttttttttttttttttttgagacctagtctcgctctgtcgcccagtttggagtgcagtggcgcgatctcggctcactgcaacctctgcctcccaggttcaagcgattctcctgccttagcgtcctgagtagctgggattacaggtgtgtgctactgcgcccagctaatttttgtattttcagtagagatggggtttcaccatgttggccaggctggtctcgaaactcctgacctcaagtgatcctcctgcctcggcctcccaaagtgctgggattgcgggcgggagcccgtgcttcgctcattatctagtgtctttctatccctttgtctattcatccaatttttttaaatatggaatttttttatggaggtgaaatttacattcagttaacccttttaaagtgtacaggttggtggtatttagcgcattatttcaatctctttgattatagacatcctagtgggtgggaagcaggacctcattgtggttttgatttgcatttccctgatgactaatgatgttgagtatctttttacgtgtttgttggccatttgcatatcatctttggagaaatgcgtaagttctttacccactttttaattggattgtttgcctttcatcagtccaattttttaaaaaagtatgttctgttttttgttttatgtggctgggatcataacacgtgcacattttatagctggtactttttgctgaacatgtaagattagcatttttcatgctaggtgcagtggctcacacccataatcccagcattttgggaggctgagtcaggaggatcacttgagcccaggagtttgagacaagcctgggcaatatagaaagaccctatctctaaaaaaaaaaaaaaaaaaaagtagtcccagctactcagggggctgaagtgggaggatcacttgaacccaggaggttgaggctttagtgagccatgatcaccctactgcatctcagcctgggcgacagagaccctgtctcaaaaaagatgagcattttctgtgtgactggagacttttgaagagtggctgggcattttttgaaatcctgggtcatgctccttttcccttgggctgtctcgggttcccaggccctgcctgggcagtggggtagaagccagtgctgggcagggctggccacagctcaggtccatcctctcttcctccctctccgtcccacatggacctcccggctccctgcagaggtccccagcatgcaggatgtgcacacccctgccagcaacccctggatgccgttgggccctcaggagtcccctgcctcaggtgagagcctggtcccgtcccccactcagagccctgtagtttttgtgtctgagtggatggtacatgggggtgtgggggtcacagttgggtgcagccatggtggaagggagaatggtccaggggacggaggaaggtgggtccaacgtggacaggggtggaggggaggagccaggtggacgcactgtgtgtcttttgcttcttctttctagactccagaggccagtggtgggcagcccaggaacacccctcagccaggggtgaccacaggggagaacgaggtgaccccaggggcgaccaaggcacccacctgtcagccctgggccccgctccctctctgcagcagcccccataccagcaacccctgcggtcgggctcagggccccacgactgcagacacagtcctcacgggtgctgccccgatggccacacggcatctctcgggcctcagtggcaaggctgccctggggccccctgtcagcagagcaggtgggtgctggagacaggtcttcctcctcccccgtcaaagagggaa

SEQ ID NO: 12659 - DNA, 2300 bp, Homo sapien
tcaggctcagatgaacatcccccttctttgttttgtgggctgtgcaactgaggctctgccagttatgaggggtacagccaccatttattgtgttacggctgccctccctggtagctgctaagagtcggtggatttaggcagagattgcggcacacaaaatggcctgccctgcacacggggacacgtcctctcccccccaggtccccaccctgtcagcccccaccatggggagcctcagagcctgggtcctgggatgcagggagcgtgggggcaggctgggcagtgaggggctgtgtgatgtctgcctaggtacgggtgctgccctgacagggtatctgtcgctgaggggccccatcacgctggctgcacaaagtcgtatggtggtgacagcaccgggggcatgcccaggtcaagggcagtggcttctacagtaagtgtctggcctgggggaggggagcagggggccagcccgtgagcctgctcagtgtcactgtgacccaggatctttgccgctttggcctcggagaaaggaggtccctgcaaatctgctggcctgggtcatcctctggagggcaccgggcttcaaagatgggcctggggtggatcaggggtttcatccaacattctcctggcctctggtctcccctgggctggggttctggcccctccttcctgccatcctccccgtggcagcccagagtccccaacaatggccagatccactgcccacttcccaatcatgggtttcctccccaggtccacaacacccaccagccccaggcccagcagaatgagcccagtgagtgccggggctcccagtttggctgttgctatgacaacgtggccactgcagccggtcctcttggggaaggctgtgtgggccagcccagccatggtgagtggacaccccctctcctccttctcgatgggtagactctgctcccaccatgcctccagcccccacccaggaccaaagaccttcctaccagctcagttattcattcattcctaccacaaatgttgattgcctgctaggtgccaggccagagagcagtgccagagtgttctcgcatccagcagtttgaacctgtggccttctggctgcttctgggaactggggagggtgggaggtggggatcccaagggcctgggaggcagtctcgtgcttgggagtcagccccttctgaggcagagccagtgcagggcagttagtgccgggatgggcaggggtgccctgaccctgcctggaatgtgggtggagtagcaggagctgagtgctggagggagggtaggggtcagggaggtctttgaggttgcagccctggatgaatgagtagagctgctgggaaccatcacgaggacctcaaaagccgggctagggctgtggtcagggctcgcaggaggcacccatggtcatgtctaaatgtggagagatgggtcaggccatgctggcgagggctgctggaatggcaggctgggtgctggaggtgggctcagtggccagtcagtgcagcatcctggggacaagggcatgcccttgctgggcatcttcacacgccctgggtggctcaggtctgtgtccctatcacaagctaagcaggcagggtcaccctctgggctcactttgcatgtgacttcaggtggtctggtggcagggaaggccaaaggtccaagggagccggcccagggagccctggccctgacctcccagaggctctagctctgtgggtgaaggctgctgtggcaccagccgggggcaggtctgcacagtggacagactctggtggaagcatcctggatcccagggccaggtcaggcccccagacaggggtgtagacatgctttataagtggggaagggcctgcttcctgagtcggaggctgagaggatggagggtgcagctttagtactgggcacctcagtgacttatatcacacccatgccctgcagcctaccccgtgcggtgcctgctgcccagtgcccatggctcttgcgcagactgggctgcccgctggtacttcgttgcctctgtgggccaatgtaaccgcttctggtatggcggctgccatggcaatgccaataactttgcctcggagcaagagtgcatgagcagctgccagggatctctccatgggccccgtcgtccccagcctggggcttctggaaggagcacccacacggatggtggcggcagcagtcctgcaggcgagcaggaacccagccagcacaggacaggggccgcggtgcagagaaagccctggccttctggtggtctctggcggcaagaccaacagcctggg

SEQ ID NO: 12660 - DNA, 2300 bp, Homo sapien
gagaccagcctgcccaacatagcaaaaccccatctctactaaaaatacaaaaattagccaggtgtggtggtgcgtgattgtagtcccagctactcaggaggctgaggcacgagaagtatttgagcccggaggcagaggttgcagtgagcagagactgcgccactgcactccagcctgggtaacagtaagactctgtctcaaaaacaaaacaaaacaaaagacttatttgtatgtaattgttagtagtgtaattctgaaaagcttttaaaatctgctcttacagggtgaaaggttgagccatgcagtaggctgtgcttttgcagcctgtttagagcgcaagcagaagcgggagaaggaatgtggagtgactgctacttttgatgctagtcggaccacttttacaagagaaggatcattccgtgtcacaacagccactgaacaagcagaaagagaggagatcatgaaacaaatgcaagatgccaagaaaggtacaatctgttctacagtgtgtatttatggaatgcagtttttcccaacaaggtattattttgaagctaccaggggtaaattttctcataatcaaagagaacccttagcaatataaaaccttataacaaagttgaaaatcttaaaaaccgcttcctttagagtggctagtttaatggcttcaaaaatatttactccattatagtaagctatctgaggaatcagagtgcagttgaagaagctgcagagacatctcttacccccttcctcccatcctgaaatacctttttaattctgatgtatctgatctctttgagaagcaaatgaatcaagtacctgcatcttaaaggaagcagcagaggtcccagggcttaaggctgcaaagcatccacggactatgatgctagcagagagatttaacagtaatactgtttatatgatattattgctgttttttagtgctttctagtcacaaaagtctatagattttgagaggtaagcctataactctttttttctatagccctgttaatttaatttagtgtgtgattttatagagtgtgagttttatttaggtacacatggcatcacagcagaaatgcctgtacaaacattcaagttagttggcagtctataaatgtgagttgggtatattttacaactaaatgatagggcttgaaaatacttttgaattcttgtatataagtagggttaaaaccaacaagacaagcacaaacaattcaagttaactaatagacattaatataattttgaggccaggtatagtggcttacagctgtaatctcaatactttaggaggctgaggaggaaacatcacttgaggccaggagtttgtgaccagactgtgcaacatagactctatcccttaaaaaaaaaaaaaaaaaaaaaaaaaaaaaaaaattgccatatttggtggtgcacatccgtaatcctagctgcttgggaggctgagaccagaggattgctggagcccaggagtacaaggttacagtgagctgtgatcataccactgcactcctccagcctgggtaacagcaaaaccctgtctcttaaaaacaaacaaatatatatatatgataattttttttactataaccttttagttctaaactagtcatttttgttgttgttgttttggtttgatttcggtgttttttttttttttgagacagagtgtagttctgttgcccaggctggaatgtagtggcgcagtctccgctgactgccgccttcacctcctgggctcaagcgattctcctgcctcagcctcctgagtagctgggattacaggtgaatgcaaccacacccagctaatgtttgtatttttagtagagatggactttcgccatgttggccaggctggtcttgaactcctgacctcaggtgatctgcctgccttggcctcccaaagtgctgggattacaggtgtgagccaccgcacctgaccttaaaccagcccttttggttagcatcattgactaatactgacccaaacagctctaattcttaagccccctccaaaaaaaaagcatacatatttttatttgaaatgaaattattgatagtgattttttttcatttcttgtaaatatttgcaccaggaagccaaaggggggaaaaatcatgctatctgtactagaaaatttaacctgtattactgttatctaatatgctttagtggtcttcagactattcactaattaagcatgttctttaataccaccaaataatattcattgttatgcacaacaactgcaaagagattgagtcccaagatctacaaaggattgtga

SEQ ID NO: 12661 - DNA, 2300 bp, Homo sapien
aaactacaaatattttacggatgaagagatggaagctcagtgggctacataactttcttagcttatgaatagtagcgctgaattcagtctcatatttgtcttaatccaaagcccattctatttcaagtataacatgctagtttatcacaattcttacagacttcccttgatgctctgcctgtgtcttattgccctgcagctctcctttttatagaaaagctttgtaaaaaaaagtatttaatacttgtagactcttcttgcctttcatttacttctcgacccattctagtctaacttctacttctgtatcacgatcctccaaagaaacagaaccgctaggagatatgtcatattatatgacatatatatgtcatatcatatatatgacatgacatatgtcatgtcatatatatgacatatatgatacatatatgacatatatatacatattatctattttaagaattcactcgtgattgtaggggctggcaggctggcaagtctgatacctgtaaagcaggccaacgggctggaaactcaggcagggtttcttctccaggaaacctcagtttttgctcttgaggccttcaactgattggatgaagcatacccatactaccaaggctaatctccttaacctaaattcaattcattgtaataatatttacagagtagcttctaatttgcccatagaatcaagatcaaagtccttatcaggaatagaaggccttctgtgattaggcctttcctactctatctcccattacgcctttcccattgccaagtctacttaccaagccatactgaaatatttatagagccccagacttgccatgttgtttgcttccatgtcctgtactgctgtttcttctgcctggcatgtccagtacctctgttacttccctgtctccctacccctacctaagcatcaagaaaaattattccagcacccagttcagtcttctcctttgtataaccttccccaattccacaaagagatttgattataccttttttctgacatcattgtaccttgttctcagctctactgtagcatttacctacggtattctttattttttgtctgattgttgcctttcagtaaccttccaggtatttccactggctggcatattataggcactcatcaaatttatggtggtggtggagatgatgaggccgagtggatcacaggttatttcagtaaggccatgtcctcatatcaagttttcctgggcttggatcacttatagaggagaatggtagttctaaaagtctcccttgtcgcttctagaggctgctgcgccaaccttagcaccagattccttttgatctatactttttatgataatctgatacctattctcagccttcatattgcttttgttttattttgctgtatccttgaggcagttaaaaagaaaggacactgttaaattactattacattccatcacaggaggaattatgcatcagcttgttctcatgtgattctcatgtgccaaaaagtattttctgagccaataaaaagaaaattattttttcagtagtttttaaatcttcctgtgtccccaaaatgtctccatgaatttaatgtcaaattaaaaaccaagccaaggctgggtacagtggtgcacacttgtagtcctggctacacgtggggctgggacaaggggatcacttgagcccaggagttcaaggctgtaatgctttatgatcatacctgtgaatagccactgcactccagcctgggcaacacagtgagacctcgtctctaaaattattagaggctgggcacagtggctcacacctgtaatcccagcactttgggaggctgaggcaggcggatcacttgaggtcaggagttccagaccagcctggccaacatggtgaaactccgtctctactagaaatacaaaaattagccgggcatggtggcaggtgcctgtaatcccagctagtcgggaggctgaggcaggagaatcacttaaacccgggatggggaggttgcagtgagccaatatcgcatcactgctctccagcctgggcgacagagtgagactctgtctcaagaaaaaaaaaaaattattaggaaaaatgtctgtgttaactctgagagaacaaataatggctttttaaagactgttaatagaataatgaagacttactgtgtttttaacgtgaaaattttaggtgaccaagggtcctgctataacatactgggggtcataggatagtagaatggtcaacatctcaatttagacatgttacttcctgctctaaatacacttgtggacgct

SEQ ID NO: 12662 - DNA, 2300 bp, Homo sapien
gggaggaaagttccggaaaataactaggaaaaggcactttattgttatgtatagttactggaggaataatttctgcttagtctggtgatagaagtatgtactttatttaaacttgactaaaaatataggctagaaaaaagacaatatttttctgaataataaaccatacagttttagactctttgtagcttgctctgcaaagaacaaggaggttagtaaatagaagaaatatgagacaaagggttagcagaaagaagaaagagacaaagcacatttccaaagtccacatccttgaggtgaatgcctccttgacagtgtctttttttttttttttttttaagacagagtctcactctgttgcccaggctggagtgcagtggcaccatctgcagagacaggggtttcaccatgttagtcaggctggtctcaaactcctgacctcaggtgatctgcccggctcggcctcccagagtgctgggataacaggcatgagccaccgcacggcctgacagtgtcttaaactatccctgggtgttgtttcatggcccatgggtatatgtatcataggtggggttgtgagaaagtacatttaaatctgatttagaaactgaaagagtaatcagaccagcattttgttatttaggagcaggaaaagtgggtgaaaaaaaaggaaaaacaaaaagctaatgatgaatatatttctaggagcacaagagtttttatagcaacattagatttctcaaaaatgcctactgtgatttgtacccaagtgaataaaaaatgcaatcatttattcttgtgcattgtgccaagtgaggaaaaaaaaaaaacacacacacacacaacccggcaattcattcaatggccctaatttagactgctaggaagaggtttagaaaaaaaaaagagagagagagagagaagcttttaaagtatctgacacacagctagtagggctatttaagaactgctgaacagaaaaacaaagtggcagtgagaggtgggggaaagcagaattctcatttccagagcatcataaagggtataatgtggcccgcttattagaaagttgctggccgggcgcggtggcttacgcctgtaataccagcactttgggaggccgaggcgggcggatcacctgaggttgggagttcgagactagcctgaccaacatggagaaaccccgtctcatgcctataatcccagctactcgggaggctaaggcagaagaatcgcttgaacctgggaggcgtaggttgcgatgagccgagatagcaccattgcactccagcctgggcaacaagagagaaactccgtctcacagaaaaaaaaaaaaaaaaaaaaagttgctaatggctgtctggtcaattggcaggggtcagccaggagtggatctggaagctggagaactctcaatacgccacttcagtttattgacgacatttataattgcaaccgaagttgactgatttctgctaaatgaaagtttgcgctttgccctttagcattgaggctcctggaaagaacttcaatgaaattggatgcattgagaccaaagaaaagaaggggacatttttatctctctgatacctttctccccagggcttggaaacacttcttaaacacaacctctaatgttggtgttttgtaagtactacccctatgaataaagctagcagagataagcttctccttgcaggaagtgagctggagaagtggaaaagtttacagagaaaactctacaacaaagacttaacccttcccgggtaaccacgaatgtgagcgtctgcccctcctttgctttctactgcgcaaccaaactgtgcacaagcgtgaatcaaccttaaccgtcacgtctcttgccagttagcttaacagacacttttagcagcctatcataacttcgaattgcccaaccctcaaccaattacaactaaagcttgggctaggacgctccaggtccgggcgggggcgaataccgggtttaggaaaaggggcggtaaagagcgatgacgggcgggtatactaaaccaatcagagaggagagctgccgccccactatccaatggataggttagaagtatgaaagagggtgggcctgttgtcatgggggaggtggtggcgcttggtggccactggcggccgaggtagaggcagtggcgcttgagttggtcgggggcagcggcaggtgagtgccggtaacgcgggtcagagatctgggggccgtcgcggggcggaatctccagctcagcactccggaggcggaggccggaggaagggggcctggacttcgggtcggg

SEQ ID NO: 12663 - DNA, 2300 bp, Homo sapien
acagagtgagactctgtcttaaaaaaaaaaaaaaaaaaagacactgtcaaggaggcattcacctcaaggatgtggactttggaaatgtgctttgtctctttcttctttctgctaaccctttgtctcatatttcttctatttactaacctccttgttctttgcagagcaagctacaaagagtctaaaactgtatggtttattattcagaaaaatattgtcttttttctagcctatatttttagtcaagtttaaataaagtacatacttctatcaccagactaagcagaaattattcctccagtaactatacataacaataaagtgccttttcctagttattttccggaactttcctccccctcctctcttcctcaccttccaatttagaaataacctcccattcaattcaatgactcacaaaaagcctgtgaaaggaaagtggaaaagccaaaataacttagagatgtctgaatcattcagctgaaggaaagatcagacattgaccatgataagatagacgccaagacataaggcaagcctgagctaacatcccataacatgtgaagtaatgcaaatgtgaagatgccccaagaaaaagcaaataccaatatgtccttttacacagccttttaatatatcaccagcagcttgcttctctctagtcttggcagtgtgccatgctaccaattttagagcaagttagaagacaattaatgtcctgacagataggaaacaataacgtcataggaggacatgaccattattatggtactttgggtaataatggctcttgcacagccatagtgactaggtgccatagaaaacatagaattaggccagccttgctaagaggacttgccatctaagttgaagaatgcagcgaaattactatcacaaaactgggtggaaaattgtcacaaaagtcagccgctatttcatacactaaaaaaaaaaaaaaaaagaaagcatgtataaatgcttttgctcatatacacacatctatcattcctattctttgtgaatatcagttaagaaaggacatataaaataaatatgttacaacccagtaagtagtgggaaaaccttaaggaaggtttcaaggaacatgccttgaaataacagaaggctattgtgttatcaaagactgtgcagtaccggaggggttattgcttgtatccctacattttgctttcacgtgcacaaggtaaccctatcatgtaattactccatccagcttttttcttttctttcctgtgttttttgcttctctaccattctcagggctccctctcagaaaacaagaacactggagtctgggagtctgcagcttcctgttgcatggctggctgtggaggtcctgcagatggtatctgttcagagccacttgggcacgaccaagatggcaggtacattcggggcaaaaatagcatttataatcccaattaagcagaaaatagaggactcagagtgatgtccaatatctgaggagtgatatagtgtgccttgggctttcctgtacactaatgctgtttctcctgctctttcataatgtcacttttcaagggaaaagaatccaagtctctttccatttctattttagcccacaggggcaatctcactagggaaaggatccattttttgcttttggattttcttcctctggattctacacacgattccaattccaactagattagagaaataaacaaccggtggagaagaaaatcgctcagatagcagacaagggccagaactgcctgccactagcagttggaggcaagccaaaatatttgataagaggtagcttcctgagttagggatccctgagggtggaggctgacaaagatgaagggattagagagaaggggagggaaaaggagggaagaggaggagatgagggggcaggagagaaaagggtaagaaaagctagaaaaacagtcaaaaaacccaatcagagtgctgagccagcttacagtcctgccttgcctaccccctatccccacccatgtggactttacactaggttgcataattacaccagcaaagtgcagcctctgccactggttaaaagggaaagcgtgccaggctccagcctatgggaccgttgttctgctgccacctggaaatcctcccagagctcaaagcctgctgctctgggcaaagctgacaaggaaggacagattcagcagccaaccaaggagcataccttcatttgatttccttaaggcaaaagcactggctaaacaaagggagactatctgggagaaggtgttttcaccctttcaagctggggtgctttc

SEQ ID NO: 12664 - DNA, 2300 bp, Homo sapien
aatacaaaaattagcttcggtggtagcaggtgcctgtaatcccagctacctgggaggctgaggcaggagaatcgcttgaacctgggaggtggaggttgcagtgagccaagattgggccattgcaacacagaggttggggtaacacagcaagaccctgtctcaaaaaaataaaataaaaataaaaaataaaggtaaagagactagttgggaggctatttgtaataaaccaggatttgtctgcctcaacactacactactgacattttgcatcagacaattatttgttgtgggagggttgtccttagtattgtagaatgtttagtagtgtctctagtgtctgtttactagatgttagacaacccctagccccctatatgacattgccaaatgtccctatggagacaatatcacccccagttgataactgtgtgtgtaacagaccatgtgagaaataaaaaagggtggatgttagacatgggtaaggacaaaatctaaaagccttggcaagtgtttggataggcttgcaactgagaaagagggagtgttgaaagctcaaacagagaaaggtcctagaggccatgtactgtagtctaatatgcttatcattgcttgaaacattgtaaaccctcttggaaggcagtttggtaaaacctattaataatcacaaaaagtatcttactttttgacccagcacttttatttctgggagtttatcttaaatgattcaaatgaagacaaggaatctttatgtacaaagcaattagttgcatgacagacagtgaccacgttctcaaaaattacacccgcatgccaccacattgcctgttaaattagaagccgatttaagatcctgagtttaagagccaaagaagttgtagctaaagaaacaaaatcccagaggggcaggaagggcagatatcaagaatgcaagtagagaaattcttaacttatttttcagagagaggacaatgaatttgagaatttgtattggagaaaagagggagagaagttaggtggaggaactcctagataaggcttcaatcagtgaattcatctgcagagcagaagtttctgcggaactcaaactgcctgggggcattccttgaaaagaagaattctgcactttttggtgggaacctgccggtggaacatcctgtttagaaatgaggacatccaaggaacactgcaatgtgcagagactagaaggaaaaaacagtcaagtagccatttctcctggggagtctctagtaacttgattttgtgcttcttcttgttttttgagacaagagtctcactctgtcgcccaggctggagtgcaatggtacgatctcggctcactgcaacctccacctcccgagttcaagcaattctcctgtctcagcctcccgagtagctgggactacaggtgcaagtcaccacacctggctaatttttgtaatttttaaattattatttatttttatttttttgaggcggagtctcgctctgtcgcccaggctggagtgcagtggcgccatctcggctcactgcaagctctgcctcccgggttcacgccatcctcctgcctcagcctcccgagtagccgggactacaggcgcccagcaccacgtccggctagttttttgtatttttcttttttagtagagacggggtttcaccgtgttagccaggatggtctcgatctcctgacctcgtgatccgcccgcctcggcctcccaaagtgctgggattacaggcggagccaccgcgcccggccaatttttgtagttttagtacagacggggtttcaccatactggtcaggctggtctcgaactcctgacctcaggtgatccacacacctcggcctccgaaagtgctaggattacagtcgtgaaccaccgcgcttggccgcaacttgatttttaaattgctctctgagtgtagattccttgtttgtttggcaagggttcttgccgctgccgctacagcttgaagccaaacatttaatgaaagagagcgggaggggccgaatagaagaatgatgggcgtggccaaccccgaggtggctggaggccgcgcccccttcccagagtgcaccgcagccgctgcattcaggaaccgctttagcttcgcccccggccggccgggcggggaagactggtgtggtctggccatggatgggctccaggccagtgcagggccgttgaggcgcgggcggccgaagcgccggcgcaagccccagccacacagcgggtcggtcctggccctgcccttgaggtccaggaagatacgaaagcagctgcgaagtgttgtatcccg

SEQ ID NO: 12665 - DNA, 2300 bp, Homo sapien
ctgttctctaacctgctttttttcatcagtttcatggaagaatgctcatcatatattcttctgctttataactaaactgctttcatttatgacatcacaattaaactggtaaaaccaaatttatattgctaacttgtttctaattttttctctattaaaatgatatgattagcatccttgtagccaaatatttacacatatttatgaagttatacttaaaacaaattcctagacgtggaactgtgagtcaaagagaagggatcttttaaatatttttgcatagattgccatgaaaaggtcataccagtttatatatccaccaatatgagtttcttttccaaatcttcttcaacatcctgtgagagacagttaaacatagttgttcagagcccagccttgagaatcagatttcaaacatatgaaccctctccctttttcttttctttttcttctttcttttttttttttttttttttttttttttttttttttttgcccaggctggagtgcagtggcgccatcttggctcactgcaagcactgcctccagggttcacgccattctcctgccccagcctcccgagtagctgggactacaggcgcctgccaccacgcccggcgaattttttgtatttttggtttttttttagtagagacggagtttcactgtgttagccaggatggtgtcgatctgctgacctcgtgatccacccgcctcggcctcccaaagtgctgggattacaggcgcgagccaccgcgcctggcccctttttcttgttagagacagggtcttatccaggttggtctgaaactcctggccttaagaaaccctgccacctcagcctccaagtaaactgggattataggcgtgagccacctcacccaacttccacttcccagctgtatgatcttcagaaaatcagttaaattctctgggccttaatttactactacggttcttgtaagtattaacaattagctactattatttaccttctttagttcctgagacttctatgcacagaatatacttgatgtgtgccacagaacctatacaaaggtaattacaactaacagggagttgtatgataatgacatgggacatgggacatgagagcatttggaaagagataaaaaggcttaccttgaggacagccttattaggagcagaggcaaacacaggttttgtgagtttgaagcttacgcatttataggtttctctaattaccaagataggaaattatgaaatcaggtacaagggcttgggaggggcctaaagcttaagtttgatgaaaaaaaaaaaccacctctggttggaaccaatagcctatgaaaaagtagaaaaaagcccaatgcatggggagcgccggtagtcccttgaggtgtttgagaggctgaggcaggaagatggctttagcccaggagtttgaggcttgtaagtgcgcagtgatggtaaaccgccgctgtactccagactggcaacgtagtgagaccctgtctctttaaaaaaaaaaaaaaaaaaaaaaaaagatgagaggtaacacttgcctgactgggacaaaaatgagaaaccagtataagaaaataataactattggccgggcgcggtggctcatcgcctgtaaatcccagcactttgggaggccgaggcgggcggatcacaaagtcaggagttcgagaaattaataactattacctcatttggctatttttacacctgtaaggaataaagctcagaggtcacacagctagtaagaagccagcacccttcgatgtgggagtgatgtggaggataggcatatacagagaacacgaaagcaaaacaccatggtgcagattttgaaagaaaagccctaagattagtaatgagtgtgaattattcaacaaagtgatcaaaaccaactccagtcctgcattcctcttcgccatcaggagtttggagcctggagactgctagctgcctggttgttgttgtttttttttttttctgagacggactttcgctctgtcgcccaggctgtagtgcagtggcatgatcttggccaactgcaagctccaccccccgggatcacgccattctcctgcctcagcctcccgagtagccgggacgaaccagtcctggcccagcccattccgcgagccagcaagcttctgaaaagcaaacctaggaagttgctttccaacataaagtggaggtttcaacacaggagactttaagcaagttccagtgtgtctatatttggtctggctgatcggctggactctggccttccccgctcacattagcagacagctctgccc

SEQ ID NO: 12666 - DNA, 2300 bp, Homo sapien
tgtatgtatcttccacattttgtttatccattcattcactgatggacatttgggttctttccaccgtttggctattgtgagtatgctgctatgaacatgggtatacaaatatctgttaaagtccctgctttcaattcttttggatatgtacccagaagtagaattgctggatcacatagtaattctatatttaattttttgaggaaccttcaacagggttttgatttattagaaacagggtctccctctgtcactgaggctggggtgcagtagtgccatcatagctcactgcagcctcaaactcctgggctcaaatgatcctcctgccttagcagggttataatgtttaatttttttagtatttaattttctttttttttttttttgagatggagtcttgctctgtcgcccaggctggagtgcagtggcccaatctcggctcactgcaagctccgcctcccgggttcatgccattctcctgcctcagcctccaagtagctgggactacaggcgcctgccaccacgcctggctaatttttttgtatttttagtagagatggggtttcaccgtgttacccaggatggtttaaatctcctgacctcgtgatccgcccaacttgcctcccaaagtgctgggattatgggcgtgagccacagcgcctggctcagtctttacttttcataacagaaaacgtaccctctgctttttatgggggtctaaccatctgagtgcagcttgagctcaagtgctaaagtccatattcaggttggtcagcagcagcagtcttgcttggaaccaagagatggaccacctgaatagcatgacctgggtcaacgagacagagccttaggcccagaaatctttcctgctgtcaggataaattagtttgtttcacaaagggactcttgaagatcagaatttctgtatctgtaagacttctatgacttaaagaatttctgtacgtgtgaaattatactattagaaatacaagattgaagagtctccttgtaaaagctagtgttaatggctaataatctagccaggatttagagatcagggaaaatgggattgaactgtgtgggcaaaggagattaagtagcagtggaggagctgaaaggggaatggaaaagtcgacggacagcttctactttaccatctgttttatcagcctggtaatctgacgcctgccagaactatgtggtcatgtgttccctgctttgcctctttctcaggatttataaacccttgtggtgggagaatatggagctgcatatatctagagggtttttttatttttatcttttgagactgcacttcactcttgctgcccaggctggagtgcaatggcctgatcttggctcactgcaacctctgcttcctgggtccaagcgattctcctgcctcagcctcccgagtagctgggattacaggcatgcgccaccaggcccaggtgattttctttttaaattttctatttttagtagagatggggtttcaccatgttggtcaggctggtctctaactcctgacctcaggtgatccgccacctcagcctcccaaagcgctgaaattgcaggcgtgagccatcgcgcctggctgaggtttatttttcaaagaatgaccaagaggctaggtgtggtggctcacagttgcaaatcccagcactttgggaggccaaggcggacacatcacttgaggtcaggagtttgagaacagcctgtccaacatggtgaaaccccatctctactaaaagtacaattagtggggcatggtggtgtggcctgtaatgggaggctgagacaggagaattgcttgaacctgggaggcacaggttgcagtgagccgagatcgcaccactgcactccagcctaggcaactgagtgagactgtctcaaaaaagaaaaaagaccaaaaactccatgaaactaccattcaataaataatcaataaataagatgcaatttctcaaagctcagtttacaaagaaggaaatttaataaatggttgaagatatacccccgactgaacccacaagttctctgagtagactcatggaattctaaagagttggttgcttggagactgatagaaacagctttggaacctaagaaaccaaggaaggcttaagatgcagaaccttgcttctctctgaggactgccttttaggaggccatttggaaagtaattttgaaacactgctcctttgccagtatctgaaaggtgctggatggtgtcagctggaagatgaggggcaacctgaggtagctgaaaaaactttggattaggtgtcaaaagggtc

SEQ ID NO: 12667 - DNA, 2300 bp, Homo sapien
tggaccctcacgggagcattacagctcttaaaggtggcatgtccagagttcgttccttctgatgttcggatgtgttcggagtttcttccttctggtgggttcatggtctcgctggcttaggactgaagctgcggaccttcgtggtgagtgttacagctcttaaggcggcgtgtctggagttgttcgtttttcccggtgagttcatggtctcgctggcttcaggagtgaagctacagaccttggtggtgagtgttagagctcataaaggcagtgtggacgcaaagagtgagcagcagtaagatttattgcaaagaacgaaagaacaaagtttccacagtgtggaagggggaccccagcgggttgccactgctggctagggcagcctgcttttattctcttatctggccccactcacatcctgctgattggtagagcccaggggtctgttttgacagggcactgattggtgcgtttacaattcctcagctagacacaaaagttctccacgtccccaccagaatagttagatacagagtgttgacacaaaggttctccaagtccccaccagagtagctagatacagagtgttgattggtgcattcacaaaccctgagctagacacagggtgctgattggtgtgtttacaaaccttgagctagatacagagtgccgattggtgtatttacaatcccctagctagacataaaggttctccaagttcccactagactcaggagcccagctggcttcacccagtggatcgtgcactggggctgcaggtggagctgcctgccagtcccgcaccgtgagcccacactcctcagcccttgggtggtcaatgggactgggctccgtggagcagggggcggcgctcgtcagggaagctcaggctgcacaggagcccacggaggcggggggaggctcaggcatggagggctgcaggtcctaagccctttcccgtgggaaggcagctaaggcccagcgagaaattgagcacagcgccagtgggccggcactgctgggggacccagcacaccctccgcagccgctggcccaggtgctaagcccctcattgcccggggctggcagggccagctggcggctccgagtgtggggcccaccaagcccatgcccacctggaactccagctggcccgcaagtgcggaacgcagcctcagttcccacttgcgcctctccctccacacctccctgcaagctgagggagacggctccggccttggccagcccagaaaggggctcccacagtgcagcggtgggctgaagggcttctcaagtgccgccaaagtgggagcccaggcagaggaagtgctgtgagggctgccagcacgctgtcacctctcacaagctccacctctggggttcacgccattctcctgcctcagcctctggagcagctgggactacaggtgcctgccaccatgcccagttaatttcttgtatttttttttagtagagatggggtttcactgtgttagccaggatggtgtcgatctcctgacctcatgatccacccgcctcagcctcccaaagttctgggattacaggtgtgagccaccgcgcccatcccctttttctttttagagacagggtcttgctatgttgtccaggttggtgcgaaactcctggccttaagcaaccctgccacctcagcctccaagtaaactgggattacaggcgtgagccatcttgcccaacttccactttctagctgtgtgatcttcagaaaatcagttaaattctctgggccttaatttactgatagggttcttgtaagtattaaccattagctactattgagaggtgaagaccgctgggcttctgggttgggtggggacttggagaacttttttgtctagctaaaggattgtaaatgcaccaatcagcactctgtgtctagctaaaggtttgtaaacgcaccaatcagcactgggtaaaaacgaaccaatcagcactttgtaaaacgaaccaatcagcactctgtaaaatggaaaatcagcgctctgtaaaatggaccaatcagcaggacatgagcagggccaaataagggaataaaagctggtcaccccagctagtagtggtaacctgcgtgagttccgctccaggctgatggaagctttgttcttttgtacttcacaataaaccttgctactgctccttctttgggtccatactgcatttcagagctgtaacaccgtgaaggtatacagcttcactcctgaagccaagaccatgaacccactgagaggaacaagaaaaacaactctggacctgctgccttt

SEQ ID NO: 12668 - DNA, 2300 bp, Homo sapien
atgcccagttaatttcttgtatttttttttagtagagatggggtttcactgtgttagccaggatggtgtcgatctcctgacctcatgatccacccgcctcagcctcccaaagttctgggattacaggtgtgagccaccgcgcccatcccctttttctttttagagacagggtcttgctatgttgtccaggttggtgcgaaactcctggccttaagcaaccctgccacctcagcctccaagtaaactgggattacaggcgtgagccatcttgcccaacttccactttctagctgtgtgatcttcagaaaatcagttaaattctctgggccttaatttactgatagggttcttgtaagtattaaccattagctactattgagaggtgaagaccgctgggcttctgggttgggtggggacttggagaacttttttgtctagctaaaggattgtaaatgcaccaatcagcactctgtgtctagctaaaggtttgtaaacgcaccaatcagcactgggtaaaaacgaaccaatcagcactttgtaaaacgaaccaatcagcactctgtaaaatggaaaatcagcgctctgtaaaatggaccaatcagcaggacatgagcagggccaaataagggaataaaagctggtcaccccagctagtagtggtaacctgcgtgagttccgctccaggctgatggaagctttgttcttttgtacttcacaataaaccttgctactgctccttctttgggtccatactgcatttcagagctgtaacaccgtgaaggtatacagcttcactcctgaagccaagaccatgaacccactgagaggaacaagaaaaacaactctggacctgctgcctttatgagctgtaacactcaccttgaaggtctgtggctttactcttgaagtcggtgagaagcgagaccatgaacccaccagaaggaacacattccggacgcatctgaacatcagaggaaacaaactccagacacactacttttcagaactgtattaagaactgtaacagtcactgcgagggtctgcggcttcattcttgatgtcagcgagaccaagaatccaccagaaggaaccaattccagacacagaattatttgccttcttacttcctgagagttctaggcacagaacatacttgaggtgttatacaaaggtaattagaactgacagggaattgtatgattaatgacgtgggacatgagagatttggaacgagataaaaaggcttaccttgaggacagccttattaggagcagaggcaaacacaggttttgtgggtttgaagcctacacatttatagctttctctaattacacaggtaggaaattataaaatcaggtacaagggcttggcaggggcctaaagcttaagtgatgaaaaaaaaaaacaccacacctctggtgaaaccaatagcttacgaaaaagtagaaaaaagcgcgatgcatggggagctccggtagtcctttgaggtatttgagaggctgagtcaggaagatggcttgagcaccaggagttggaggtttgtaagtgcagtgatggtaaactgccgctgtactccagtctggcaatgtagtgagaccctgtctctcaaaaaaaaaaagtaacccttgcctgactgggacaataattgagaaaccagtaaaacaaaataataactattagccgggcgcggtggctcatgcctgtaaatcctagcattttgggaggctgaggcgggcggattacaaagtcaggagtttgagaaattactacctattaccccatttggctatttttacacttgtaaggaatgaagctcagaggtcacacagctagtaagaagccagcacccttcgatgtgggattgatgtggaggataggcatatacagagaacacaaaagcaaaacaccatggtgcagattttgaaagaaaagccctaagattagtaatgagtgtgaattattcaacaaagtgatcaaaactaactccagctctgcattcctcttcgccatcaggagtttggagcctggagactgctagctgcctggttctttaagaaccagccctggtccagcccattccgcaggccagcaagcttctgaaaagcaaacctaggaagtagctttccaacataaagtggaggtttcaacacaggagactttaagcaagttccagtgtgtctatatttggtctggctgatcggctggactctggccttccccgctcacgttagcagacagctctgccctagtgggcgcttagcctgcgacggcagcccgagaggatgtctaacaagcttctt

SEQ ID NO: 12669 - DNA, 2300 bp, Homo sapien
cctgtgcctagcctaccttatatttcatcaaaaagctttttttaagtaaactgacatgtatggccaggcacggcaggtagctcccacctataatcctggtgtttccagactggtcttggtctcactgacttcaacaacgaagccacagaccctcgcggagatgttacagttcttaaaggcagcgtgtctggagattgtaccttctgatgttcccatgtgctcagagtttgttccttctggtgggttcgtggtcttgctggctcagaagtgaagctgcaaacctttgcggtgagtgttacagctcttaaggcggcatgtctggagttgttcgttcctcctggtgagttcgtggtctggtaggcttcagaagtgaagctgcggaccttcgcaatgagtgttacagctcacaacagcagtgcgggcccaaaaactgagctacctttattacaaaactaaatagaacaaaccttcccgcaacgtagaaaagaaccccaacaagttgccactgctagctctggcagcctgcttttattcccttatctggccccacccacatcctgctgattggcccattttacagagagccgattggtccgttttgacagggtgctgattggttcgtttacaatccctgagctagacacaaaagttctccacctccccactagattagctagatacagagtgccgattggtgtattcacaaaccctgagctagacacagggtgctgattggtgtgtttacaatcccttagctagacataaagattctccaagtccccaccagactcaggagtccagctggcttcacccagtggatgccgcacggggttcgcaggtggagctgcctgccagtcccgcgccgtgcgcccgcacttctcagcccttgggcggtcgatgggactgggcgttagtggagcagggagcggagctcgttgaggaggctcggaccgcgcagaagctcacggcgggggcgggggctcaggcatggcgggctgcaggtcccgagccctgcgccgcggggaggcagctaaggcccgctgagaaatcgagcacagcagctgctgccccaggtgctaagcccctcactgcccggggcttgcgggccggccggccgctccaagtgcggggccgccgagcccacgcccacccgggactcgcgctggcccgcaagccccgcgggcagccccggttcccgcccgcgcctctccctccacacctcccagtaagctgagggagccgactccggccttggccagcccagaaaggggctcccacagtgcagcggcgggctgaagggctcctcaagcgcggccagagtgggcgccaaggccgaggaggcgccgacagcgagcgagggcagccagcatgctgtcacgtatcactagcactttgggactacagaggcaggaggatagtttgtgctcaggagttcgagaccagcctgggaaacagggtgacacctcctctctaaaaataaacatttaaaaattaacgtggcatggtggtgcgctgtctgtagtcacagctactccgaaggctgagacaggaggatcacttgagcctgggaggtggaggctgcagtgacctgtgatcgagccaccgccttgcagcctggatgacagagagagaccctgtctcaaatacaacaaaaaagcaggccgggcgcagcggctcacgcctgtaatccctagcactttgggaggccaaggcgggaagatcacttgaagtcaggagttcaagaccagcctggccaacatggtgtaactccctctttactaaaaatacaaaaattagcggcatggtggcgcgcgcctgtaatcccaggtactcgggaggctgaggcaggagaatcgcttgaacccaggaggcggagattgcagtgagccgaagcgccactgcactccagcctgggcgacagaggagactctgtttcaaaaaaaaaaaaagttaaaaacaaaaccttccatggagcccatgaaaggctggaatttggcttgatctcattggcttttggtttcaccacaaattgatcatccaacaactttcattccaacaaccgagggtggtgtgaggcagagaggctttctacggggtgggttgggcgccacaccttgcgcgccccggggcccaaggagacgaccctgaagaggagcctggctacttttgcctcagacgagtccggagcgccgggttaaccggtctgaagtcccaggggctttctgggactgctcagccaccggcagcttccggcaccaggggacgccggacgccgtccggacattcggcgcgcttgccac

SEQ ID NO: 12670 - DNA, 2300 bp, Homo sapien
gggcccaaggagacgaccctgaagaggagcctggctacttttgcctcagacgagtccggagcgccgggttaaccggtctgaagtcccaggggctttctgggactgctcagccaccggcagcttccggcaccaggggacgccggacgccgtccggacattcggcgcgcttgccacgatcttggacgggtctcgggcctcgacctttgaattccccgctccggctccaagatgtcagcaacgctgatcctggagcccccaggccgctgctgctggaacgagccggtgcgcattgccgtgcgcggcctggccccggagcagcgggttacgctgcgcgcgtccctgcgcgacgagaagggcgcgctcttccgggcccacgcgcgctactgcgccgacgcccgcggcgagctggacctggagcgcgcacccgcgctgggcggcagcttcgcgggactcgagcccatggggctgctctgggccctggaacccgagaagcctttttggcgcttcctgaagcgggacgtacagattccttttgtcgtggagttggaggtgctggacggccacgaccccgagcctggacggctgctgtgccaggcgcagcacgagcgccacttcctcccgccaggggtgcggcgccagtcggtgcgagcgggccgggtgcgcgccacgctcttcctgccgccaggtgagccaggctgctggcgggtggtgtgagcgtcagtggcctgagtctccgtttgtttccagtgctgatttagcactggtttggttttggagcaagatcagagaagctaacattgactatgtcagtggccactctaccaaaatagagggtttggtaccgggcgtggtgactaacgcctgtaatcccagcactttgggaggccgagatgggcggatcacttgagatcaggagtttgagaccagactggccagcatggtgaaacgctgactctaccgaaaatacaaaaattagtccagcctggtggcacacgcctgtagtcccagccactcgggaggctgaggcacgagaatcgcttgaacctgggagatggaggttgcagtgagccgagatcgcaccactgcactccagcctgggtgacagagcgagactccgtctcaaaaaaagaaaaaagaaaaaaaaggattttttgttaggctgtgtactacggtttttacttgcattctatcagttagtctctataatatcccaatgaagttggtattgttattctgcagatgaaaaaacaggttcaggtcgtcaggtacattatccactttgctattaatcactaccctacagatttctacaggcatcagcctgacttgtctaaggcagaatgatgacagtgaatgaagctattaccatgtcgtcttctctagtgttctaggcacactgtctcttctccacttcttcatgtgctgctttatcacaggtcacacttcagactccactgcctttctcacctaaaaccatctctgggtatttctttttctttcctccctttctacatagacatctgaaatatcagtacactaaaaaccagagggctgatgcaacagaacataaagttttgtttcaatcttttttcttttctttctttcttttttttttttttttttttgagacagtgtctgtctctgttgcccacgctggagtgcagtggtgtggtcacacctcactgcagccttgacctctggggctcaagtgatcctccctccattgcctcccaagtagctaggactacaggcatacaccaccacactgactaattaaaaaaaaaaaaagattgtagagatggggtctcactacattgtccaggctggtcttgaactcctggcctcaagcaatcctcctgccttggcctcctaaagtgctgagattacaagcatgaaccacagtgtccagccaggaaagcaaattctttaaattgtataatggcttacatttataatattttgttctctaggacctggacccttcccagggatcattgacatctttggtattggagggggcctcttggaatatcgagccagcctccttgctggccatggctttgccacgttggctctagcttattataactttgaagatctccccaataacatggacaacatatccctggagtacttcgaagaagccgtatgctacatgcttcaacatccccaggttctcctcatgtcctttatttaatcagtctctctagaaatatttccatagagagtgtaacctttaccacgtgcagaaatgctgctctgttcctctttcacaaagatgtcttctggagacttccttg

SEQ ID NO: 12671 - DNA, 2300 bp, Homo sapien
ggcgtgagccaccacgctcggccttcaatactatttttaaactttctttcaacttattttatccaggcctgaaataagagcaagcagacccacacattctctggtgaacaggttttggaatctattttgtcattttgtaggatatgaaagaacaaaagaagggtccaagttatataattcttttattttctgtgtgaatgtttttaacctttgagaatctggaactcaaaatgttctttatgtgaagtgtaccaagattttgaaacctatccaatagtcccatagacagttttttaaaaaataaacatagaaattgacccttccggttttaaagcttaaaatttaggtatcccccagacatctcagaaagtatcaaagaacttaaacttaccagatcactacatatgaattttggtgtaccaccactcagtccacagcaaacattaaaccctcataatatccttttagatatatgtttatatacgtgtgtgtactatgtataacttttccatttttttgctttgttttttgttttagagacagggtctggctctgttgcccagggtggagtgcaatggcacaattagagctcacctaagcctcaaactcctcaaatgatcctcctgcttcagtctccccagtagctgggactatgggtgttgtaccaccatgcctcgctaatttttattttttacagagccagggtcttgttacgttgcccaggctggtcttgaactcctgggttcaagggatcctcttactttggcctcccaaatttctgggattacaggcatgaacaaactgcaccaggccactatgtataattttaaaggaaaatcgtaccaactattttgtttggtaacttctatttttacttgaaatatgactatctttggatgtgaatagatgcctttcagcaagtcaattgtacttttttagtgtaagtacattattgcattggatgttcaatactactaaccaattttctctctctttttgtttgtttgtttgtttgttttgagacggagtgtcactcttgttgcccagactggagtgcaatggcgcgatctcggctcactgcaacctccgcctcccgggttcaagcaattctcgtgcctcaggctccggaattgctgggactacaggcgcgtgccaccacacccggctaatttttgtatttttagtagagacggggtttcaccatgttggccaggctgggctcaagtggtcaagtggtccgccctcctcagcctcctaaagtgctaggattacaggcgtgagccaccagtcccggccaccaattctcttttgttgataattgagttgatttttttttttctattaaagctttgaacatacatctctgtgctcaggataaagtcctggaagtggaactgctggatcacaaagggtgcaaaagtttttgaacagccaacagccttccagaaaggctgtatcaattataaacagcagcgtatttgtgtgtccctacttcaccatacccctagcaactctatgaattattattattgttaataatttttagctcatttggtaggtggggaaaaaaagacaccctggtgattaaaaccaacaatttgtgatatttaaaatgtggaaccgagctttcagctgcctctggctccctggaggatccggggtaaagaaacataaaatgggtggagtttggctctggtattctcagtgggatgggatggagagggaaattacagcaagccgcttattctcccctcgtccggaaaagggtgggaaacgccatcgttagggcaaaggaattaagaacattattttatgaaaagggtagttgttagggggacgttttaaggtttttaactttaggcggacaagtcactacagatcagctgaaattgctttcggtcctgactactcctgtgcggggttaagacctaaggaagcaaaagggcagccagcaacagccggacgggaggaccccggcggccgccacgcagtcccacaatgccccgctcgcaccaccctgagggcggagagaaaggaccgctgccggggatagggcttccgccgagagcgccgagaagtgcgcacgcgcactgaccccgcgggccctagcaaccagagcagtgacagtagcaaccgccggaatggtgagtacctttcgggccgcgtagccaaagctgagagaagattgggagtggaaaagggtgactgtggagtgttgagggtctgggggtccttgaacagcggaagggagccggtagctgacgctagctctgtggagtcaggggcccgaggcgaaagag

SEQ ID NO: 12672 - DNA, 2300 bp, Homo sapien
acaaattctaattgggatcaaattatactttatttttttgagaaactctttgtcacccaggctgcagtgcagtgctgtgatctcggctcattggaacctctgcctcctgggttcaagcaattctcctgcctcagcctcccaagtagctgggactacaggcacttgccaccacacccatctaattttttttgtatttttagtagagatggggtttcaccatgttggccaggctggtctcgaactcctgacctcaagtgatccacccaccttggcctcccaaagtgctgggactacaggcatgagccattgtgcctggcctacttattttgtaatcctatatcctgtgactttaaatatcagatctatagtagtttcttttaatttattttctcaatacatgtattttagcaggattctgtggctaatttgaggcaattataccacgttgccttgaaaccatgtttttaggctacaagtgtgtctcatcagggctatagtataccatagaatcactgggtttttttctgatttcttcaccctgtgtttgtctaagtgtgatcccttgatcatctgcactttatgcaggagatcagccccatcccaaatttatagaaacagaatatttgctgatgaaacctaggaatctgcatttacagtaagcaacttgggtaattctaggacacatatttgtgaacccatgcattagactaatatccatctgtgggatcaaaggggagagcaaacatatttagcttttgtacgcagcttgttctttgtgatgagaacacagtgtgtcacataaaaatccaccaccacatgcttttttggcatcaggcatgatttcaaagtggtcacatatctttttatcataaagccatctcaaaggcaaacaaatttgagaaggttttatacctcatactaaagcaccttgtatatcacctcgagtcaacctgttcatattttgctgacaatttatttgtgctagctgccttaacaagaattaaagaattatttcccaaccatattcctagatttaaaggcaatccattattcactgggagttctcaggagtgggggatgactagaaaatatacagatttggccagtcatttacctgactcgcacactcataatcccagctacttgggtggcggaggcatgaaaatcgcttgaacctgggaggcggaggtcgcagtgaactgagatcatgccactgcactccagcctgggccacagagcgagactctgtctaaaaaaaaaatatatatattgttctgctagatggtttttaaactatgtatcatagacatcttcccaagtcggtatctgtagccctatctcctttgttttagtggcagcttagtatttcactatctgttcctaagttaacaggtgtttatagattttttcaatttttctgctattccagtaatacatataatctagttcatatatcttttggcatttatattaatatttcagtaggatgtatttctagaagtgaaaaacttggtcaagaaatgtatgcattaaaaaatttcataataccagggccaggtgtggtggctcacacctctaatcccagcactttgggaggccgaagcaagtggatcacttgaggtcaggagttcaagaccagcttggccaacatggtgaaaccctgtctccactgaaaatacaaaaattagccaggcatggtagcaggcacctgtaatcccagctacttgggtggctgaggcaggagaattgcttgaaccggggaggtggaagttgcagtgaactgaaatggtgccactgcactccagcttgggtggcagagtgagactctgtcttaagaagaaaaaaaaattgttaataccatattgccctcaagaagattttttcaaatttttaatgagtgttaaacttaggtaatcagagaaaaacaatgatttcaaaatgaagtaataaatgctatgattgagtggggaaaatattacttaaatattatcttttatgggcactagtgttaaggaataatttctgatttaccatttacatttttcacattaaattttttctttgttcttttaaaggaagctttcactgtctacaaactgcattgaaaaaattgccaacctgaatggcttaagtaagtgattcacagtaacagatggttcatggatttcctagttattttaataaacattccggagacaatatgtaattccagaagctggcacctgttttagccatacttgttgtcagataatagaatacataaactatgtcttaagtttgattatccaaagaaaaataga

SEQ ID NO: 12673 - DNA, 2300 bp, Homo sapien
tgaacatgcaatttcacattcagtgtggaataagaagtgtcataggttcgcgtgtttttcacaactgattatgatgtccatgatgacagcgtgcactaagcgctgtgtccaaccaaccctttacctggcattttagccagcaagacccgcttgcattgcagtcgttcacggtgctcgctggcacaattttagaatgttacatgaatactcaggcctgactaaccttcccctccaaaaaacaacaaaacagaacaaggctaagcctttactactcagagacacatctgtaagaccccacagggacaagaaaagtagctgtgatctaggtctgcactaaagctgcctttcctggcactcagaagtgcccttccaggcctaactgcagaagggtggcctcagcctcctcctcctcctccttggcttcctcctcacggatctgcaccagcaactgaaagaggtttggggctggcccttccccagccccggtaagccacagctgccttcggatggccccgctgtggttggccccggcaatgacctgctctaggcgggcctggttcacattatctttatcaatggcccccttctctaccaccttctgtagcagaggctccagacgaatgacataagcagacaatttttctcccgggttctgataagtgttcagaaatttgatctgggcatccctagagctctcaacgctcccaaacacctgctcaagcgccttcaggcattcggcagtggttatcgcggggttgttggacttaaggatgcgaataacatcagcggcggggcctctaagactctccatcaaccgccgcctcttttctacatcggacacctgccactcctctaggacctcattagtgtgctccagccagggatcaaaggtttcctctccaggccctgggatgtccctccccgagaaaagtgtcagcctcttgtaccatatggactcaacaagaggctgaataacattatccaaaatatagtttagcatctctgctggcatctctgggcccggggtcggagtagggttctgaaacccaaggacacgggcaacatcttgcacggtccacccctctctagctaggaagaggtgcaatctttctaaaaattcagcatcagaagttgggggcttaaataacactttccagacccctcctttgcccggcatctccctggggatcgcggcgtaatctacagcgccagtgagctctaataaggctgctttcgcattttcttccctccagaacattctcccaagcattcggtaggagacctggggcatcgcagcctggagggtctcttcgatttcagcctcatcacagttcactgggatgccccagactaacagagctctctgggagttcacatccatcccccggcaccagtcttccaacagtgtcatcgccattttctcaactatcaagacgccaaattctaccaacagactgtggctcaccgtgctcctggccttagaacaataccagacactcccaccaagtaggcccgagggaggcgaccttcatgcagtcacgattaacaaagacagagtcctgatctcgcccttctctgcccccacagtcagtccgtaggtgcactcggagccgagctcggggacgctgaggcagtcacgcggccgtcgccatcttgcgtctgggtctgggtccggtcgggtccgccgcctgcagcaggggcgtcgcgtcgtcgtgcagcgggcgaggagcgacggcgggcggcgaaggcaggcgcgctgggccgagagccgccggggtgtggtcgcggggcgtggccgccgggcgctcgctgcggctcctggagaggatcgggcgttcgcggtcgcagcctggtcttcccgcgggcgaggagcggccgtttgggagactagccagagggagaaactgtgccgaagtcgcggcggctgcgggccagcggaaagcggcttcttggcgggcgcggggactcctctgggcgggcggcgaggacggccgaggaccagaaacgaaggcagcagaggagcaggaaagtcggagaagcgaggctggagacagcagaggcgagggtgggaaggggcggccgcggcggcccgcagcggttcaggcgctgcgcggctgctctggcgtccagtcctacccgcaacccgccgcgacgttactgctgcagtggaggatggggccagccggcgagcggcgtccgccccgccccgccccgtcccgcccccgcggcggagctgctcgggcgtctccatggcaacggtgtcccagccggcgcgaggcacgcctgctccggcggctcgc

SEQ ID NO: 12674 - DNA, 2300 bp, Homo sapien
tatttttttttttagtagagacagggtttcgccatgtcggccaggctggtcttgaactcctgacctcaggtggtccacccgcctcggcctcccaaagtgctggcattacaggcgtgaaccaccgtgcctggccggaagtctttaaaaaataaagtgattctactcttctaagcttacagagaccagaccaggtgaatgtaactggggaaaatcaagatggtacctctctgcattatcccgccagacactgtattttatgcattcatgtctaggatacagtgtgaaaattaaaaagtttagagggcagatgcaattgtggcaagtgacctgccaataaagcaggtgcagctatagaagctggcataggtatatccttaatggtgctttctccctgggcttgtctttttgttgtttttttccccctatattcagagctccttgagaagtgataaacacctccagctttctaacatcctccccacaccatctcaccatatccatctcccagcatccatctgcattcagctaagggcgggaaactgacctagtgcctgtgttgcagaccatttctgaggtctccaccatccaaggaggcacagccgtcattactgtcctccatgccttcagcagcccccctcacagctaaggtacataccaccccttctgccgcgcctccacccctggcaccaaggtcttctgctgcttatgtctaaagggatcacctatatttaactgcctcagtgacctaacctctttcttctcatgtgccagatgttaagatgaaggaggaatacaacacatactcaagcctcagcctgtttagttgttttcactggggctcgcttttctgggacggtatttattatcagactggcaagcctaactccataggtttacaggaagtagggatatttttataaaacaattgtgtcctccccacattttgctatgttaatatttgcttctaacaatttgcagctgtttcactttttcctcatttgtctctaagttgaaggctttgttggaggggacagagcacaggaacagccttgacagtctgtaattattgtacagatattttaatagcatataaataagtatattccttttattttgaaacaaaaatgatcagacactgccttttgtgtgtttgctgcctgtggcatccttttttaaaaagactgttacatattaaaatagtgtacatatataaatattacctcttttgctgtacagttgtgatagagactgaagattttattttttgtgtgctttttataagaaaaaaattaatacactaaagaatcttgctgatgtgattgtaatgtacctatgtaacttatttacttttgaatgttcttctgtatctttaaaccttttattaaataaggttttaaaaattcagagttgaatgctttgttctcttgggattttcaccatctggggttgatgtaagtgcgccttgtcttgcttgcagggagattactcgacatttttgaaccataaggattctcttttagcagcctattgtcaatgatgccagccaggaaaaggaaaataatacactaatgtttgcctggctaaaagatgactcagtagacacagacagatttttacaaaattttagacaagaaaaagtctaaactcagtgtctcacacaaatacacagaaatggcgcactccgacattttggcttcattgggatgaaatatgcagggtgcacagtgtggtcaggggcaacgggaagccagggttctgaggagagtattttcacgtgcagggtggactggctgagcaacccgagtagacaagtccaccatgagggatgcatttccaacaatatcatcttaaatccactccaggattgggttattatttttaaaacacggtgcttagtagtagttgtttactgttaaaatgctaaattatgaaaaaggaaatgcgccatcagagaaacaaatgcccgagcccctcgctggctccacggcaaccgctcgacccccgcgagccgccggagcaggcgtgcctcgcgccggctgggacaccgttgccatggagacgcccgagcagctccgccgcgggggcgggacggggcggggcggggcggacgccgctcgccggctggccccatcctccactgcagcagtaacgtcgcggcgggttgcgggtaggactggacgccagagcagccgcgcagcgcctgaaccgctgcgggccgccgcggccgccccttcccaccctcgcctctgctgtctccagcctcgcttctccgactttcctgctcctctgctgccttcgtt

SEQ ID NO: 12675 - DNA, 2300 bp, Homo sapien
aggtgggccctgggagcaacaggagggttccgtggggcctgcagagggctgagagggcctccttgagcttctgtatgtggccctgggctttgctgtccccgccctgcctctgtgtggaagttgcagggaagggcaaggaccggctcagcttgaacttatctctaggagagttgaaaggggggtccagaggctctttcccatctgtaaacctgcagctgcttctcccctctccagcctctggaccttgcctttctggtggtgccaggtcaggctgtcctcccaagcccctagaagccagactccctacacctagctgaggccttgctctgccggctccccctcatcttcttcccaccctgagggatcatcaagttctccgtccccgcaaggtgaggcctcacttcctgcccttttcactcctctagacggatcaacgtgggctcccggttccaggcagaaatccccttgatgagggaccgtgccctggcagctgcagatccccacaaggctgacttggtgtggcagccatgggaggacctagagagcagccgggagaagcagaggcaaggtgaggaggggcctgggggcagcaagtgagggcaggcacatgggtgggccaggcctcaccctgcccagccccgccctgaacgtggtttcctcccctccctcctcatgctcctgtggatccagtggaagacctgctgacagccgcctgctccagcattttccctggtgctggcaccaaccaggagctggccctgcactgtctgcacgaatccagaggagacatcctggtgagaaggcaaccccagcagagggagggcccctcagtgggggctggcttggatccatgtctgctgctcaggacctatggctgctggcatgcacatttgaggccagtaggagggtctgactaaggaaggggctgtaggggcttgacccaagggagccctagtttcagaccccgggttttgctgtgcagtgtcctcctgtccattcccatccctgattctgggtcagtggactcagactggatggttgctgagagccttctccagcagtgctgcctcccttggggccatggactctcttaagaggacctgaggtctgttttctgggcagccccaccccctgtgatctcaccaccccagtggaccccttatctctcagcagttaagggggcaagagtaagtgtccaccctactcgggattttatcagggcctagaatgctccgtccaccaccgacacccctgtcagtgccctgacccttccctcacttcccctccaggaaacgctgaataagctgctgctgaagaagcccctgcggccccacaaccatccgctggcaacttatcactacacaggtgggcctggctgcggtgggcatggtgcctggagcctcaagaggtctccagcatccatggggccctgctcagtgctgagtcacagccctgggtgggggcgggaggaggagggtagataagccaagagtcagagtgagggaactgccaccaaagctggggtagctctccaggggtttcctgtgccctggaggggaggggagaagggagtgggcaggtgggagaccatccaggcaaaaaagcccaggccacaaggacaggaacccatggagagccatccagattggcatcaggtacctggaacttagccccaggagtgcatgtcctgttctggtcactttaagaaggacatggaccgagtcacataatcctaacagccaatgttttccatgcatgttagtgctacatttcatctgcaccaggcagagcaccaagggtttcacatgcattatcttatttaatcctcaccacagctggtgagctaggtgatattagtttccatttcacaagcaagggagcgaggctgtgaggcacatggaagtgggacgaggagccggctctgatgcctgcagaaaccatgggcggatggcctcacacttttttgcttgtcaaaattgccctgcagtggccagggccctgcccacctcactccctggctgcctctttgccccataggctctgaccagtggaagatggccgagaggaagctgttcaacaaaggcattgccatctacaagaaggatttcttcctggtgcagaagctggtgagctgggctctgtttcagggcaaatgagggccaggagctgcctgtgtgactttggggctccctctgccagtgaccaatccctcttaaaaagcagtcaggtcaatgctactgagtagcctcagagagaatttcctaaacaatacaagaaagagaaagataggtctcttttcc

SEQ ID NO: 12676 - DNA, 2300 bp, Homo sapien
cacacataaagctggaacatcatgcccaggccatcctgtttgctcatagtcctttgtggcagatctagtctctggggctctcgaacagtctttttggccaaaagcagacattctggaaatattgggctggcttggggtgatgtactgctgaaaaatgttgcccactccataaagagatccatttcctctgcaaaatgggataatccaatcccttagggtggtagagaggattaagtggaagtagctagcttatagatgcctttggccaattaacctttgactgtgacctcacccatggtgtagctctctggtgccccctggtgtctgtggatgcaaaatgtttgccctaggctggccagccttctgtactgcttcctggggaggcttctccctggctaggctgtgtaggaagaggaagtcattgtagagatcagactggcagccagcgagaggtcagtctgtccacgagtatctaccgaacactcgggcgtaaggccttgtactgggtcctgtgagggctccaagaatgtacaggacaccatggtctgttctatagagaatgcaaggtcattagggagttgacatgaaagccttggagttgaaaaaacagaggttcccggtagtgtgggatctgcagccagtgagcaaagccccagcagctagcctgggatggtgaggactgtattcaagaggggtggggccagagctgagccgcagcgatggaggagggcggggggcagggaggacacaccaggcggaggaaatgactggtgcaaaggcctgtagatgggaccgtgcagggagagtgaggggttgggaggtaagcagtcagctaggatgcaggtccaggcacatgggtggtgggaggtacaaatggaagcggaaccgccttgaaccctgaggggagggttgcaggttttatctcacattgcaggagggagtcagtaaagagcaaagatttttttttttttttttttttaagcaaaggagtgttttgatcatgtggggccttaagaagaccaacttgggcctgggcacggtgactcacacctgtaattccagctacttgggaggctgagggaggagaattgcttgaacttggaggttcaactccttgagccgagatcgcaccactgcactccagcctgggcggagacagagtgagactttgtctcaaaaagcaacaacaacaacaacaaaaacaaaaaaaaaactagcttgggagaaactgaggcagaaaatccaaagaggaagtgagacgataactataaaacagcgatccccttcaccacctccctagtgtgctcaaagtttcagtctctttactagaaaaccacagctttatgttggagttagtgttggagcttctgggggcaaggatatggctttggtagtagaagcagtaataataatctttatcgagtgccaggctctgtgcattattttatccagttctcacattaaccgtaggagacaggtagtgatagccccttttggtgagtgtgaaaactgaggcacccaaatatttagtgaagggcctgcgttttcgtaggtgacaggctgcagagccaggactcaggtgcctgtgttccctgcgtgagctctgtgtgtcaccactgtgactcttgcacatacagggcagccactaggattgggggtgctttgctgaaaggggggtgctatttatcaacctgctctttgtcccatagacagtgctgaagtaaccccgcctgtcctctctgtgatgggggaggccaccccagtgagcatcgagccgtaagtgcagccctgcccctggccgaggggtgtgggtggccacactggtgcagtgtgtgcaggtgggccctgggagcaacaggagggttccgtggggcctgcagagggctgagagggcctccttgagcttctgtatgtggccctgggctttgctgtccccgccctgcctctgtgtggaagttgcagggaagggcaaggaccggctcagcttgaacttatctctaggagagttgaaaggggggtccagaggctctttcccatctgtaaacctgcagctgcttctcccctctccagcctctggaccttgcctttctggtggtgccaggtcaggctgtcctcccaagcccctagaagccagactccctacacctagctgaggccttgctctgccggctccccctcatcttcttcccaccctgagggatcatcaagttctccgtccccgcaaggtgaggcctcacttcctgcccttttcactcctctagacggatcaacgtgggctcccggttccaggcagaaatccc

SEQ ID NO: 12677 - DNA, 2300 bp, Homo sapien
tgtcaacatggccaaccttacctgttgtactgagtacgcagagggataaactgggtgctgctcaccctgtagggctccattctctgcctttgagattataggaatcgagcaagggaaggcctctgttctcttatagtcctgctttctattctagatagaggcccatgaggcgtacctagcagggagaagtaggagggctaacctttggcagtgtgcatgggctagactttcctagtaggattaatactatgagaacaaaagttctgcaaggacaaggactgtccattccatttttttttctttttcctttttgttttttgagacggaatccagttctgttgcccaggctagagtgcagtggcacgaccttggctcactgcaacctccacctcccgggttcaagtgattctcatgcctcagcctcctgagtagctgaaattacaggcacccgccaccatgcccggctaatttttgtgttttagtagaggcagggttttgccatgttggccaggctggtctcgaactcctgacctcaagtgatcccctcccccccacctcgacctcccaaagtgctgagattaccacgcccggccttgtccattccattttgtagtcccatgtccagctcaggtcttagcacgcagtaggagctttcatctaacgcagagcctggagtttaagtagtgataacagccaatatttactgaggtaccaggtaatgttctcagtgatttccttgtattaattcatgcagtcctcatggttaccccatgaagtaggcacttactaggtaggcaccatgttatgaagatgcacggaaagattgagtaattttcagtggcaataaaggtggtaggtcccaacccaagaagtccagctccagagcctgggccctgaactactgtactctcctgccctgtcacacactttacagcagaggtggggaactgtggtctgggggccagatccagagctaagaatgtgttacaattttatacagttagttttaaaaagaaaaagggaaagaagaggaatatgtaacagagatcacatgtggcccacaaagcctaaaatatttactctctggccccttacagaaaaagtttgctgacttctgccctagaggagatgataaaaagggcttttggacctgctccttttttcaggcttgccttggtgggtgtggtaggcagactaagttccaaaggtgagactggcaagctgtggttaagactttactttctctgggacacggggggctgagccgtccttgttttctttccttctccaggcagaggacatgaatgtcaagttggagggggagccttccgtgcggaaaccaaagcagcggcccaggcccgagcccctcatcatccccaccaaggcgggcactttcatcgcccctcccgtctactccaacatcaccccataccagagccacctgcgctctcccgtgcgcctagctgaccacccctctgagcggagctttgagctacctccctacacgccgccccccatcctcagccctgtgcgggaaggctctggcctctacttcaatgccatcatatcaaccagcaccatccctgcccctcctcccatcacgcctaagagtgcccatcgcacgctgctccggactagtgagtgacctccctccgcgaccctggcaggagcggggctggggcactgggcagggaggcatctcagcctgtggggctgctggggattgggctggaacactctgggagaaggagctctgctctgtcttctctgagattgagaaggaggttgtcctggttcaacaaggaggggtggggggcccgcccagctgcttggattcaaatctcaattctaccatttactattacatccacttttgcaagtcacttcaactccctgggcctcagttttttcagtattaagatggggatattagtattacttggttgatgatgaaactgccaatattcaactatttttggattcacaaatagtagtttcctttggttcaacctaatagccacttcctaggctcaggtgcattagcacacataaagctggaacatcatgcccaggccatcctgtttgctcatagtcctttgtggcagatctagtctctggggctctcgaacagtctttttggccaaaagcagacattctggaaatattgggctggcttggggtgatgtactgctgaaaaatgttgcccactccataaagagatccatttcctctgcaaaatgggataatccaatcccttagggtggtagagaggattaagtggaagtagctagcttatagat

SEQ ID NO: 12678 - DNA, 2300 bp, Homo sapien
ctgtgcccgcccagccctgccctccgctgctgctggctggtttcctgggagcggctggggttgctaacaatgacctgtagcatctagggcctgagatttcctcttcagagccgcccgagctgttttcccctcttcctagggaccagaatcttactggggaaagaggtgggctatgtagctcccacccccaccaacttcccaggaaaaaaacaaaacccaaacatcactctgagggaaagaaaagtcttgaaaaatacatgcaagcagctatgctataaaatacaggtctagattctgttctgtagcgactgctttaaaaaatcaagttacgaaacaaaaatggaaaaactgtgtacttaagtcatgacattatcgtggagaaaccttctggaactgagttctagcaatctgcaccctctacgatctgagttacactatttgccaggggctcttcggcagtggaaggggcaggggtcaggcaggggcggggtcagctgctgaccagctcttggcctggatcctgcctccaccctgccagggttgcaaaacaggttctgtgctagtttgggaaagactctggcagccacagccccacccagcagctcttcccaggggtggggctaggactgcacacacccttctggggccttacctgcaggccttggtgagcctgaccctgggcccctgactctacaagggtctgttggagctcctgactctggggctgcacaggaggagtggccacgtcgggaatgaccctgtcctctccacttcccgagcctgagatgtgcttggagtgtcagaggaggcactggctggacaaagatccttctgggtctggtgggaggctcctgcatagacagatgtgtgccaggaggactaggcctggctgcccagggggctagggcctgggtaagaggagaggggagccagtgtggcttttgctgcctctttctcagctgggctggaggggcttgggctggatgtcagctccacctgtgccttagaatgtgcctatgcagtgcacaaataacacagacagatgcaggcagtcctggagcggaaccaggagggtgaggtggtgggacaagagagtcacagtgccctgggagatgcagctgattctcctgccctcctggcagctccccaaaagtcctggctcctgcctcaccaatgctgctctgtgacttggggcctgtccctgtgatatgaggtggtgggaccgaaggcccttggagccccttttcttacacttgtgctgatgttcggggcatcctgggaggctgtggctgacactgtcactgctcttccctctgcaggtgccagaaccctgtggagcatcatgaactgggaagagtagctgagccccagagcctctctggaagagaaaggaagagccagcagttctttctcccagtgtccgacctcactgtccagcgtcttcctctgcccctgctctgccctccctggctcctggactagagcccggcttccagcaggacgtttccccaggggatgggcgactgttgaaggggatctcaccgccagggctcagttggccacatcatgaacctccaggcccagcccaaggctcagaacaagcggaagcgttgcctcttcgggggccaggaaccagctcccaaggagcagccccctcccctgcagcccccccagcagtccatcagagtgaaggaggagcagtacctcgggcacgagggtccaggaggggcagtctccacctctcagcctgtggaactgccccctcctagcagcctggccctgctgaactctgtggtatatgggcctgagcggacctcagcagccatgctgtcccagcaggtggcctcagtaaagtggcccaactctgtgatggctccagggcggggcccggagcgtggaggaggtgggggtgtcagtgacagcagctggcagcagcagccaggccagcctccaccccattcaacatggaactgccacagtctgtccctctacagtgcaaccaaggggagcccgcatcctggagtgggagtcccgacttactataaccaccctgaggcactgaagcgggagaaagcggggggcccacagctggaccgctatgtgcgaccaatgatgccacagaaggtgcagctggaggtagggcggccccaggcacccctgaattctttccacgcagccaagaaacccccaaaccagtcactgcccctgcaacccttccagctggcattcggccaccaggtgaaccggcaggtcttccggcagggcccaccgcccccaaacccggtggctgccttccctcc

SEQ ID NO: 12679 - DNA, 2300 bp, Homo sapien
gtgggcttgatgttccctcggagaggcggagccagacagtcccaccctgcagcttcatgggggtgcccagggtgattttcagtgcagggtttagcttttgggttcctgctctgaattaggttggctgtcagggaatgcgggtttaaaagcaagagaaaggttgtttctgcagcccgcagctctgcacttcttgtccaaatccccccactcccctcttgctgggggtgagggtgacttggatgccctcctagtctctgtgcctctccctccctccagcttcatatatgaaaagacaaaggctgcacacgaggagggtctcttactctcttcaaggcccaggagctgaggaaggaaatggaggaggaaattactccccttctgggtgctgggtgaaagtgaaagatagggagggggccctcagtgagtcacgcaggcgggcaggaggcaggcaggctccaggagcacaggggctggggagctgcggaagcctgcagaggagcgatagcctgggaggggcattcctggtgctgggggtgggccgaactgcaaactgggtatagtcgggaccctgtgcccgcccagccctgccctccgctgctgctggctggtttcctgggagcggctggggttgctaacaatgacctgtagcatctagggcctgagatttcctcttcagagccgcccgagctgttttcccctcttcctagggaccagaatcttactggggaaagaggtgggctatgtagctcccacccccaccaacttcccaggaaaaaaacaaaacccaaacatcactctgagggaaagaaaagtcttgaaaaatacatgcaagcagctatgctataaaatacaggtctagattctgttctgtagcgactgctttaaaaaatcaagttacgaaacaaaaatggaaaaactgtgtacttaagtcatgacattatcgtggagaaaccttctggaactgagttctagcaatctgcaccctctacgatctgagttacactatttgccaggggctcttcggcagtggaaggggcaggggtcaggcaggggcggggtcagctgctgaccagctcttggcctggatcctgcctccaccctgccagggttgcaaaacaggttctgtgctagtttgggaaagactctggcagccacagccccacccagcagctcttcccaggggtggggctaggactgcacacacccttctggggccttacctgcaggccttggtgagcctgaccctgggcccctgactctacaagggtctgttggagctcctgactctggggctgcacaggaggagtggccacgtcgggaatgaccctgtcctctccacttcccgagcctgagatgtgcttggagtgtcagaggaggcactggctggacaaagatccttctgggtctggtgggaggctcctgcatagacagatgtgtgccaggaggactaggcctggctgcccagggggctagggcctgggtaagaggagaggggagccagtgtggcttttgctgcctctttctcagctgggctggaggggcttgggctggatgtcagctccacctgtgccttagaatgtgcctatgcagtgcacaaataacacagacagatgcaggcagtcctggagcggaaccaggagggtgaggtggtgggacaagagagtcacagtgccctgggagatgcagctgattctcctgccctcctggcagctccccaaaagtcctggctcctgcctcaccaatgctgctctgtgacttggggcctgtccctgtgatatgaggtggtgggaccgaaggcccttggagccccttttcttacacttgtgctgatgttcggggcatcctgggaggctgtggctgacactgtcactgctcttccctctgcaggtgccagaaccctgtggagcatcatgaactgggaagagtagctgagccccagagcctctctggaagagaaaggaagagccagcagttctttctcccagtgtccgacctcactgtccagcgtcttcctctgcccctgctctgccctccctggctcctggactagagcccggcttccagcaggacgtttccccaggggatgggcgactgttgaaggggatctcaccgccagggctcagttggccacatcatgaacctccaggcccagcccaaggctcagaacaagcggaagcgttgcctcttcgggggccaggaaccagctcccaaggagcagccccctcccctgcagcccccccagcagtccatcagagtgaaggaggagcagtacctcgggcacgagggtccaggaggggcag

SEQ ID NO: 12680 - DNA, 2300 bp, Homo sapien
ctccttcagggccactgacttctctgtttcccctgccacctgcctccactatgtatgctgcttcctgggccactcctttggagtggctttcacctgttccctgaaggctgggccctggctccatgatggcaggctcttctagcaatgtgcttcccagtcaggttttctggttggttgggaacatccctgggctggtctgcacaagctcttaggggctcactctgggctggcctaaggccaactgcaggggctgggctctcaggggaggtgaggatggccacaggtctgcagaggaacttggcagcagtgggcactggagaccaaatggctttgcttttgcttccctcacttggatgtgttgtcagtgggagggaagaaatcaggcaaatgaaaaaagtaaaaaggctctaccctgatcctttgccaggagccctgagagtctggcctctgcttgggggtctgcaggcctgagcactgcagttcctcaattgctcactgccttcctctgggggaggagcagagaggtcacagatgcttggcttgccctgtgacctggtgcaattcacttaacctctctgaacctcagtacatccacagattgagagagataaaactcacatgcagggctcttcaggagactgtatggagaagtgctctgagagctgccaggaacaatactgtcatcacagatgctaaatcggggagcccgggcttttttttgtagaaggtggtttccctagctcctctattcacttactgtaatcacagaatcatggatcttgaactggaagggatctcaagaggtcctctggtccagtcctgtggcataattacctgtattttgtagataagattgttttaagtgttccttattttgacatatctatcataacatggtgcaaataagcccttctcctcttggggaggtgtgacttccaggtgtacatgtacgcaggtgctccagccagcaaagaggtggaagaggacaggaaagccatgcccccttagaagcaagtgcaggtttggcaggatttctgggcagaagatccaagttttgcctgtgtcctccacaccccaccctggccctgtaggcccagtgagtgtgtgagaatcatattctgctgcccctccctcctcttctccctgagaaagtgagggatgcacctggttctcaggtctggccacagtgttttgaaaagtggctgccaggacacatggtattcttcggtggtttttctttcaaaggaaaatctccttgtgacccatctccttgaaaaacagccaccgccaccaccgccgccgccaccaccaccactgcaccaccaccaaaaaacttggaaggaagaataggacacactcccctgaactttcccctggccctagagccccattgaatgtgggggccagaaccaacctcttgagctgcaaaaatgttttccatcttcccaccagtcaggcaaggaggcatcaaggcctggacctgagaattgatcagggggatatttagggaagacaggggaaaatgtgagtatggagtgaaaagccgctcaactctggcctgagttgctagatttaaatccaggagattttcctcacctaagcgatggagatggtgggtcctttctagggactgaggccagtttctcaataacctttacacgcaccaggacgcttttgagccagaaagtgaaactcggagagtctgttaataaaatgccatggagaggattgtgcatgatttaccgtatccaaaaccagagagagtttctttgtggaagaaagcgacttgtgccttccccagcatcacacacacactttcctggcaggctcaatgggtttccaaacatttcgtcaccgtctcctcctgaccttggtgtgaaaggaactagcagcgtggcccgccagcaaagccatcgggggcgccagcctgggcgggggatggggacggcgaccgactcgtgagtggaggtgaggtctgctggaaatccccagccccggccgccgcctgaggtttaaggacgccttccccggccttatttggtcgcaggaagtgggcggcgccgggcctgctggctgaggccgccccgagacagttgtgctgatgaagtggtagagctggttcctgctcgccgcggtgccgcgcgcgccggccggccgctgggcgctccgcgctcccagcctcgagttgtgcaatcctttgtagcacgccagagtcctcctcctccgctgttgcctctcgccctctctctttttttttttttcaagctgtgagctcaaccgatgagtcagagccgtgcaat

SEQ ID NO: 12681 - DNA, 2300 bp, Homo sapien
tggcaggcctagctccctttctaccaggctgccttaggacgtggcagttggcttcccccacagtgagtgttcccagagagtgaaaggcatagagaggacccagtatggaagccgcattttttttttttataacctagtctcagaagtaagatcacatcactggccatattctatttgtcagaactcagtcaatggattcagcttacacttaaggagggaggattatacaagggtatgaatacctggaggcagagatcattggcagggggcgcatcttagaggctgtctaccacatcctccacttggtgccctggtactccagcaactgccaccttacatagagaaaaaagcaatgtatgtgtaagtgtcaggccttcacacatttacactgtctgctaattactcctgggcatgcagaaatactgaatattcatgaaattgtgactgaaaatttggaattgcatatggaacaaaaaaaatattcagctcttgttttagcaaatatggagtatcacatgattgcctttagaagcctggctaacatattctctcattggttgccttaagcagaatgcactaaggaattacttctatttattccaaaattgaaatgggcaatcccttcaccatctccccacaatagcgtgatgtaagaagaatttcagggaactttaattattgagtctaatgatgcagttatttctcaaagcagtattatttttcttgcattgcacattttgtatttataatgtgccattaatgtcttagtaaaaatcagaactagggcgtagcagctgcaacgtggaggatttcatgttgctaggagagcttcgatcttcatacgcctatctttgggtgagtctgtggctttccatgagagattaacacagacctggggatcatttcccaaatgtcattttccatcagtcttacatccacctttctgaacaaagccttcactcaagtttatggtttcctgtgttttcataaaaagatgaagcattgaaaggggggaggttttatctggccaatgtgctaggagaagcagtatttggggaaaaaaggaaaattgttgagccctaactgatgcttttgaaccacctattaaaaggtccctgttttccacgacaagctacaatgaagctaatgtttctgttatgaaagcccttcactgcagtttcgaatgtctttttttttttttttcaccagcaaaggctaaccccgttttttctccagccttatgagatcaggagttcttccttgaagactgctgtttaacgacttggttgctacttatcttaaaggtggctttccgttgtactttttaataaggtgagcacatttattttgagcaatgataaatttcaggattactattgcctgaagctgcccttctcaggcctccaccctaccctcaaagtcacttttgaccggtgatgaaacacagaatgcatcagactctattttctgtgagttgagtgtaaagaggtggaaatcgcgggggaggattagaacagaaaccattctgcagccccagcttgggcgttgaaatagcccccagaagtgtgatacgtggtaaacgtcttgctcacttataacccgtagaaatgacgagggacatcatgcagacttttagagagaacgtggggacagggacccttgttttaaggcccactttaggcattaagaacacatagagcacactgctttctgacatgacccttttagccccaacaccaaacggaaaaactttttctttcccctcccccaccgctttgtttgtgtactggtgtttaccctggaaccccagctttccggggaccctgaaccccaccaccaccttccagaccagcctgagagcaggggactccagcgcggggccccggatcgcacttcggcgcggaaacgacgcggctggagcgaggcttccctcccagggcggggggtgcaggctaggcggccggcagcgcagggctgcccgctaccccgcagccgagggcgcgcagagtggggagacggcgcctggggccaggggcgcgcggagccgggggcgcgggcggggcggctggctgcagggccctgcgcgccaccgcgcgagccgctgggtcacagcccgggccgcacagcccgggccgcaccgcccgctccgcgaggaagtgacgactgcgccgtcccgagagcaacaaagttagagtctgcgggccgcactcgcctgcgccccgcacccctccgagcagcccggggatccagcacgcaggtaagccgcgggctcggcgccccctcccgccaccgggcgccgg

SEQ ID NO: 12682 - DNA, 2300 bp, Homo sapien
ttccctgtgcatcccctgagtgatcacaaccatctccctcctatcagaattactattatactaactttcatgatgttaattccttcttgttctttataatctaccacctgtatttgaattttatatgtgtggattcccactgtgcacattcttctgtatcatgcttctttccctcaatgttatgtttgtgggattcaaacaactaactcactggttgtcaccgtagctcactcattttcattgctgtattgtatgaatccactacgatgcatctctttcattctttttctactttttttgagacgtagtctctctctgtcacccaggctggagtgcagtggcacgatcttggctcactgcaacctccgcctcccgagttcaagcaattctctgcctcagcctcccaagtagctgggattacaggcacctgccaccatgcccagctcattttttttttttgtatttttagtagagacagggtttcaccctctgggccaggctggtcttgaactcatgacctcgtggtccacccacctcagcctcccaaagtgctgggattggtggcaggcgcctgtagtcccagctactgcgggggctgaggcaggagaatcacttgaacccgggaggcggaggttgcagtgagctgagattgcgccactgcactccagcctggtgacagagcgagactccgtctcaaaaaaaaaaaaaaaaaaaaaatagataggattgtttctgttttgagcctattatgaacaatgctgccaagaacattcttgcacctaaatcctgatacccttgtgcaagagcttttgtaaggtgatggcatcagggggcttccctttaatcagggcttagtgcattcacgcttttcccctgtctcctcttccaaaaccacctctcaggaaaggattagaagttcactcatgttaaggtataaatggctgagaaggattaacatgtagtctctcccatataactgtgaggtggggacaaaggaattaatttctaattgtagaattttagtatcatgccgggcgcggtggctcacgcctataatctcggcactttgggaggccgaagcgggcggatcacaaggtcaggagattgagaccatcctggctaacacagtgaaactccgtctctactaaaaatacaaaaaaattagcttagtgtggtggcgggtgcctgtagtcccagctacttgggaggctgaggcaggagaatggcgtgatcccaggaggcggagcttgcggtgagccgagattggccactgcactccagcctgggcgacagagcaagactccgtcttaaaaaaaaaaaaagaaaaaaaaagaattttagtatcaagagattggtggagagaaatccattaagttagccctaaaaaaagcatcacatggttgtaataccatgaaccaagaaaatgaaaaagaaaaaatccatatagacaacaacaacaaaccagccaaggtgctatactctacttgaaaggtcaaaacccacatacaagaaacgaagtcccgctgggcacagtggctcatgcctgtaatcccagcactttgggaggctgaggtgggtatatcatctgaggtcaggagttcgagaccagcctgaccaacatggtgataccccatctctactaaatatacaaaattagctgggcgggtggtgcgtgcctgtaatcccagctacttgagaggctgaggcaggagaatcgcttgaacctgggaggcagaggttacagtgagccaagatcacaccattgcactccagcctgggcaataagagctaaacttcgtctcaaaaaaaaaaaaaaaaaaaaaagaagaaggagaagaaatgaggtcctgtctccgaggatcagttggtagttaatggctaagctaactggtgatagagtggtcaaaagtaagtcctcaaggccagatacctgcacttgaacctcagctccatcagctagatgagtcacgttctcccagccgcagttcctcttctgagaaatcgacataatgagagtactgacctcatcaggctgttgtgaaaataaaataatgactgaatcacatttcacacagcgctttccgtttagtaagtgctcaaatagtattgggcatccttcttatttgtgttatttgatgctgagtgtgagcactttctctgtgtcagggtaagccaatgatctgagtagggcttgataatgccattggagagtctgacaagatcaaagtgtaaatgggagagaagaggaaaagaaggaaagaaatgagagccacatatctactggcaaaaggaaaagtgca

SEQ ID NO: 12683 - DNA, 2300 bp, Homo sapien
ggatcacctgaggtcaggagtttgagaccagcctggccgacatgatgaaaccccatttctactaaaaatacaaaaattagctgggtgtggtggcatgcacctgtagttccagctactcagtaggctcaattgcttgaacccgggaggcagaggttgcagtaggccgagatcgtgccactgcactccagcctgggcgacagagagagactccgtctcaaaaaaaaaaaaaaaaaaaaagaaaagaaaaaagaaaaaaaagaaaatgattctcaggaattgcttgaacgatgagaaggaggcagtacaaagttctgcaaagagggaggagtagggaattccagatttatggcaaatataacaaagggtcaggtgcttggactcaggcaggataacttgctcctttacttattagttacttaacctgacttagaacttaactagcttaacttcggtttcctcattcgtaaaatggtaataataataatagggctgttttgaaaattaaatcatgtaggcaaaaaatcatataaggcattatccaactcaaactacgcattatgtaaatgatagtaatccttggtgttagagaaaatttagaagaagaggataaactggatagaaatgtacctataaatcctctactcatctcttgaatttttgggaactcattttggcgagaaaaatcacacttgttacaaggagttcacagaccctagaatcaagagagctaaaactaattaatacacatacatatatttaaaatttttgagacaaggtatcagtctgtcacccaggctggagtgcagtggtgtgatcaaggctcgctgcagcctactgagcagctgagagactaccagcaagcaccaccacacctagctaatttcattttattttttattttttgaagaaatgcggtttcaccacgttgcccaggctggtctcgaactcctgactcaagcaatccacctgcctctgcctcccaaaggtctgagattacaggcgtgagccactgcgtccagccccaaaactaatttaatattgcagggcttcttttctattttgaaagtgtttcttttaaatcaagttctagattacctttattttatactactactttttgtctatttgagcattttatttttcatcatttggtttaagtcattacaaaaggcattgaaggtctgtctacctgtccatgacagataaaagagattagctcctgtctgaaaatgtttgcaaagtagtgtaattctcctagtccttcctgaagctttcccaaagaagcaaaaatattcagacataaagctaccaggaactccaacctgtttgatcactattcccttgctcaccaacctagtcatctttcagctactccatgcatgacttgtgctgagctattagctcccacatgaatacaagcaattcttatacctgcctaattcagatgatctttcttagggtttgaagtccctggggatccgaagctgtcctaggtatacacttctctcaacccagtccagcacaaaaggagacgactaacgatgaatgaaattgagaaatcagcccacactggtaatcttggaggaatttggtattcttcgtgaaataaaagaggcgcaaaggggccctggattagggtccggagagaggggttttatcccagcactgcccctaaccagctgaaaggtaggtggtccaatcacatcagctctccgagactcagtttccccatctataaaacaaggagtaggcttgacggtccctgtctcactataatttcccaatcgaggttcagggagaaatccacaaaactaataaaacttcttcacggactgctaaatgtgaactcactggtcaaggctgcaagatttgctctttgggtcaaggcagtaggggcggccacaaggaaccaatctcagttaagttattaatgcactttgcccagactagtaactctcccctgacgttccgcatttcccttgcttctcccggaaacgtggggcgcccaggaatcctaaacttccaatccctaagcttccaaaccccgcccctgggaggggagggggcgcggagccgggcctagtcgcgcgcctgcgtactgcggtcagagggccgaggcctgggggcgagctggggtcgtgcagtacagcctctttccggcaaatcacgcgagatttcgttcacccgggctccacagggtcagtgacgcgcgagcggctcccgcgactgtggctcccgaagctgcttcgggccccagcggtgaggaagaagactctcaaccagggtgacttctaggcgtc

SEQ ID NO: 12684 - DNA, 2300 bp, Homo sapien
gactgggggcaggattgggggtttcggagcttgtgtaacagtttttgggataggagaccagcggttttgggttgggattagtatgggaagataaataacttaggttggttaagttgacaagatttactccagaggatcatctctttgtatttgccaaataatttactgtatagcctaaaaactccatatatattgagaaaagcatatgtttattttaggttagcaggcacatactgtcaagttgtaaagattgagagggcaaacagatgtaaacatcacttgtaggtgattaaaaagattgacagccgggcctgatgtctcaagcctgtaatcctagcactttgggaggcagaggcgggcagatcacttgaggtcaggagttcaagaccagcctggccaacacggtgaaaccccatctctctaaaaatacaaaaattagctgggcgtggtggcacacgcctgtaatcccagctactcaggaggctgaggctggagaatcatttgaacctgggagggggaggttgccgtgagctgagcttgcaccattgcactccagcctgggcgacaagagtgaaattccatctcaaaaaacaaaaacagattgacaacaaagacagtttcagaaaatgacaggactgggcaaattaacaaatgtttgtaaacatgaatgttcaggaactactgatgtacctcaaaagtttgttttattaattgtactcaaccctcgcagaacagtaaaactgaagattattgtttctgaatgttttggcttatgattgtctacacactgccaatatacttttgtatgcaacatttgtaataagtagattcaaactgtgttggtaatcagcctccccagttttcgtgagtggcccttttttgttacttttcctggaccatttcatcgcctgagggggtttcacttttctctgtatgttgctaactcccaaatctccatctgtatttctgacctctttcttgagcactggacctttacctccaagtaaatatcctcaactctggattgcatcttatactctgcttttttcttttcttttcttttttgagatggagtcttgctcagtcgcccggcgtgcagcggcacgatctcggctcactgcaacctccgcctcccgggttcaagcgattctcctgcctcagcctcccgagtagctaggattacaggcgcgtgccaccacgcccggctaatttttgtgtttttagtagagacgggttttcacggcgttacccaggatggtctcgatctcctgacctcgtgatccgcccaccttagcctcccaaagtgctgggattaaaggcgtgagccacggagtccggcctactctgcttttctaaagtggaattatcttcctctgaaatgtttctcctttattttaaatcaccattagtaatttgtgtacccaaacctgtcatcaaggcttatctttaaccttgaaaatgcctttttaaagagaactcctttaattcccacggttgagtctctcattcttccgcacgcaaatattttaaaataagtaatttcaagaagtcagtcaaactcacaaagctttaacaaggtggcatccagcttggaagtcaagtgttcaagcccgcagtcgggacatccaagagctctttacatcctaattacaacacggaacccagactcactgcataccccgtcccgtatataatgcaaaacttgattctgcaagttcctttctcgggcggtgaaacttcgaaggtcctctccatggagacctttgataaatgtttaagcagtgatcttttctttcgcgtttgcctccattgcaacgcctccgctgatgggaaaaactactccctccgctactgcggggtggcagtgacgtcaacgaattagctgacctgttttttcgggcttcgcggacataggagtcccgaaggccgagagtgagtgagtgagtgggagcggggcggctgcggctcctcctgtccggggcggagccctgcgtcgcgggcctggggaggccccgccagcacccttgacgtctgggtcccgagcagtgcggcagccacacgacactgaggcgagcgagtgggtgtgtgcgtggggggtcagccaaacttcctgtcccgcgctcgagctgcttccggcgggagccggaagacgctgtgtgtggacggaattcgggaccgactgacggccggccggcttcccggaactggaaggtgagctccgaggtgggcctggccacccctcctcggttaggtagtacccgagagggcgggggccagtaccggctacttggggcctgggg

SEQ ID NO: 12685 - DNA, 2300 bp, Homo sapien
ctgattgattcagggaaccaggtatcaactctggaatggtgctgtcatgaagtggggacaatttagttaagcgaatgactgagcaattttttttttttgagacaggttcttgctctgtcacccaggttctggagtgcagtggtgcaatcatgcctcactgcagcctgaacctcctgagctcaggtgatgatcctcccacctcagcctcccgagtagctgggactacagcacacaccatcacacctggctagtttttgtattttttgtacagatggggtttcaccatgcttcccaggctggtctccaactcctgagctcaaatgatccgcctgccttggcctcccaaagtgctgggattacaggcgtgagccattgggccccgcccaacggcaatacttattcaaaaggtgagaagaataaagtagggtgggtaagtaattgatcagtaagccttttggaagaaggggtgttagtaattttgcacctatgttatggccctgagagaaacactgtttcctgatgctcttgccgttggcattatctatgcctatgacagtctgagttatactttctcagtcctgggctgatttttatttttcattgtggaggaattttgaattgacacttgattgatgaggagccaggcttactaaaatccagggtaagagtcagagatatgtatgcaccctagccctggctctgctacagtgtgtgatcttgggcacgttttttcttttcttttaaagacaactttattaagacataatttctatacaatatattcactcatttaaagtgtacaattcagtggttttagtatatacacagagttgtgcaactaccatcacaattttagaacaccttcatcgcccttaaaagaaatgccacacgctttagtggtcactccctatttcccctaaccctccacaccccaccccaccagccctaagcaactgccaatctactttttgcctttaatagtttggggtccaccaggtgcactggctcacgcctgtaatcccagcactttgggaggccttggctggtggatcactggaggcacgcgccaccacacctggctaatttttttttttttttgagacggagtctcgctctgtcgccaggctagagtgcagtggtgcaatcttggctcactgcaacctccacctcccgggttcaagtgattctcctgcctcagcctcccgagtagctaggactacaggcgcgcaccaccatgcccagataattttttgtatttttttgtttgtttgtttttgtttttgagagagttttgctcttgttgcccaggctggagtgcaatggcacaatctcggctcactgcaacctccacctcccaggttcaagcaattctcttgcctcagcctcccgagtagctgggattacaggcatgtgccaccacgtccagctaattttgtattttttttagtagagacagggtttctccatgttggtcaggctggtcttgaactcctgacctcaggtcccaaagtgctgcattacaggagtaagccaccgcacccggccaatttttgtatttttagtagagacggggttttgccatggaaaccagcctggtctcgatctcttgacctcatgatccgctttccttggcctcccaaagtgctgggattacaggcgtgagccagcgcgcctggccaattttttttttttttttaaatttttagacggagtttcaccatgttggccaggctggtctcgaactcctgacctcaggtgatccacccgcctcggcctcccaaagtgctaggattacaggcgtgaaccaccacgcccggccaaatttggggagcaattttcttaatctctttgtgcctcagttttctcttctacaaaaatgagacgacaattgtactactggtcatagagtactaagaggataagcgaaaactgagtgacattgcctatcaagagcctcgtataaagtccgagaggttcaggtctgtaagtcagagtccgcctcctggtccctaaacgctcattttaatcccacgcccctccgtgacacgcccctgctgtctgtctccaaggcaacgcccaacagtttcctctccgggattcctttcccgggggcagtctcttttctctcctcacctgacggctcccctccgcgcctccgggggctccctcaggcctccccacggtcatttcagctggacagaggcagcagcgacagtgacagcgatagtggcagcagcggtggcagcgagagctatgcggggccagggtccacccctttctagctttggcgtctggttggc

SEQ ID NO: 12686 - DNA, 2300 bp, Homo sapien
agctcaaatgatccgcctgccttggcctcccaaagtgctgggattacaggcgtgagccattgggccccgcccaacggcaatacttattcaaaaggtgagaagaataaagtagggtgggtaagtaattgatcagtaagccttttggaagaaggggtgttagtaattttgcacctatgttatggccctgagagaaacactgtttcctgatgctcttgccgttggcattatctatgcctatgacagtctgagttatactttctcagtcctgggctgatttttatttttcattgtggaggaattttgaattgacacttgattgatgaggagccaggcttactaaaatccagggtaagagtcagagatatgtatgcaccctagccctggctctgctacagtgtgtgatcttgggcacgttttttcttttcttttaaagacaactttattaagacataatttctatacaatatattcactcatttaaagtgtacaattcagtggttttagtatatacacagagttgtgcaactaccatcacaattttagaacaccttcatcgcccttaaaagaaatgccacacgctttagtggtcactccctatttcccctaaccctccacaccccaccccaccagccctaagcaactgccaatctactttttgcctttaatagtttggggtccaccaggtgcactggctcacgcctgtaatcccagcactttgggaggccttggctggtggatcactggaggcacgcgccaccacacctggctaatttttttttttttttgagacggagtctcgctctgtcgccaggctagagtgcagtggtgcaatcttggctcactgcaacctccacctcccgggttcaagtgattctcctgcctcagcctcccgagtagctaggactacaggcgcgcaccaccatgcccagataattttttgtatttttttgtttgtttgtttttgtttttgagagagttttgctcttgttgcccaggctggagtgcaatggcacaatctcggctcactgcaacctccacctcccaggttcaagcaattctcttgcctcagcctcccgagtagctgggattacaggcatgtgccaccacgtccagctaattttgtattttttttagtagagacagggtttctccatgttggtcaggctggtcttgaactcctgacctcaggtcccaaagtgctgcattacaggagtaagccaccgcacccggccaatttttgtatttttagtagagacggggttttgccatggaaaccagcctggtctcgatctcttgacctcatgatccgctttccttggcctcccaaagtgctgggattacaggcgtgagccagcgcgcctggccaattttttttttttttttaaatttttagacggagtttcaccatgttggccaggctggtctcgaactcctgacctcaggtgatccacccgcctcggcctcccaaagtgctaggattacaggcgtgaaccaccacgcccggccaaatttggggagcaattttcttaatctctttgtgcctcagttttctcttctacaaaaatgagacgacaattgtactactggtcatagagtactaagaggataagcgaaaactgagtgacattgcctatcaagagcctcgtataaagtccgagaggttcaggtctgtaagtcagagtccgcctcctggtccctaaacgctcattttaatcccacgcccctccgtgacacgcccctgctgtctgtctccaaggcaacgcccaacagtttcctctccgggattcctttcccgggggcagtctcttttctctcctcacctgacggctcccctccgcgcctccgggggctccctcaggcctccccacggtcatttcagctggacagaggcagcagcgacagtgacagcgatagtggcagcagcggtggcagcgagagctatgcggggccagggtccacccctttctagctttggcgtctggttggcttccagggcagcctccgatccatcccgcccgaggaggcaaggttcgttttccgattggcctattttctccgcgcattttatttccggttctgaggacgccgcggaagcgggacgggattggagtgctctgctccggacgcactacgtaggtgggcctgcgggagttctgagtgcgacggcgcaggtctgcaccatggcggcccggcttgtcagccgatgcggggctgtgcgtgcagctccccacagcggcccgctggtgtcctggcgcaggtggtccggcgcctcaacagacaccgtgtatgacgtggtggtg

SEQ ID NO: 12687 - DNA, 2300 bp, Homo sapien
gagaatcactggaacctgggaggcagaggttgcagtgagctgggatcctgccactgcactccagcctgggtgacagagcagagactctgtctcaaaaaaaaaaaaaaaaaaaaaaaaagttagctccagccatacagacagtgagcggtccatcttggcagcttttgctgtggaggatggggcacagggacatgctctgtagagcatgctctgtaaagggcactatcttcttttttttttttttttttttttgagatatcgagtttcgctcttgttgcccaggctggagtgcagtggcgcgatctcagctcactgcaacctcccccttccagtttcaagcgattctcctgcctcagcctcccaagcagccatgagaaccaccctgttacagaagtctatgatctgctttaagttaaattttgtgtatcttgtgagatgaggatcatagggtggaacagctgcccttagatcagggtgtccaatcttttggcttccccaggccacagtggaagaattgtcttgggtcacatataaaaaaacactaatattaatgatagctgatgagctaaaaaaaaaaaaaaaatcacaaaaaaaaaatctcataatgggccaagcatggtgattcatgcctgtaatcccagcactttgggaggaaggggcaggtggatcacgagatcaggagttcgagaccagcctggccaatatggtgaaaccccgtctctactaaaaatacaaaaattagccaggcatggtggcacaagcctgtaatcccagaggttgcagtgagctgagatcgtgccattgtactccatcctgggcaacaagagcgaaactccatctcagggaaaaaaaaaaaagtgaaaagactacaaaatggaagaaaatatttgcaagtcatttatcagataagggacttatacagaataaacaaaataatggccaggcagggttgcttatgccggtaatcccagcactttgggaggctgaggcaggtggattgcttgagcccagaagttccagaccagcctgggcaacatagtgagacctcgtctctacaaaaaaatacaaaaatcagccgagtggtggcgcattcctgcagtcccagctatttgggaggcagaggcaggaggatcaattcagccagggaggttgaggctacagtgagccgtgatcgtgccactgcactgcagcctgggcacagcggaagaccctgtctcaaaaaataaaaataactcttaccacagtattcaagagacaaactgctcaattaaaaaccgggcaaagggtctgaataggcatttctctaaagaagatatacaaatgaccaataaacatatgaaaggatattcaacatcattaatcattagggaaatacaagtcaaaacctggagatcccactttacttacacccactagaatgtctataaacaaaaagacaatgacaagtactgtccaggatctggagaaactggaactctcatttataaataaccccgggaaggcctgttttcccatgagtagaacagactctgaacgcccctcccacttttgaccctaatggaccctgaaggaccacacgcattccggcgtgccctggggttcctctaggaggggaggggagaagcgtcgcgagacctgagaaattgtctttgggcaagtcgtgctagggctctcacggctctcatcgtgcctccgcggcccggtttccggccactagtagcctggagaagggcttacccaaggcacaggccatggcagcgcccaccaggcctccacccgacaccaccacgtcatacacggtgtctgttgaggcgccggaccacctgcgccaggacaccagcgggccgctgtggggagctgcacgcacagccccgcatcggctgacaagccgggccgccatggtgcagacctgcgccgtcgcactcagaactcccgcaggcccacctacgtagtgcgtccggagcagagcactccaatcccgtcccgcttccgcggcgtcctcagaaccggaaataaaatgcgcggagaaaataggccaatcggaaaacgaaccttgcctcctcgggcgggatggatcggaggctgccctggaagccaaccagacgccaaagctagaaaggggtggaccctggccccgcatagctctcgctgccaccgctgctgccactatcgctgtcactgtcgctgctgcctctgtccagctgaaatgaccgtggggaggcctgagggagcccccggaggcgcggaggggagccgtcaggtgaggagagaaaagagactgcccccgggaaaggaatccc

SEQ ID NO: 12688 - DNA, 2300 bp, Homo sapien
ttttgtatttttggtagagatggagtttcaccatgctggccaggctggtctcgaactcctggcctcaggtgatccacctgcctcggcctcccaaagtgttgagattacaggcgtgggccaccgccccggctgtaaaccttttttttgagacaagagttttgctcttgttgcctaggctggagtgcaatggcgcaatctcggctcaccacaacctctgcctcccgggttcaagcaattctcctgcctcagcctccccagtaacagactataggtgcgtgccaccatgccaggctaatttttgtatttttggtagagacagagtttcaccatgctagccaggctggtcttgaactcctggcctcaggtgatccacccgccttggtctcccaaagtgttgagatttacaggcatgagccaccgcccccggctgtaaaattttttttttttttttttgagacagagttttgctcttgttgcccaggctggagtgcaatggcacgatctcggctcaccgcaacctccacctcccagttcaagcgattctcctgcctcagcctcccgagtagctgggattacaggcacacaccaccatccctggctaattttgtatttttagtagagacagggtttctccatgttggtcaggctggcgtaaaccttattatacataccatctgccagcatgatcatggctttttcttttctttttttttgagatggagtttcgctcttgtttcccaggctggagtgcaatagcacgatctcggcccaccgcagcctccacctcccaggttcaagcaattctcctgcctcagcctcccgagtagctgggaatccaggcatgcgccaccatgcccggctacttttgtaattttagtagacacggggtttctccattttggtcaggctagtctcgaacttccaacctcaggtgatccgcccgcctcggcctaccaaagtactgggattacaggcgtgagccaccacgcctggccgatcatagctttttctgagtgtatttctggtatactttcacactcccgtgagtccataggcggaatcgccatatattgaagagtttatctctgatgtaaaatctataaagttaccattaattttgtatgtgtaaggttctgaaaaagcacactgttgataagctgcagaaaagagagtagggcatcttctgtcacaggctgtatatttggaatttattctagaaattggtaactttataatatgaaagtcagtccaagactcctcatttgaacataggcttacagattaatgtatgaacataaaaatttgactataacaagattattaatgtatgcgtagtaccttagttatagtactttatagtttcttttattggtttttgggttttttgatggtttttttgagatagggtcttactcttaaccatgctggagtacagtggcaggatcatggctcattacagcttcgacctcctggacttaagtgatcctcccacctcagcctctggcatagctgggactgtaggcatgcaccaccatgcctggctaattttgtattttttgtagagacagggttttgccatgttgcctaggctggtcttgaactcctgagctcaggtgatcctcctgccttggcctcccaaagtgctgggattacaggcatgagtcgccacacttggcctagtttattttattgtattatatatattttttattgactaagtttgattttgtagataaagctgttgtgacatgaatatggctcagggaaatgccaagatttcatactctggtagaggtggatatagagtctacattcttctgaatcccctcattttctaccaaagaactggatgttgttactgtcatctgctggtgagcaacaactgatagtacagatagtagagtaggaagttgctatttagtagtttatctggtagcatttccttccacagttactggtaggtgcctttactatgaagttccaggaattattactaaataaattttccttgtttcattgtttagaacactaatgcttttaaacttggaataagccacttcatgttttgttgacttggttttgtaattctttttctgtccagttttccttgttcctggtcaacaaagaaatgtggagtgtcttggctgaatcctcatacagacaagatcattatggtgctgttaggtaggacttgtatccagatgtaaggtaatatctccactagcttaaatttataaatgtatttcaaatgttcctgaatggtggttttctttttttcctgaatttaattctctgttttt

SEQ ID NO: 12689 - DNA, 2300 bp, Homo sapien
aaaaaaaagaaaagaaaaagccatgatcatgctggcagatggtatgtataataaggtttacgccagcctgaccaacatggagaaaccctgtctctactaaaaatacaaaattagccagggatggtggtgtgtgcctgtaatcccagctactcgggaggctgaggcaggagaatcgcttgaactgggaggtggaggttgcggtgagccgagatcgtgccattgcactccagcctgggcaacaagagcaaaactctgtctcaaaaaaaaaaaaaaaaaattttacagccgggggcggtggctcatgcctgtaaatctcaacactttgggagaccaaggcgggtggatcacctgaggccaggagttcaagaccagcctggctagcatggtgaaactctgtctctaccaaaaatacaaaaattagcctggcatggtggcacgcacctatagtctgttactggggaggctgaggcaggagaattgcttgaacccgggaggcagaggttgtggtgagccgagattgcgccattgcactccagcctaggcaacaagagcaaaactcttgtctcaaaaaaaaggtttacagccggggcggtggcccacgcctgtaatctcaacactttgggaggccgaggcaggtggatcacctgaggccaggagttcgagaccagcctggccagcatggtgaaactccatctctaccaaaaatacaaaaattagccgggtgtggtggcatgcacctgtagtcccacttactggggaggctgaggcaggagaatcgcttgaaccaaggaggtggaggttgcagggagccgagatgccccactgcactccagcctgggtgacagaagactctctctcagaaaaaaaaaaaaaaaagtttacaaggcttatcattaccaaatcggcatgttccctcagaagaaacagaaattcagaaacagaaactatgcaagtgggaaacaaggcggaggggagtaattagaggtcaaagacatcgggaaggagtgtacggattaagtcctccctagagaaatggtgacgaaggatctacaaccacatttaaaataaactttttaatttgaaatggagtataacagagcagagcttcaaccacaagtctcctaactattggcttggcactcagaataccgtaccttccttaatgactcactgactgactctcattgaaaaatgagaatacttgtgagtacactccttttcagaggtgtattcgggatttcaggagtcggggaggcaagttgaagagcttccaactttatgcaactttcaggaaagaaggctgcggaccggtattagcaaatggaaatccggggggcggtcgtgggcaggaagtatcggccacacaggacctagtgaggccgaggaccctgctcccgacctcggtggcagcactcccctccccgcccggctccctggcgtgccgctgctcttcggaggctggcagcctcgccctcaaccaccgccctcgggaaagtcctcgactgcctatcaaaaaacatttggcctgggacgtccgctggctgcactatcccttacagaatcagcaagggtgaaaagccaggaaagagatgcaacccaaaggagtaaggcagtgccgggagcggcagaagcggagcgggggcgagggcaaggtagccgcggccacgctggctgcggcatggagacacgggaggaacgggacccgcgggcggcacgggaaagggctgcggctcagaccactgcggcgggacgggcggatcagcggggatctaagtctcctgaggcaagggcgccccgaccgcagcgactcctgacacacccaggccgcaggacgaagcgctaccgcctggggctgccagctcccgcctcccgcccgcagagcccgggccccacgtagaggatccggcgccgccgacactcgcacactcaccgcgcgcgcgccacccttgcgcggcagcccgccgccctcggcgcgacctccgccccaccccgcgcgccgcggcgcctgggctacgtcacgggcgcgtgcgctctccgcgcgccgtcagcggcgcgggtggggcattgccagctcggcgtcccggttcccttggagacagagctggccagggcggccgcggctgggcaactacgacagcggagcccctggggaagccaagatgccgtcgaagggaaaggacaaaaagaaaggcaagagcaaaggcaaagacacgaagtaaggagaagccacccgagagtcccctctccctgggcctgcctgggatttcgggtctggggctggcaacctggcgccccccgcg

SEQ ID NO: 12690 - DNA, 2300 bp, Homo sapien
agtttaaaaacaacatattataaaaataagttattgtaaaaaaccatataatattaagattgcttcctgatactgaatttgttattgtttctaatgcttttcagtggatggagctaggagatacacgtttttaaaatattaaaatagatcatgactctatactaatactttcagtttacatgcaggaatatagaatttttacttaactttatctgtatctcctttatcccttgccaaaagtccttattcttactgataccaatataattacctagttgcgtaaaccccaatatatcaatctcagaatgctaatattaccaccaaaaataaattgctgaaaacagtttaagattttggggggcatttttctcccttaggatatataccagtaaggatctatgataaaattgcaaggcttaagaaccatttgaaattcttttctatgaggttatgccaccaactcaacaacacattttgcttttgatttttagaggttgctttttattttttcattctactgtatttatttaatttttttagatatgggagttttgctatattgcccaggctggtcttcaacttctgacctcaagcagttctccttgcctcagcctcccgagtagctaagactacaggcatacaccaccacacctgacttagaggttgctttttatttatttatttttattttttaatttaatttttttagaggttgctttttaaaaaattagttttgcctataaaattaagtaaaatatttacatggttctaaagtctgtaaaacaagttgcacgtcgagaaatccaacttttttttttagatggagtctcgctctgtcgcccaggctggagtgcagtggcgcaatctctgctcactgcaagctccatctattgggttcacaccattctcctgcctcagcctctcgagtagctgggactacaggcacctaccatcatgcccggctaattttttgtatttttagtagagacgggatttcactgtgttagccaggatggtctctcgatctcctgacctcatgatccgcccgccttggcctcccaaagtgctgagaaatccaactcctatccatgtcttttccacactgtcttctccctctccctgtagaaaaccattttatttattttgtgttttatcctctctttaaaaaaaaaggttgcttaaaaaattgtttccttatcagaaaagctaaaaaaaagtcataaacatatatatatatatatatagagagagagagattatatataaggagattttatatatataggttatatataaaatctttcttagataaaaggtagcatgcaatatacataaacctgcacctgctttttttatttaacagtatgccttggtgatcactccatagcagtatgtagagacattccctttttcttttcttttcttttttttttttgagacagggtctccctctgttgcccaagctggagtgcagtggcacaatcatggctcactgtaacctcaaactattgggttcaagggatcctcccacccagcctccggagtagctggaactgtaggcgagtaccactacacctggcaaatttttgtattttttgtagagatggggtctccctgtgttacccaggctgatcttgaactcctggccttaagcgatccttccagcttggcctcccaaagtgttggaattataggtgtaggccaccacgcctggcatcattcccttttatagctgtgtgatgattattgtgtggatatatcatagtttattcaaatggtccctgtcttagttcaggctattatgacagaataccatagactgaggtgctcaaacaacaaacatgtatctctcatcattctggaggctagaaggtcagggtgctagcatggttgagttcttggtggaggccattcttctggttcacagatggccgcttcctgctggatccttacttttgacagagagagaaagctctggtttttccatctctttcttcaccaatcccatcatggaggctccaccctcatgatctcatctaaacctaactacctcccaaaggtcacacctccaaataccatcacactggggattagggcttcaacataggattttttgggttcacacatacagctcatagcagtccctttttgatggatagttgggttgtttccagtctttttctattacaatgaatgtgccagtaaagagcttcatgtatgtatcttttcacattttggccattatatcgttgggatagattactgtaagtggtattgctagaccaaagaaaaatatataa

SEQ ID NO: 12691 - DNA, 2300 bp, Homo sapien
gtcccaaattcctaggctcaagtgatcctcccgtctcagcctctcaaagtgctgggattatagatgtgagccactgcattcagccattttcacttttttattgggtgaaaacttaattacaagattcccacataactactgagtacccaccataagctaaataggtggtagtcactattgataatattgggggtgcaggtggtgaagcaatcatttttctattttggcgatatctaaaagttagacctgtgttttgagatcttatatctatttcaggcaattgaacgatgctggaagaaatgtttttaaagagaatgattatcttcagaaagctctggcatatcacctgaaggaaactgacgctctacaaaaaaactcccagaagttgcaagagagtcatactttacttttacatcaaaaggttccctctcatttagacttggtgtccttcttttctttatttaaggattgggttggtaaataccaaaaattgggtataataatgatatataaggacaatgagaccattttcatctgtctggatgatgcactttttttatctgaaaaggttaaatactcaatcttataatgcttataagaagcattagactcaacttataaagaatatatcagaaacataaatatgacccttatcctctactaccttagaatattcatttttctttgcttagagttggtccctgagtcacttaggaatacatttagcggtgagtaacagtcctgacatcagtggcatcaccacacaagggtttattctttcacctaaaggaggcctggaggtaagcaatccacagcaggaatggtagtgccacaaagttaatagacactcagcttccttaactttgctctgcaacacttggcttacatcctcaaactcacctcacagcctggggggcgctgctggagctctaaccattcctttaaatagcaggaaggaagaaaaaaagaaaaaagtgtgcctctcgtttaagaggtctttctggaagtcctacacacatttctatttacatatcattgactagaaaatggttatgctgaacttcaagggagactgggaattttcagctggacttaactgcctttctgaatgaagttggggttttattactatggaggaaagggaaagggaaaatagatattgggataggcaacaaggagatgccatagtttccaatatagttattaatgttttactatatagttatagagagagagagaaagacggagtctcactctcacccaggctagaatgcagtggcatgatcttggctcactgcaacctttacctcctgggttcaagtgattctcctgacccagcctcctgagtagctgggactacaggcatgcaccaccacggccagctaatttttgcattttttagtagagacagggttttgctatgttggccaggctgatctcgaactcctgacctcaggtgatccacccaccttggcctcccaaagctccaggattacaggcatgagccaccatgctcagcccttcattctttttcatggctgcaagaaagtttcttaattagcacaattcataattagtagattgccttcccaagtccagacaaggaccctaggatgtttgttactctctatatagaataccaaaatatcacctcagcttggcataaaacttaaatctcatgaagtaatggaaattagtaaggaacttcctaagttctggaatgattaaaaaaaaaatcagccgggcgcagtggctcacgcctgttatgctggctgaggcaggcagatcacctgaggtcaggaattcgagaccagcctggcaaacatggtgaaaccctgtctctactaaaattgcaaaaattagctgggcgtggtgatgggcacctgtaatcccagctactcaggagcctgaggtaggagaattgcttgaacccaggagatggaggttgcagtgagctgagattgtgccactgccctccagcctgggcgacagagcaagattccatctcaaaagaaaaaaaaaatcacctctcatctttctgtttttaggagatcaatgatctgttggttaaggaaaagattatgcaacttgtccagcagagatcacaaatccaaacccttcagaagaaggtagtaaacttggagactgctctgagttacatgaccaaagagtttgagagtgaagttttaaaactgcagcaacacgcaatgatagagaaccaagcaggtcaggtagaaattgacaagctgcagcaccttcttcagatgaaggacagggaaatgaatcgtgtgaagaagctg

SEQ ID NO: 12692 - DNA, 2300 bp, Homo sapien
ttgtttctgacagtggggaaacaaaggaatttgggtaagagctctcttgcttaagtaataaacatgagcccaacacgatggttcttgtgggcatcttgaatgtgctaattgaaagtaatatgacaagtctgttattctaaaccaggtttcatgtgtgtagagttgttgacggttctgttattttgtcattattgcagggatgaaagtaagcttcaagataaaatcttcatcacccagcaaattgcaatatcagactcttctggtgaagtggtgctacccactattccaaaagaacctcaggagtctgacacagtaaggagtctgtatctaatcaaacaatgtatattgttgtcacccttccccatgtcgcttcttgctaaatcacggttattttctctactagttgagagacttcagggatcagtggaatgagtaataaatagcattagtagattacataaatttttaaagcaatatccgtacaaatgcatattatactaatgcaaatgcaaatgtgtgcctctttttgtgtagaaacctataggttgccttttgaagtaaacagcctagccaaaatgtgtactatcttttacgtaagagtaaacatagtgaccttgtgactcttagctttccatcacaggtgggaagtcagagtcattacaacctagaggacaaaggcttataaggagatatgaaatgatttttttaagccaagtttttctctttaagagtttttaatttataatttgttattcataattagtacaatgtagaatctgagaaatttcaaatgaagccacattagaacaaaaagaaaatactgactttttagccgcgatcacatgaatataactgatgagtttttttcatctaagaaataagaaactctgagcagcaaatagttggccagatgagttgtttctaattagagcatcacagttctgattagtgtgtttttttagaagtgatttcccttaaatataaggaaaatgttaggaatctctgtgactacatttaattccacttggaatatagacaataatgaccttttatttaacccagcctatagttgttggattggattaaatatcactaccagggccaggtgcggtggttcacgcctgtaatcccagcactttgggaggccgaggtgggcggatcattaggtcaggagattgagaccatcctggctaacatggtgaaaccctgtctctactaaaagtacaaaaaattatccgggtgtgggggcatgcacctgtaatcccagctactcgggagactgaggcaggagaattacttgaacccaggaggtggaggttgcagtgagccgagatcgtgccactgcactccaccctgggcaacagagcgagactccatctcaaaacaaaacaaaacaacaacaaaaaaaatcactaccagttgccagctgtgataagagctaaaacaaggggtactgtagtctcaaattataaatttctattgcctcatatttaggaaagcagaaaaaaaaaaaaaaaaggcccagtaggatcataagtgtattttacaaaagttccagtcaccttaagtgattgaaggttttgacattttatccagccaggtggtagtaataagcctcaaatccacagggtacacaacattttcaaggtcttttttttttttatcatacttaattcatgaataacccccatagtgtaggttagttagcactatcaaagtgactggtaaggacgcaggaaaataaaaagaggattcaattggattggtactgcaaaaagaatccattctgttcagcacatgaatttctgttctgaccttaagtttagatatatcaaagaaacaaaaagcatagaggcggctgggggtggtggctcacacctgtaatcccagcactttgggaggccaaggcaggcagatcacctgaggtcgggagttcgagaccagcctgaccaacatggagaaaccctgtctctactaaaaatacaaaattagccaggcatggtggcgtatgcctgaaatcccagctactcaggaggctgaggcaggagaattgcttgaacccgggaggcagaggttgcagtgagccaagatcacgccattgcactctagcctgggcaacaagagtgaaactccatctcaaaaaaaaaaaaaaaaaaaaaagcgtaaaggcagttgaactaatggcagaagaagactgtcaaagcatttttttttaaccactttatgtcatggaaagcttcgaaatttcttaggcccagttaattgctctacatgaagagttcttcattaaacaaatcact

SEQ ID NO: 12693 - DNA, 2300 bp, Homo sapien
ggcccgtaggctactttttatcgaacttttaatcaaagattcacgttacaactcctagttggctgaggattactctatctgttcttttccaggtcacttcagaagtttctccaaatgaatcagaaaatacatagtgtctgtttctgaaataaaagtacatggaaagagagattcttctccttgatggaaaaggacaaaatactttcttaaggttctcaatgactcattgtgatgggaggggaagaggaggcaaaggaaaaaagccaatttcagtaaaagatttcaagaagttggtaagaaaaatatagggtggaaactttgttttcctgctactaaaaaaagatactagaacagaacaaggatcgcagcaagaaatatgagtgaggccagaccatctgccaaacccttcaaactcatcctttctaccttccccattaaatagcatatttaaaaatgaatctttgctgactctgccaagaatcttaaaactgcccaagtttctttactagaactcacggaaacctggtgaatactaatattacctaaaagctcagcaatatagaggaaattctcagactggatgtaatgaataagaacggcactgttgtttcttgcagactgtttcttgcctgcggtaaatcttgccacatactctaaatccttggtaggccatgaacaggggaaagactataaacagagttggagattacaggcctcaggcatgcaactcctgtagctttaccatttctccttaggttggcttcagagaggactcaatcccccaagtgcagagatgagggtgtgtagcactagaagagctgattttggggtgggaacttagacttcttgtcttacctggctcccactttctatcacccgttttaaagatgtttggtaccttgaacatacatggaacatactggtagctttaactgtgtgcccttatctaccctatctatgtagatgtgccctatctatgtaaactgtaacttagctgagaaaaagtttaactcaaagttttggcaagaaaggggacagccagtccatggaaaatacaaagagccacacttagggaaaatagcttagcaaatggctgcctttggtgaaaatctagagtccacctctagaaggaaattcaaagttcatacactgaccctcgcccctcgcgtcccccctcccccttacctcagatcaccacggatagtgaagtagggtgggggaagggagcaatggcaaagtggacgctcacggcaggggacagagtaaccaaaaagagtagtttctgggggagagagagaaggctggtgcagaggtaaaaaggaaagacggtgggcggatggagagatgagggcaagagagtgacagcagggagcgggcagagctggagaaggagagtgggcgagagccagaaaagaggaggcttaggagtaaaagggtagagggccaagggtaacagcccagggttggatccgggaccagggaggttatgaagtgagggctgggcatgggacagggccgcacaggtcgggtaggaggtctggccaaaaaggggttgggccaagaaggtggtcccgcccgaggatggctcagggagcggacggaaaggatccaattcctagcttcatggtgccttggcaccaccctcactcgcctgcaggatccgggctcgcactgccgccgccgccaatagcgccgccatggctctcggccgccctagctccgcaccccgcgcctctactgcccagaagcactacagctgccaggcctcgccctccatcctgccaggcttcctcattggtggggaggactattttctccagccaatcactggtccgaacacctgattcctctcctcacacccccgtcctggggataagtgattggttaggagcgaaaatgctctcgccctctgccacctcagccaatgacgtaggcggaggtagagaagacgcccctgacttggacactccctaccgagcacacggggaagacgcccccctaacctggaactccgattggccaagggcggaaccgaggccccacccccccactgaaaaaagtaaataagacccttcaagaattttgcagtcgctccacctcaacatccgcgtaaggggcgtggctatacttaggggcggggctaggcaaagattgccctatgaggcgagggaatgagactgggctgcgagttggggatagggtttctctttgggggcgtggcttatggaacctcgttttcccgccgacggttggccacgtcacgtgacatgggttggaagatggcgtctcccacagacggt

SEQ ID NO: 12694 - DNA, 2300 bp, Homo sapien
cgcctccaccccctgggctcaagagattctcttgcctcagcccccccaagtagctgggactacaggtttgtggcatcacacccagataatttttgtatttttttgtagagatggggtttcaccatgttgtctaggctggtcttcaattcctgagctcaggcgatctgcctgcctcagcctcccaaagtgctgggattagaagtgtgaaccaccacgcccagccataatttctaatacagtatgtacctgcgctcacaaaatttaagactcggttaaacttaaaacttaagatcaagtaatatattatttctgcatatatctaatcaatctttcaataaatgttaattaaagacctactgttcgtcaggcactgtgctaaacctggatccaactatgaacaagacaaacttggaatttacaatctagcgcaaaaggggcaaagttaacagagtaactatgctgacaaggaagatactgagataatgaataatggtgggaaagggcaactccagatactgtgttctaagaaagactctttgggaggtgacatctaaaaagagaactgaaactgaaaaaaaaaaatgtttatatgtttgagtcatcttttggtctcccaaagcacctagcattatgcctttcatgtagcaggtacttaatatagctcaccttggcttcaatttcttcattcctgcaatgaacttccaagattccttccaaatataaaatgtttttgtctaagggaaggaaacctatatatcaataaaatcgatatatagttgggatgaggatggtagaactaaaaatgagtttaaaaatgactgcaagaccctaactctctaaagcagaaccaagaggaaaagcatgggagtataccaaaacaacttaattgttacttgaaatgacttgcattttacacaatatataaacagaaatcgttaattcactcagccttaagaaacaacacgtaaagcagatggaagacaggttgcgacctgtgcaagacgacacttaaaagctcaatactgattctcctcgcgactctcagggcgaggggccgagaacgtcccccgcttctcttgctgccacggcaatggtcccaaactgaggagacaggagagagatcatgtttctcttgcggttcagtatcgagatgaggtcagccagcagccctgcgagggtttgtgagaatcattccatccgtgcgctcaatcagaagagaactgatcctttcaatgggtaccccaaggaaaaaactacagtaagccacgtcctccagaaacatctcctcctcgaccctcagcctcgcccaaatagagataaggaaggcacagggcgacccccctgtccttttacccagaatgagtccctccctagtgccctcctccacacgcctggtacagagcggggaaactgggcacctccggagctgctgtgaagaaccggtgagctgaagacggcgatggatctcaagaaaaaaaataaaagggaaaggagaagagcccaagaaagaaatgtatgttcgaggggcagagacagagtggatgttcccagtagagcaaagaaggaggctgcaggcaaagatctctaagccggctcttaccgtctgtgggagacgccatcttccaacccatgtcacgtgacgtggccaaccgtcggcgggaaaacgaggttccataagccacgcccccaaagagaaaccctatccccaactcgcagcccagtctcattccctcgcctcatagggcaatctttgcctagccccgcccctaagtatagccacgccccttacgcggatgttgaggtggagcgactgcaaaattcttgaagggtcttatttacttttttcagtgggggggtggggcctcggttccgcccttggccaatcggagttccaggttaggggggcgtcttccccgtgtgctcggtagggagtgtccaagtcaggggcgtcttctctacctccgcctacgtcattggctgaggtggcagagggcgagagcattttcgctcctaaccaatcacttatccccaggacgggggtgtgaggagaggaatcaggtgttcggaccagtgattggctggagaaaatagtcctccccaccaatgaggaagcctggcaggatggagggcgaggcctggcagctgtagtgcttctgggcagtagaggcgcggggtgcggagctagggcggccgagagccatggcggcgctattggcggcggcggcagtgcgagcccggatcctgcaggcgagtgagggtggtgccaaggcaccatgaagctaggaattggatcctttccg

SEQ ID NO: 12695 - DNA, 2300 bp, Homo sapien
gcctctggcaagggtttttctcagggggcctggggttgtcccggtctccaacctcctacagcaggatggcgactatctctctgatattgggaactggcagcttcagacatggggtttggtcaagagatttttcatcctcatctggcaagagccaacttcatcactcacacacttgttttccatcactcacgtttgcccatcagctggcatctggctcatcgtggatgtctcatgataagtcagggacatgacagatgccattaacataacatcctcatccatcctcccagggtgggctggcatggagagtgggctgagagagggatggagtcaaaagaaaacagcttctgacatcagactcatgcgctgactcatctgacctctgatgcttactagctaggtaacctcttaggcaacataagtttgtgtatccattaaatggggacagaaattcttttctggcaggtgagtctactgctttgcacaactccagagggcaccattcacattgttgtctacgtgagtggtgttacttgggacccacctccatagaatataaggtgaagaatgccttgagattgtgtcaccagagatgacaccatgtaaggggcctgggatgatgtaggcacacagtaggcacggccttattatgggatacagaggcaccactctcccagatatctcctgcaccatgagatgcccctacctaattccagctgttatgtggaccaaaccaatgggagtggagaccctcctcacaacagccctgctagcaaggtctaggttccacatcctgaggtgcctcctcttacctctcaggctggccccatggcagccacgagggtaccagacaccttggcaataggccaggtatggctagggggtttccttccatttgggggtttgcacctgactggctaagaaatcctggatggaatcttcccagcctggttttccaatctctgcttaaagcaatggacctagtccttatctccccatagggtgccttcaattcaaggaacctaccatgaactgaccatatgctaggcgcagtgaagaagggagcctcaaggtcgataagatagttcccagccccaagaaggtcacagaagagttagctgaggtggtggagtgcaggggaaagcagcttaccttttaatttcctctcacccgcttcctccttcctctccctccacatcaacaatcccttcctcttcattctgtttgctcaatgaactctgaagtatagcagggcccttgccttgtctgatttactgcggaacccctggctaccaggtcggagctagtagctcaatacatattagtcgaatgaattgggtggaagaatcaagtcctcccatgaaagttgggcatgcttcatgcttactctaggaagaggtttggatgtccatggttgttctccaaaagtaatcatcactgttcctctttcccaccagggacccctctttctgacccatttatcattcattcattgggccaatatgtgttgagtagctcttccgaactaggcattataccttgtgctggggaagcaaactttccctacccctacatcaccctctgcacaccttggcctgatcttttcccagcttaccaccacacacactgccccagcacttacctctcccttgttcaaccgtttacacagaggtgccatattcaggccgccctgatgctgccaacctgcataggagttgagggaaggaggtctcccagtctctcacctctgcccttagcccatccttccacctgacctcagggacctgtccctgccagaatctgcccagagccccaagccactctgcctcccggaacagccctgaacctgaacctggttgtctcacttcggcccctggggtccctgcccatgggcatcctgcagagcccacccggtgctccacccccagcaccctggccattcgacattgcctgcggcgggagctgccagctttttggaattcctaatcgctcctggccccggtgattggctgctcagctctgaccccacttgggctgccgcctggttggataaaaggggaatctccttgggctccagagcattagacaccggagggggcacctgggaccaacttcgcgaagcgggaagcccggcgggggggtggggggagctaaagacctgcggcctcagcccctccaaagaacagggagatgacggggaaagcaggggaagcgctgagcaagcccaaatccgagacagtggccaagagtacctcggggggcgccccggccaggtgcactgggttcggcatccaggagat

SEQ ID NO: 12696 - DNA, 2300 bp, Homo sapien
gaacaaagacagacatgccccaaggaaaggggcagggagaggaatcagcgggaggaggaagcacaggaaggggaggacactgcagattcctgttatctcaggcagaaggtgtgtgtactttgcttccactggccggggaatggtgtaaattaacacaacagatgccggaacagcaacatcgactgtgaacttacatgtgcctggcattccatttccatttactccttacaactctgctgcccagctgggaaagggcaggactccagggtaacccaagccaggtgatgccacagcctgcagcctcaactactgctctgccagcccgctactcacgtgtccaagccccactcgctctcgcccaggatctcgcagtcctgtgacttcagggacatgtccagaagcgtctcccgaagctgcccaattctgaacaagaaaagaaaatctgaggcagggtctgggagccaggtgaaggtgaactccttttcctatctcacacccacgagtacatggtatgtctctgttccttttttcactcagccacttctgccagcagcacacactttgctcaggagccagaggggtgggacacggcctcacctgtgcgtgtagccagccacatctgagagcgtcgtggacaggtcgatgagctgggtgaagcagctgatgaggtagatgcacacaaaggcattctggacaggatgggaagaggtcaagcaggtctcgactcgagcccacagacactgggccaaggacagagagggacagcatgtggggtgaccaagagggagtctcaccttgctgaccagggtgctaagctctgcgggactcaggtctccatagaccccgctgaaaatggggattgcgatgacaacgtaactcaggatgctgcccagatagtcaaaggtgttgatgccgactgtagaaaacacatctgtgagacacccaggaaccatccacatgccctacagcggacacaaccctaagacagggagcaggacgccaagtagggccacgtggactctctggatcctcattctcctgaggatactcacagaaaggcaacagccccccctcctcatccccggttaattccttcatcatggcacatttatccttgcagacaggaggtagagaggtgtgggaagggaagcagaccagtccaaccccatggttcccacttccctgggccccctcgcctactgtacagccagagctccttggacatcagctccctctgggtctgaaggagtctctgcagcctgcggtctgtcctcatgtgctccacatgcccagctctgacaaggaaaggctgggatgtccacagggctggagaggttcagccaggttggggggccgcctgtcccatatcacaccctcctttagaaaccaaggccattcaaatgatcttggtctcaggatctgtctactggtagcgcccattcacggcttcagtcatgccttaatggtattgtctgtgtgaagaacataaactctagagttgggcagacctagttcaaatcctggctctggccagttactagctgcgtgacacaggcaggctacttaagcctccaagcctcagtttttttaatctataaaatggagccaataatacctatgtaataggttagagttagaattaaaagtttctaaatataaagtgccaagcacataaggagccctcaataaataaaaactattgttaaataaacatacacagagcggtcactaggtgtaccaggcattgcactagttagctagtgcaataaagaaatgagaaaattatctctgtctttgaggagctctcagtccagagggcaggcaggcacactgcattcttcacttggaatcaggagtactaagtgtgccctcagggccatggcagcagataggcttagccattaagggagtctgggaaggctctccagaggaggtgatctggggtttcaaggatgggaagaaattcgctaggcagaaaaggtggagggagatttcagattttgcacagaggccacagaagaactcatctgaaactctacaaactaacctgccttccccagagcttcatgagcagaggctgcagaatccaaaagcaacttttttctttttttttttttgagacggagtcttgctctgtcacccaggctggagtgcaatggcaggatcttgccttactgcaacctctgcctcccggattcaagtgattctcctgcctcagcctccccagtagctgggattacaggtgcccgccaccatgctcagctaattttttgtatttttagtagagacagggtttcacc

SEQ ID NO: 12697 - DNA, 2300 bp, Homo sapien
ccaaaagcgctgggattacaggcgtgagccaccgtgcccagcctgctacttcttaaaagtttacagtaatagacaatgctgaggcaccctgggacagtaatgccaccgaataccaaactaggacatttttgagactgaaaggggacaagatctgtaaacctagattaccctagagaggtgacgttgcttgctttaatactttggttgccttattaatttttcaaaaattgcatcctatttttttggttttcaaaataagaaagacatacttgaataaagttatttcctcttcaaagtctttctagattccacttttccccatgctgagttaaatgcctttctctttggttctggggcagtggttctcaatgctagggggtggggtaaagctggaattttggtcctttctcccctaagggacatttggcaatgtttagagacattttgggatgcctaggtcagaaggaatgccaccggcatctagtgcgtagaggcctgggatacagctaaacatcctacattgcataggaaagcctacacagcaaagaatgatcaggccccaaaacttaatggcgccaaagttgagaacccctgctgtatggtatgtttgtcatagcacttcataaagacagctgtaggccgggcacggtgattcacacctgtaatcccagcattttgagaggccaaggtgggtggatcacctgaggtcgggagttcgagaccagcctgaccaacatggagaaaccacgtctctactaaaaatacaaaattagccgggtatagtggtgcatgcctgtaatcccagctactcgggaggctgaggcaggagaatcgcttgaacccgggaggcacaggttgcagtgagccaagatagcaccattgcactccagcctgagccacaagagcgaaactccgtctaaaacaaaaacaaaaacaaaaaaaggccaggagcggtggctcactcttgtaatcccaacactttggaaagccaaggcgggcagatcacctgaggttaggagttcaagaccagcctgaccaatatggagaaaccctgtctctactaaaaatactaaattagctgggcgtggtggcacatgcctgtaatcctagctactcgggaggctgaggcaggaggatggcttcaatccgggaggctgaggttgccgtgagccgatatcgcgccattgcactctagccggggcaacaaaagcaacactccgtatcaaaaaaaaaaaaaaaaaaaaaaaaatctgtaattgtcaactgattgacctacccagctagactgcaactttcataaagacaagtgatacatgcatgttgtagagtgtttggcttgcagttgaaacttaataaggattggaggaaagtgagaagacacatccagattcaaatttagggacctgtgggatcatgctgtttgggttttttttgagccatttcccacctccctttgggtactaatcagtcaactgataagcatttcattcattcaactatctatcttatctatcgatcattatcatctatttatttgtttttgagacagggtctctctttgtcgcccaggctggagtgcagtggcacagtcacggctcactgcagccttgaccttccgggcccaagtgattctcctgcctcagcctccagagtagctcggaccacaggcgctcgccaccatccccggctaatgcttttgtcttttgtaaaggcggggtcttgccatgttgcccaggctggtcttgaattcctgggctcaagcgatcctcccgccttggccttccaaagtgctgggattacaggagtaacccaccgggcccggctggaagcctaatttatacttttttaaagatcatgctggcttctctgggagaatatgtaaaacatctattatacacagaatctaaaatacttgccataaagtagttacactctcggatacctattgtcaaaagggaagtctcccagaaaatatgggggcgctgtagccgccgggtcagccgagtccactctctggtacttttagagacgtcggtcgcttccgggagagtccgcgtctcccgcaccttcctctctatcaaacgccgtctctgtggtagccggggccccgcccctcctcggactctacccagtactgaactaggggcagctgggctccagagtccctcgggtctcaggtcatggcggtcgcggggcccgcgcccggagctggcgccaggtaagcagggcggtcggggaggaggtttgggagcaggagttccgggctgtagggaatgggctttcctgccctccgtgcctcg

SEQ ID NO: 12698 - DNA, 2300 bp, Homo sapien
cttgcttacctactctttttttttctttttttaagacaggatctcactctgtcacccaggctggagtgtagtggtgcaacagtgccatcatagctcactgcagcttctaccttgtggactcaagcaatcctctggccccagccttccgagtagctgggactataggcatgcactaccacgcctggccattttattctgtattatttcaatcttttgtaaagagaatgcttaacttgtgtaattctaagaaaaaagaactggattagaacaaaatatactgagatgttaacaatagctgtctttagataatgggattataggtaatttttcttccctttactttactttaaaaaaatttcccaattattcttaaataacactcttacttttgtaatggaaaagccaacaaacctttttgttttttcactactttctttttaaaaaacactttgaaagattccattagccttttaaaaatttttaaattatcttcattggtttttaaaatgatagcaagtaatgcagacgttttttataaaatgtcaaacagcacagagagaacatagtgtggaaagaaaaggtatttcgtaattccatctcctcctatgagataaccactattctccaaaactttaaaaatacagcatatttatattaagaatttaaacataatttcaaattaactggaaaggctgagaactagaatacactttctttgtaccaagcagagttctaaatgttttaaattttatcatctcgtggaatttatccaatgactctctggggtagatgctataccccattaaccacaaagtcaggctgggaggggttaaacaatttgcccaaggccacattctagtaaggggcaggattggcattcaaacccaagtccaagacacccgctaagccacagcctcaggccactgccattcctggtgggtggggcgggtgtgattaagatgcaggaactggacttgagttcaagtgtggcggctcttcttccagtgcccctgggaaagggtgttttgtgaaggatttttgcttttggtgataactgtggagctgtgattgagagaggagaaaatgataatagtggagctggagcataatggatgcatgggggcattttacagtggttgtcaggggagagacagcacggaggagctgtgggtggaattggaaagaagcagttagctacagcactccaaagggttaaagccaggctggaaagccccttggggggaagctgccaccaaggctgcaatcctgaggccttcacctcccccatcagcaggggctggactggttcctcctgggattatttgaggcccctgggccctaggtgagccatgggggagggaccgaagctgcaggtactgcgtgcccccacctttcagtggggctcagtaagttaggtgccctgggataggccccctggctcctaacagatgcagctctggcccaggcttgctttgggaatgagaggtgttgagccccaagcctgggggatgctcagagaatggtggagatgcagcctttagagaaagtggggccttcctggatgggaagggagactgccccatgatggggccgtgagtagctctccagtctgcctggttctgcctgtcttacaggactggggttggtgagagctgcctcacaaagagatgcattttgagggttcagagagcctcaaggtatttctcttaagcaattatccatagctagtttctgggccccagctttgctctcttccacctcctctgcaagcctggccacagactttcttcccctaggtctttcgatctgaaccttctcctcccattccctcccctccccccaaactctttggaaatctttcaactttctttcaacttttctctgggcagtttggggtttgtttcagagctgggtcagggcactttaacacccccagctggggagagtggatgacaatagctgctatcactttaccattggaagtgacccccgaatttgcacttctttcatcttggtacagagcacttgagggtgggcgatttcctggggggagtggcttaagccgcttccccaccggccagttggctgtagacggtccatgctcaatggtcctctacagatatgaaactggttctggagtgagacgagctcggctggggacgctacttgagaaggcctttccccacagggtgacttaaatgtcccaggctggaaggtggagcgagaagtggatgcccccagggctctgggtcacactccaggtcagtaaaacagcgagtttcctcaaaactaggaagggt

SEQ ID NO: 12699 - DNA, 2300 bp, Homo sapien
ggtgagtgcatgaggttaaaatgcagattccagcatgagcaacacaaggagaccccgactctacaaaaaaaaaaaattgaaaattagcctggcgtggtggcatgtgcctgtggtcccagctaatcaggaggctgaagtgagaggattgcttgagcccaggaggttgaggctgcagtgagctatgattgcaccactgcactcctgcctggtgatagagcaagagcctgactcaaaaaaatataaataaataaataaataaataaataaataaataaataaaatgcaagttcccagagccccatcaccagatatcgagatctaagaggcctggattagggcccaggaatctgtatactaccaaagaaaagggacttgggacacatgtacagccgatgctttgagaaacactagctttgagttgactatttcattgttcaatagcacttgttcttgttttcttaattatataaataatttaaacccagcacactcaaagataacattttggtggatgattgtgtaagtctcttattcacattttcccccagcccactccccagaagaaatcttgctgtacatagttttataatctgattttatttctctaagcaacatattttagtattgctccatgtaatttaatgtattcctgagaggtgattgttaatggttacatggtcttccattgtgagttcttccatcatttattaacatagtctcctggtcactggtcattgaaagtgtttcttttttttttttttttttgagatggagtctcgctctgtcgccccggctggagtgcaaaggtgcgatctcagctcactgcaacccccgcctcccaggttcaggcaattctcctgcctcagcctcccaagtagctgggattataggcacctgccaccatgcccagctaattttcgtattttcagtagagagggagtttcatcatgttggccaggctggcctcgaactcctgacctcaggtgatccacccgcctcggcctcccaaagtgctgtgagtacaggtgtgagccgctgtgactggcccattgagagtgtttctcttctttcacaattgctatcctatgatgaacaaccctggatgtaggtatttaccttctttcctcgtgataaattcctaaaagtggaatcattgtgccattgttaaggcttttggtagaaagtgccaaggccagcctacatccccacctgcggcagaagagactgcttgttgctccatgtcactggccactgggcattgccttttaaaaaacctcttgccagcctgatggggctgggctgatcctgggcctggtcaccaaactccactgttttgcagagcgatgccacttcaacggagagtgaaagtgaagacaacttcctcacgctgcctcccagggaccacctgggacttactctcttctccatgctctgctgcttctggccactgggcattgctgccttctacttctcccagggggtaagagcacctggggcccaggtcccttctctggcccgtcactctactggagggcttggcatcccgtctgcaggatggggtcaggggcctggcaggctgggctgtttggctgggtgtggggacactcctgttcatcagcatgtctctctccctagaccagcaaggccatctccaaaggggacttccgcctggccagcaccacctcccgccgggccctcttcctagccacactcgccatcgccgtgggggccggtctctacgtggctgtggtggtggctctggcagcttacatgtcccagaacggtcatggctagtagccagtagggcctgcatcctgactcccctgcccacctgaggaagcagtggggcttggagttgcagaccctatggaaaggcccggcccctgaagatgatcccgtgagagtggcttgctgagggggagacccccattccacagcctgcagagctcagccttcacttctgcttgcccgctgctcccagccccagagcagggcccggggcgccactctctaacccaggctacagacgggaaacagaaggcagggctgcccaccaggccatcccagcagggcctagctccatccattctgcccattccctagaggatctcctgccctacagccagcccaccacctaccctgccaacctccccacagagaaagagcaggaggttacagggagaaaagggggtgcccagagcacaaggggacccgtcccaatcctttcagcccacagggatcttcacctggggacagcctgagcttcccccaactccactgtctggccccatcatgcccag

SEQ ID NO: 12700 - DNA, 2300 bp, Homo sapien
agagtttgagccaagtcagactgcaggacccatgctcttcaccactttaggtcctgcctccagtgccctggcctcagtgcttgtctgtcttgctcttctgacaggctctgaggactgctcagctggcccaggcccccctccccagcagctgccccagaaccatggagagtctgagtgaactacagaacccgctgctgcccaggagccctgcccatctccatggcccctatccctacccggagaccccacccagctggtcctgccaggaaaagctctactcctacctcctaggtggcgctgggcctgccggagcccaccagctcctggacccagggtccctgcagctggccgtggaggcctggtaccggcccagctgcctcctggggagagacaaggtcaaggagcccagggcaggcagctgtgagacaagcttcacagaggacagggagccccaggaggggcctccagagcagcccacaggacctggccaagctgcagagaatgtcaccatccagactgtgtcctatggggtacaagaggagctgcgggaccaggaggatgaccaggaggaagaggaggtgagtgcatgaggttaaaatgcagattccagcatgagcaacacaaggagaccccgactctacaaaaaaaaaaaattgaaaattagcctggcgtggtggcatgtgcctgtggtcccagctaatcaggaggctgaagtgagaggattgcttgagcccaggaggttgaggctgcagtgagctatgattgcaccactgcactcctgcctggtgatagagcaagagcctgactcaaaaaaatataaataaataaataaataaataaataaataaataaataaaatgcaagttcccagagccccatcaccagatatcgagatctaagaggcctggattagggcccaggaatctgtatactaccaaagaaaagggacttgggacacatgtacagccgatgctttgagaaacactagctttgagttgactatttcattgttcaatagcacttgttcttgttttcttaattatataaataatttaaacccagcacactcaaagataacattttggtggatgattgtgtaagtctcttattcacattttcccccagcccactccccagaagaaatcttgctgtacatagttttataatctgattttatttctctaagcaacatattttagtattgctccatgtaatttaatgtattcctgagaggtgattgttaatggttacatggtcttccattgtgagttcttccatcatttattaacatagtctcctggtcactggtcattgaaagtgtttcttttttttttttttttttgagatggagtctcgctctgtcgccccggctggagtgcaaaggtgcgatctcagctcactgcaacccccgcctcccaggttcaggcaattctcctgcctcagcctcccaagtagctgggattataggcacctgccaccatgcccagctaattttcgtattttcagtagagagggagtttcatcatgttggccaggctggcctcgaactcctgacctcaggtgatccacccgcctcggcctcccaaagtgctgtgagtacaggtgtgagccgctgtgactggcccattgagagtgtttctcttctttcacaattgctatcctatgatgaacaaccctggatgtaggtatttaccttctttcctcgtgataaattcctaaaagtggaatcattgtgccattgttaaggcttttggtagaaagtgccaaggccagcctacatccccacctgcggcagaagagactgcttgttgctccatgtcactggccactgggcattgccttttaaaaaacctcttgccagcctgatggggctgggctgatcctgggcctggtcaccaaactccactgttttgcagagcgatgccacttcaacggagagtgaaagtgaagacaacttcctcacgctgcctcccagggaccacctgggacttactctcttctccatgctctgctgcttctggccactgggcattgctgccttctacttctcccagggggtaagagcacctggggcccaggtcccttctctggcccgtcactctactggagggcttggcatcccgtctgcaggatggggtcaggggcctggcaggctgggctgtttggctgggtgtggggacactcctgttcatcagcatgtctctctccctagaccagcaaggccatctccaaaggggacttccgcctggccagcaccacctcccgccgggccctcttcctagccacactcgccatcgccg

SEQ ID NO: 12701 - DNA, 2300 bp, Homo sapien
cactggatataaagcagcaaacttatgaaaccgcctttgcaaaaatcctgaggaaattaagacagtgaaagagatcaggactcacctacccatcttccttctaacctctaaactgtctttgttcattcctgggtgtaggctgaactagtcttggagaggaatttatagtttaaactctgaaacgaaatggataatagccctttcctgaaaaaccccttcttgcctggggaccggtctgcctttgtaggactaacaaattagctacgagtttaggggccacgccgcctctggctgtaagagtctgaacctccccaaattgctcctggtaatgatatcactattgtaaaacctaaggtcagtgcttgagatattttgcagatcctgcattccgatgcagcaaatgacaccacccagaggtcagcaagaagaactcacttcgactctcctatgattttatcttcaacctgaccaatcagcactccccactttccaagcccatacccgccaaattatccttaaaaactctgatccccgaatgctcggggagactgatctgagtaacaataaaactccggcctcccccacagccggctctgcgtgaattactcttttcgccactgcaaatcccatcttgataaatccgctctgtctaggcaatgcgcaaggtgaaccccttgggcggttacacttactctggctccccattctgctgcgtgactttaggtaggctacccaacatccctggaattcaatgattgattatacgatctccgtgcttcctttccactcatagatcttacaaagtcagtttcatgcctctttcattgacagttctatctctctatctccacctctgaacaacattgctcgagtttctgttccgacaattctatagactcgactcaatgaaggcactcagaatttctaccacctgttgtattttccaacaaagattccaaccacagcggcgagagggagttatgtatcacaagctgtgattagagacacaatgagatttatacaaggaaaaactgattaagaatcacaagattccaaagcccaaaggaagtcctatttgtaacaataaatgatgaaaaaggggaattgacttttgacttgtcagcaaaaacgaaattaaaagaaaagcaaaaggagttggaagggggaggcgggattccaagatacaaagcataaataaaaagaagttctgtgctccacccctccaccagagctggatacagcccttctgttgtccgccctacaaactttaggaaacttcagcaaaaggcccacctcctggagttcccaggaaccccaaaacacgcgttctaaggaaagaaacaaagttgtgcgcggtcgggtttcatggaggccggcgccttctcccccgacccagcccattccagttaggtagggtccaaggctcagcctggccgcccgagggatccgcccagcccagccccaggggtctcagcgcgggggtccggcggggccttccacagagggcgcgggaaccttgggcgggcctggggctcaccgcagtccttgaactgcaccggttcggcctgggcagcggtgctgagcgccaggagcaggaatgtagctgccaggaaacgcatcgcggataacgaagttccaagctcgggaaagaagcagcggccgcccgcggtcacaagacaaacctgtcggggcgggcccggggaggagcccagtcaggcgacctgtcaccagtaaccacagctgaggcccgcccgcgccccgcccccggctccggaaagccagctccagccctctcaggcccagaagcctgcagtctccgcccatgccatcccctcagaggcctgacccgcccggacccacctccgccccgccccgcctcactcctccccgccccgttccttccctttagagcacctctccggcttcctgggtgcgtccccgccgctgccgtctggagcattcctagccaatcagacaccttctcctcccgcactacccaataggcatgttgggggggcggggcctccgtgaagtcccggcctcctgttcgttctctccgcctcccgaggccccgggtgagaaacgggggagacgcgaggggcggagcttgtggaggaagatggctgccgcctgggggtcgtccctaacggccgcgacgcagagagcggtcactccctggccgaggggcaggtaccaagactagaaaggcacctggaaagggtgtttggttctgcgcctctaggacaaatgggaaactaaggcctgtgggggatgcgagggtttggtgggaggccgtccag

SEQ ID NO: 12702 - DNA, 2300 bp, Homo sapien
acattctggcagggtgaagtgaaaaagagaacatttcatttacttttctcatcctctaataactggtgtccaagctacccaatctgtgaccctgatccacaacacaataagaaccttctttaaaatgaagcttttatacatagctatccacatatgtacaagcagctcttaaggcaagagaagttaattccaaattttagagccatggaggctctacagattatacggagtttcaaccagtgattaaatctgaggtaacagcatctggaggctcagccttagcactgagtggagggaaaaattaagccaagagtaaaatcttcacattctgaaaataatagtggcaaaacataacactcctggactgcgggaaataaaattgagagggacatgattagaagtaaacttctagaattctactaattccaggttcttcaaattggtacaactggtgacaatcccagagtcaccagtcatcacatcaaagtttgatagagaaagatgacccacaggagcagccttgctgtgcttgaggattgttcaacacttgaaatgagcttcggatcagttcttggctgaagtccacctgggcccctttcacgaaggccaagctatcagagtcaaccaccactcttgccccaccctgttcaaataccctgaaaagacaggaggaaggcattaaggagtatcgcaaacacaaaaaagacaccccctgagcccagaggtgcacatcctctgttttctaaagtacagagggagcttccccattacctttaacaggtgctgattttctttgaggcaaaatgattcaatggaataaatactgggaaacgtgtagggacttaagcctggaatctagtccggcctgactttctaccgactacccaatggacctgggcagatcaattttgctcctataacttagttactttgattcagaacaacaaacctttactgcatcctcactgtgagacgggcggtgttaaccatcccaggtaaaccctttaaatttggaataaaagtgcaccttaaactggagacacttttgtccctcctgtacctcctttgggggcccaccccttcctccttgcctgtcgtcggggttgataactgtatccagtgaaaatttgtattggaatccggagcatccacctccctccacttgcagcctgaggaattctgacccttcggtgatttccaaaagcctctgaaatgcaggaagggggatcaagaatagcgggaaacgggagttaaagggctgagtgaagagcagttcccgctgctcccgccaatcgcctgggtaccgccgctccgcgtccggcctcctacctggacgcaactgtctgtgaggcggatctgcccttcgccggcctcggggctggaggacgacgcctcccgacgcgcctggggtcccagggaggccgtgaggagcctgcgcgcaagggaggagggtgagcccgggagcagaaggggcaccttgcaaccctcgacctggagcgcctcacgctaaacctggcgacccccacctggacggcctcccaccaaaccctcgcatcccccacaggccttagtttcccatttgtcctagaggcgcagaaccaaacaccctttccaggtgcctttctagtcttggtacctgcccctcggccagggagtgaccgctctctgcgtcgcggccgttagggacgacccccaggcggcagccatcttcctccacaagctccgcccctcgcgtctcccccgtttctcacccggggcctcgggaggcggagagaacgaacaggaggccgggacttcacggaggccccgcccccccaacatgcctattgggtagtgcgggaggagaaggtgtctgattggctaggaatgctccagacggcagcggcggggacgcacccaggaagccggagaggtgctctaaagggaaggaacggggcggggaggagtgaggcggggcggggcggaggtgggtccgggcgggtcaggcctctgaggggatggcatgggcggagactgcaggcttctgggcctgagagggctggagctggctttccggagccgggggcggggcgcgggcgggcctcagctgtggttactggtgacaggtcgcctgactgggctcctccccgggcccgccccgacaggtttgtcttgtgaccgcgggcggccgctgcttctttcccgagcttggaacttcgttatccgcgatgcgtttcctggcagctacattcctgctcctggcgctcagcaccgctgcccaggccgaaccggtgcagttcaaggactgcggtgagccccag

SEQ ID NO: 12703 - DNA, 2300 bp, Homo sapien
ggagccacagcagaaaagggaggtcaggaaaacagaccacaccccactctcaccactgcaggatctctagcaaagggacaggggagaggaggactattaaatgggatgtgatattgattaacttggatgagattttgatctggacaggagcagactttttgtgtctgaaaatgggtcttaattatattaatagaatagttctcgtgtctggtagggatgacctctcaagccaaggactctgcctgagatgtcattaagggtgggaaagggaaatttaccataatatggttgaaggtagtagtggagcagtttctggatagtccctctttaggttcagcccattaaaaaattcagttacacgagcaaacaaatcaataacaagatgatgtcaactgttttatgaagatgaaacagggtggtgtgttagagtcatgactggggtgagggagggctgctctagattggaggtcagggatggctactccaggagctgatatttaatctgagaggagcagtgatgaggaactaccctctaacatcctggagaggaaccttccagtagagggaagggggcattcacttggcttgttcaaggagcagagagagggccaaggcagcacagtgtggtgggtaagggagagcaagaggccagatgaaatcagagcgggggcagccagctagggtttgtaggccaaggccaggggtcgaggctttatttcaacagtagatattacctgggcttgtcttttgtgtggtgtgggaggttgtgaactggtgcccacatgccagctccttcactctgcctctctgggaaataggctgtacaaatgtgccaggggcagccctgttgatccaagcctttaggctgtagggagggagcatgggtgagaatggtgtgctgattactggggacacgcagacagcggcagtcagcattcccacacccctgcccgcctccctgctaacacaagatgtgaatgcacacactgggtcaatcggggtcaccgaatccccctctgggaaattcccgagagagtgaagggctgggtgggatcccgggaatggattcagccagaggcgggaggcctagattccactcccctctttcacatgcgctatctccttgagtgacttactcaagaggctccgtgtctttgcctcggtgaaaaagaggaccccttggccgggcgtggtggctcacgcctttaatcccagcactttgggaggccgaggcgggcggatcacctgaggttgggagttcgagaccagcctgaccaacatggagaaaccccgtctgtactaaaaaataaaataatatacaaaattagtcagacttggtggcgcatgcctgtaatcccagctactagggaggctgaggcaggggaatcgcttgaacccgggaggcggaggttgcggggagctgagatcgcaccattgcactccagcctgggcaacaagagcgaaactccgtctcaaaaaaaagaaagaaagaaagaaagaaaagaaaaagaaaaagaaaaagaggacccctcttctaccggcagccatcaccgcgccaggctcaggcgtgaccctcacgccagtggaaggggattgagatccagagcgaaggcggcggcgccagggcattgcagccacggagcgccagggccgccagctccgccagggggcgcgcccgggacctccctgcgctccgcgcgccgcgccccgccccgcgccacccccgctccggccggccctgcggagggcgcccccagcggccagggcgcaagcggagggggcggcggccctgttcccctacgcgggcctcggcgcccctcccggcttccttcagacctgcaaggctgcagcctgggtcccccgatccaaagacggtccctgaggcgaggggcgggagaacgattcggggcaggtctgcagttcgaacttgcccagagcaggagaaaggcggcccagtgtcccggtcgtggcaggcgccatctgcccgaccagcgcctgggtcagccccgcgccgccccctgctccgcacgggttaatccccctcgccgcccgctcgccgcccgctggcttcccggtgccaaagtgggtgttgctggaattcctcgctccctctccggtaatgagggggctgagctgtccctccgaggagggggcctggtgtggataaaagagacgaaaaagccgggggaggtttccaaaaataaaaccgtccgggtccccttcagacggctgcaggcacagggaggaggcgcgaaggtgcagcagccgtgcgagcccagctggagtaggagcgcggactc

SEQ ID NO: 12704 - DNA, 2300 bp, Homo sapien
acatggagaaaccccgtctctactaaaaatataaaatcagccaggcgtgttggcgcacgcctgtaatcccagctactcaggaggctgaggcaggagaatcgcttaaacctgggaggtggaggttgcagtgagccgagattgcgccattgcactccagcctgggtaacaagagcgaaactaactccgtctcaaaaaaaaaaaaaaaaaattggggcttggcacagtggctcacgtctgtaatcccagaactttgggaggccgaggtgggcagatcacctgaggtcaggagtttgagaccagccttgccaacatggtgaaacccatctctattaaaaatacaaaaattagcaaggtatggtggcacacacatgcctgcagtcccagctactcgggaggctgaggcaggagaattgcttgaacctgggagggggaggttgctgtgagccgagattgcgccactgcactccaacctgggcagcagagggaggctctgtctcaaaaataaaataaaataaaataaaataaaattggcataaaattccaaccctgccacacatcctcaagttggaagacacacaatggtaacaacagaaaacactctgagtagtctggtttacactcttctagggacctcgcatgttaactatgaataaacataagtcctgataacatcccaataaaagagtgctactatgattatctccattttacagataaagaaactgagatgcagatagattaactcacccaatgtcatggcgagttataaggcagagcaaggattttaaccccatcagtcagactccaaagttcgtgttaaacaataaacgtgttttcatcataagggttatacaatggtcaccttcttttttaaacctgataacatattttacttccaactctaggatagcatcatgcaataagaaaagtatgacagaggtacccattccgttcccagcttgatcagtagctggagaatggaagacaaagtgcaaaaaaaaaaaaaaaaaaaaaaaaaaaaagaaaaaaaaagaaagaaagaaagaaagaaaaagaaaaaaagaaatacaagtacagactttggaatcacgagactcaaacagacccctgaacaaagtctggggctcaatttccccatatgtaaaataaaagaatttatgttattgagaaggtcaaagaaggtaatatgaataaagtgacaagtacagtatacaggatgggggttttcatttaaagtttacagacacccagagggtccacggatgggcttcagagtccaccaatctcattaagtgtattacaaactgtatgtgtgcccattttttaaagaattgttcctggctttccacaaactttcaagaaataagttatctccaaaaagttaagaaccactggaatacatagcaggtactcaaagaaaaaagctacctttcgctccttgttctcacaaattctccctttttacttaaagatgacacaccaaggcttcacaataaatgtgcattgtatctcaccattttcttggcttgggtaagtagtaacatatgcaagcttatgccccaattctctagcgatagtctaggccctcaaacactgcttcatttctctcttcaccgagaggagtacacggtatatactcgagaacaatcatccacctagctgcacaaagcaccatatcggctaggaaaaccaaataggaaccacagcctcagggctggaccatagacaccggataccccaacgctacagggtgaggagaatgtgttcccccaaactactgggcaaaccaggagtctgaacccccctacccttttcctccctctctctctggaactctggtaaaggcaggtcttctgggctctgcctaaggctggagagaaacgttacccgagccgggggttgcagcgcgacgaagttccacctccgctgtcctgggaaggggcggcagcactcagcagaagacgggctccccactctcccaccaacagaccccagagttggtctccacccggcctgggaaccggctcgggggattgccctttccccaaggagtttccgcttccgggctatcctttgccggaagcagtatgtgaatgacgtagaagtattgcgccgttggtgattacggaagaaccaggagtttggcgtgaccatggtgagagaagacggtccaagaagggacgttatcaggccactttttgggtggagaaggaggtagtcagaccgtggccaaatttccttcacattatcctagcatattttcattctggtcttagctcttaaacttctccaagcggtga

SEQ ID NO: 12705 - DNA, 2300 bp, Homo sapien
tgtctcttaaaagatccctggcaaagaaaaagttaataatcctagataatatctccaggattttaggggaaattttactgctccataaaatcccaaaaccttcaaaccactagaattgatatatgctcatcgatatgactttcatctacatagttgtgctagacttactaacaaataagttagcaaaccagctcagggaaagcctggatttctaagaggtctatggttttaaaggaaaacttcaaacgtttgattactcacacttctctttcctttaatgcgctgggatccttcttttctttctttttaggttttaatctatccttttctttactaggaagaaaaaggtaaattaaatccaagggagaagaaaaaccacagcaattaaaatctcaaaaatctaaagttccatttttttttttttttggtctactgaagaaatcctactttgtgatatcctcatgttaatatcagcatactctttctgagcaaataactctagtgcaaagcacagtacctggaagtatcagaattaaccagtaatgccaataatgcataagaattgttaatgagtaaataaaagctgattatactatatttattttttagtcagaatctctcacatcaaggatcacaatccacttccaagcaatgggtaaaagggtgacagttatcttctgaagattcagatgctttaacttttgggggaaaagtattaccccatatgcttcttataaagggctaaaatgtaaaaacgcatatacagaacttaacccttaactagaaagaaattattattaatggagtgtcattcctaaaaattacacaatacatccacactaaaggctgagaataataattctgaaggttttaacgactattctcttattctgagactcttttttgtatttttagtggagacagggtttcaccgtgttggccaggctggttttgaactcctcacctcaggtgatccacccgcctcagcctcccaaagtgctgggattacaggcgtgagccactgcgcccggctttctgagactcttaaactcagtgaagatcagtctttatttaatagctatgcttattctacacttaagcagggacaccgctttgatcctcttcatactagggaatttcacttcactttcttcttccacagtgatttggattcttatattagtaagacttataaaatggagatatcttggagttttcccattttctctgacaaaaatatttgagtaccaggcactggaaacgccagacaaacaaggtctctaaccttgccatctttcaacaagaaacactcccctcgccccaccccaggggaatgtagtagtgtaatggtaaaaacataaagagaactatacggacttcaccgaactgacatgaggtttaaatgcgatatggcagacaaagcatataacggtagaaaaagtgaacacttaagaaatgtttaattcccatcgcctttcccagtgtgatcgctcagcagctaaattactgttaaacactggctatctcatgctatataaatctaagacacgataataagcaaaaaacaaaataataacaacaaacatttttactacttatcctctctagactcttattagaatatccctgggcagttgattccagacactcacagcctctgatctctgagactaagcattcgcttcatggtcgcatacttccttgttttcttttgcttccccttgaaacagaaattttagaattaaaaaagttggaaacacacggcatcttttaaagtctcttcttttctcttgtctattgccttcccttcttgcctcaaataacccagaccctcttccccactctgtaaagcataacagtcaccgcttggagaagtttaagagctaagaccagaatgaaaatatgctaggataatgtgaaggaaatttggccacggtctgactacctccttctccacccaaaaagtggcctgataacgtcccttcttggaccgtcttctctcaccatggtcacgccaaactcctggttcttccgtaatcaccaacggcgcaatacttctacgtcattcacatactgcttccggcaaaggatagcccggaagcggaaactccttggggaaagggcaatcccccgagccggttcccaggccgggtggagaccaactctggggtctgttggtgggagagtggggagcccgtcttctgctgagtgctgccgccccttcccaggacagcggaggtggaacttcgtcgcgctgcaacccccggctcgggtaacgtttctctccagccttaggcaga

SEQ ID NO: 12706 - DNA, 2300 bp, Homo sapien
ggagatggggtttcatcatgtcggtcaggctgctcttgaactcctgacctcaagtgatccgcctgccttggcctcccaaggctggggttacaggtgtgagccaccatgcccggcctaaatttatacatttttcaaaagaaaatgtcagcccaaaatattaaaaacacaactaactagggtttctgggttgggttcctgatctgggtgccgatttcacaagtgtgattggcttgtgaaaatttactatgctgtctacttaagacatgtgttaaataaaatttatagcaagttgggcattaggcccaacagaacaaaccaaaatggagtttattgatgttgccatgccaaaattaaaatctttatctgaccattcaataaaccaggagagagagaaataatagccaagtctgcaaacagtccatttttagccagcatgataaagaagtcctctctgctttaaccttataagaaaagaaactttgaaacaaacaatccacttttagttttctgtttctctcttttttttcttttttgagatggagtctcgctctgtcacccaggctggagtgcagtggcacgatctcagctcactccaacctctgcctcctgggttcaagtgattctcctgcctcagcctcctgagtagctgagattacaggtgagcaccaccacgcctggatactttttgtatttttagtaggcatggggtttcaccatgttgaccaggctggtcttgatctcctgacctggtgatctgcctgcctcagcctcccaaaagtgttgggattacaggagtgagcccccgcgccctgcctctgcgtttcttttctgtctatgaaattatcccgattgttctgctcattggaacactgtttctgctttatagaatgagacgttgcccaattctagaatagcaggtaaaagttaattaagatctttaaactaaatttgttgtaattttgtcttttgacatgtaattttctgtatattcgttatacttcaataaaaagttaaaagaaacataactaaatttctatttgaaaacagaagctcttccttttgaaggatgccttgctgctccactttccattcacattcacctcctgagagaggtgaagatctgggttgctaagatggaagaaaggtcaattatttgcatgttactcaagtgatgcactgacacaatattctcacagttctccctccccccgcccccccccacacacccaaaagaattcagtgtattagctttgctttttagtgattcactcaagctaaagtaagagtttatgtctggtattacgttgagagcttttggaagattatcttccaggttgtctttagaccatctttgtatctggtttttgctctctttgcttttgctctgagattctgcaacaccgatttatatgtgttgagacagtctaaaaaattccatttctccccttctacaattcctgcagatgttactcactatatgtctgcaggaattggtgtaatcttacactctgccttgaaaacacctttccattcttcacagctttgttcccagttgaatttctggggagaattgagttaggtctattcatttaatttgggagaaactgacatctttacaatttttcctcttttcacccaggatcatggtaagcctctccattatttgaagtctaatttcatcctacttggatatgcttctttatgactctgtagctttctacatataagtcctacatctttcttgttagagtttttcctagttgctttatgtttttttgttgttgttgcgattgttgctattgtgaatggaaccttttttttttttcattcaaaaatgaacccgtggagcgataggatctctaccacctctttcggctgtgagactctatggtttttcagttctatgagaacattctactggagcctacattatctgaacccaaaggaagatggcaaccacgagtcgccaagtaaaggaccgctctatctcgcctttgttctcctctcggtggttactgcgcagacgtagtcgcccaagtcgcgtccccgccttcccggtcgcgggcccagctcgggagcgccggcgcactggcgcgctccgtttacacgctccggggcctgtaggcgccgcgagttccggctgtcgccgtcgccgccgcggctcctggaggtcggttgcgacgagtaacggcgccaggacgagccctgcgccttctttttcgatatgtacccgaattggggccggtatggcgggagcagccactatccgccgccaccggtcccaccgccgccgccagtgg

SEQ ID NO: 12707 - DNA, 2300 bp, Homo sapien
tgagtagctgagattacaggtgagcaccaccacgcctggatactttttgtatttttagtaggcatggggtttcaccatgttgaccaggctggtcttgatctcctgacctggtgatctgcctgcctcagcctcccaaaagtgttgggattacaggagtgagcccccgcgccctgcctctgcgtttcttttctgtctatgaaattatcccgattgttctgctcattggaacactgtttctgctttatagaatgagacgttgcccaattctagaatagcaggtaaaagttaattaagatctttaaactaaatttgttgtaattttgtcttttgacatgtaattttctgtatattcgttatacttcaataaaaagttaaaagaaacataactaaatttctatttgaaaacagaagctcttccttttgaaggatgccttgctgctccactttccattcacattcacctcctgagagaggtgaagatctgggttgctaagatggaagaaaggtcaattatttgcatgttactcaagtgatgcactgacacaatattctcacagttctccctccccccgcccccccccacacacccaaaagaattcagtgtattagctttgctttttagtgattcactcaagctaaagtaagagtttatgtctggtattacgttgagagcttttggaagattatcttccaggttgtctttagaccatctttgtatctggtttttgctctctttgcttttgctctgagattctgcaacaccgatttatatgtgttgagacagtctaaaaaattccatttctccccttctacaattcctgcagatgttactcactatatgtctgcaggaattggtgtaatcttacactctgccttgaaaacacctttccattcttcacagctttgttcccagttgaatttctggggagaattgagttaggtctattcatttaatttgggagaaactgacatctttacaatttttcctcttttcacccaggatcatggtaagcctctccattatttgaagtctaatttcatcctacttggatatgcttctttatgactctgtagctttctacatataagtcctacatctttcttgttagagtttttcctagttgctttatgtttttttgttgttgttgcgattgttgctattgtgaatggaaccttttttttttttcattcaaaaatgaacccgtggagcgataggatctctaccacctctttcggctgtgagactctatggtttttcagttctatgagaacattctactggagcctacattatctgaacccaaaggaagatggcaaccacgagtcgccaagtaaaggaccgctctatctcgcctttgttctcctctcggtggttactgcgcagacgtagtcgcccaagtcgcgtccccgccttcccggtcgcgggcccagctcgggagcgccggcgcactggcgcgctccgtttacacgctccggggcctgtaggcgccgcgagttccggctgtcgccgtcgccgccgcggctcctggaggtcggttgcgacgagtaacggcgccaggacgagccctgcgccttctttttcgatatgtacccgaattggggccggtatggcgggagcagccactatccgccgccaccggtcccaccgccgccgccagtggcgcttcctgaggcctcgccggggcccgggtactcgagctcgacgactcccgcggccccctcctcctcgggcttcatgagcttccgcgaacagcacttggcgcagctccagcagctgcagcagatgcaccagaagcaaatgcagtgcgtgcttcagccccaccaccttcctccgccccctctgccgcccccgccagtgatgccggggggcggctacggagactggcagccgccaccgccaccgatgcccccgccacccgggccggccctcagctatcagaagcagcagcagtacaaacaccagatgctccaccaccaacgagacgggcctcctggtttggttccaatggagctggaatccccccctgaatctccccctgtgccgcctgggtcctatatgcccccatctcagtcttacatgcccccacctcagccgccaccctcttactaccccccgacctcatctcagccctacctgcctcctgctcagccgtccccttcgcagtccccaccttcccaatcctacctggcgcccaccccttcttactcatcctcctcctcttcctcgcaatcctatttgagccattcccagtcctacttgccctcttctcaggcatctccttcccgcccctcccagggcc

SEQ ID NO: 12708 - DNA, 2300 bp, Homo sapien
tcctcagtctagctttgcctttttttacatatagacacatgaacacagacataaagataggtccttgtcaacaccaagttgcagagatacatgattgtcaatcaaaattctcaaaaattgtttctgttgtaggaacagcagcagtattggtatcgacagcacttgcttagtttgcaacagaggacaaaagttcatttgccaggacacaaaaagggtcctgtggtagcaaaggatacaccagagccggtaaaagaagaagttacagtacctgccaccagtcaagttccagaatctccttcttctgaggagcccccattgccacctccaaatgaggaagtgccacctcctctcccacctgaggaaccccaggtaaccatataattaattgtttgtgtttattaaattatttagcttttttctgattcatttagtatacttttatcataaatggatatatatttttgtttttttaggtacctataaagttgcatttgtgaaatcagatgtctgttgtatcaggtttatttgtttgtttatttattttgagacagggtctctctctgtttaccaggctggagtgcaatggtgcgatcttggcttactgcaacttctgcctcccaggttcaggcaattcttctgcctcagcctcctgagtagctgggatgacaggcatgcaccaccatgaccggctaatttttgtattttttagtagagatggggtttcaccatgttggccaggctggtttcgaactcctgacctcaagtgatccacctgcttcggcctcccaaagtgcttggattacaggcatgagccaccatgcctggcctgttgtatcaggtttagaaaaggaaatttttcctagtttgagtgaagagttggatactcttctgaattgagtgcctctaagcactaaaggaagatgccagcatatgttcatagtgacagcacagggcaatagttgagtgcttgagcttttagagtcaagctacccaggctataatccaggtactgccacttgccagtagtgactgggcaaatttgttaaccattctgtgcttcaatttactcctctgcaaaatgggtatattcaatagtagctatcatatagaggtattcaagcattaaatgtgataattcttgtcactcagcttagtgactggcacatgggaggttctcatattggtccaaaggtcattgttctcccaagagccttatatgaagggtttaatcaaaccatgatggttatattgtagtccattggtgaaaagtgacaaaaaaagaaacggatttttcatagagtgaaaaggtctataacttaaggttcactttttttttttttttttccagacagggtctcactctgttgcccaggctggagtgcagtggtgtgatctcaactcactgcagcctcagcctcccaggctcaagtgatcctccttgcctcagccttccaagtagctgggacctctcttccctcccctcccctcccctcctttttttttttttgagatggagtcttgctctgtcgcccaggctggagtgcagtgacgcgatcttggctcactgcaacctctgcctccaaggttcaagtgattctccggcctcagcctcccaagtaggtgagattacaggtacctgccaccatgcctggctaatttttgtatttttagtagagacggggtttcaccatgttgaccaggctggtcttggactcctgacttcaagtgatccacccgccttggcctcccaaagttctgggattacaggtgtgagccatggtgcccggcctgggaccactttccactgggaaaattgttgtcatatttaggaataataagattattattccagtgaagactatggaatttataaactcctttgtattagtatccataatagtatagatagagctatgtgttttatctaaagatagaatagctgttctcaatccaaaaagaactgaagatactgtgtttgacagttggatatttctgagttgtagggattctggactttataatacatttataaaatatttttgcttgctgttttatgacttacataaagatgtgtcctcttttatctttagtctgaggacccagaagaagatgccaggttaaagcagttgcaggctgcagcagcacactggcagcagcaccagcagcatcgagtcggtttccagtatcagggaataatgcagaagcacactcagttacagcagattctacaacagtatcagcagattatacagcccccaccacatatacaggcaagtgcttccatagtccacaataggaag

SEQ ID NO: 12709 - DNA, 2300 bp, Homo sapien
ggaacgatgggatgaagattctttctatgggctctgggatacaaatgatgaacaaggactgaattcagaatttaagtcagaaactgcagcaattccatctgctccagtattaccacccccacctgttcactcttccattccccctcctggcccagtgcctatgggtatgccaccaatgtccaagccaccaccagtacaacagactgttgattatggccatggccgaggtgagtaatgatagtgcacttgtatttgggattctacaggaattgttagcttcagctttagctttctctagcttcactcttacagtactttatctctgattttgtttaccagatatatccactaataaagttgaacagataccttatggagaaagaataactctacgcccagatccactacctgaaagatcaacttttgagacaggtaggattcccagagaggtcagtatttttaaacattttagggcctaattatcacatgattttccttttggtgagattatctgagcctccatttaatacagctaaaagattcttagttgaatttatggcaaaaatttataccagctctgaagttagatttatagttttctgcttttatttctataaaagggatatagttattttgtactaattgtttttgtagagcatgcaggccaacgtgatcgttatgatagagaaagagatcgtgagccttattttgatcgtcaaagtaatgtcatagcagatcatcgagattttaaaagggatcgtgagacacatagagatcgagaccgggatcgtggtgttattgactatgaccgggatcgatttgacagagaacgccgaccccgagatgataggtatgctataaaacaatctttgctaggtgtacaaattactgtatacttaacagtaaaagtttaagagaaatttaataagtaacatattcttctcatgcatgtgtatatgtaatttggagggggaagaacaattctggaccagttttcaggaaagtaggtccttgacttggtagcttgaattccagagaattaaatgggagatggagatagccagaagggaatggaaatggtattgtcaataaaggtgcagtcatactcagtaggcaagcaatttatttttgcaattcatgagctttttatttattattattattattattattatacctaagggcattctggcagccagccaaggaaaagggaaaggggggcaagcccatgaactatttatttatttattcattactattttgtatggagacggggtctctctcagtctgtcacccaggctggaatgcagtggcgcagtctcagctcactgcagcctccacctcctgggctcaagtgatcctcccacctcagtctcctgagtagctggggccacaggcatgtgccaccatgcctggctaattttttttttgtttttgatgacgatgtggtttcaccatgttgcccaggctgatctcaaacttctgagctcaagtgatccacctgcctcggccttccgaagtgctgggattataggcgtgagccatcatgcccagctttcccatgaacttcttagatgtatgtatataaagtaaatctaaatgaaaaagcaaagtcaaaatgtaaatattggccgggcgtagtggctcacgcctgtaatcctagcactttgggaggccaaggcaggtggatctcttgagctcaggagttcaagaccagcctggccaacatggcgaaaccccatctctacaaaaaataacaaaagttggctgggtgtggttatgtgcacctgtagtcccagctactcaggaggctgagatgggaggattgcttgaacactggagatcaaggctgcagtgagccgagatcacgccactgcattccagcctggttgacaaagtaagaccccaatctcaaaaaaaaaaagtaaacatttactgtgtggagtaccttcctatagagaaaattgggcagttaatgctgttgcgttataaagcagagaaccccaaatattttttatttgctgaagcgcttcctattacaccttctagagctcagtcatatcgagacaaaaaagaccattcctcatccagaagagggggttttgataggccatcctatgaccggaagtctgaccgaccagtctatgaaggaccatccatgtttggaggtagagtgatgccttattaactacaaggatgttgagaatgtaaagcatgggagatgctttccattgtagctatgaatttaaacttttagagtaaaacgtattcacagatttcttagagctggtggcattgtc

SEQ ID NO: 12710 - DNA, 2300 bp, Homo sapien
gagtaaattttagtagtctacatctttccaggaatttgtctgtttcacctaaattatctaatttgttggcatacaattgttcatagtattcctttgtaatcttttttataaggttggtagtaatgtctcctccttcatttcttttttactcgaggcagagtctcactattgcccaggctggggttgcactcctgggctcaagtgaccctcctgcctcagcctcctgaggaactgggattataggcacatgccactgagcccagctttcatttctgattctggtaatttgaatcttcttttttttctattcagcctaggtaagagttcatcaattttgttgatcttagtcaggcgtggtggctcatgcctgtcatcccagcactttgggaggctgaggtgggcggatcacttgaggctaggagttcaagaccagcctggtcaacacggtgaaaccccatctctactaaaaacacaaaaattaggcgggcgtggtggcaggcacctgtaatcccagctgcttgggaggctgaggcatgagaatcgctcaaacctgggaggcagaggttgcgatgagccaagattgcaccactgcactccagcctgggcaacagagcaagactccatctcaaaaaaaaaaaaaaaagttggtctttttaaagaaccactgccaccgtttggttttattgactttttctcttttgtttttctgttttctattttattaacttctgctttaatctttattgtttctttcctctgtttctttagtttgctcttctttttcaagtgtcttaaagtggatggttaagttattgatttgagacctatttctttcctactataggcatttatagctatcaatttccttttaagcactgctttagctgtatcctgtaagctttggtgtgttgtgtttttttcattcatctcagagtattttctggttcctcctggtttctggctcctcttgatttctggttcctcttcattttttctttgattcattggttatttaggagtatgttgtttagttttcacgtatttgtgagtttctctaattttttcttactattaatttctaatttcattccactgtggtccagtgacatactttatattatttctgtcctttcaaatttatgaaggtttgtttcatggcctgttgtatagtctatcctggaaaatggtaggtcattgttaactgttatctcattgcagaaaattttctctcagtgatttttttttttttttggtctattctgtttcagattgttgttataatgagaggattacctggcagtggaaagacacatgttgcaaaacttattcgagtgagtatggggaagctgaaaaatcagctgcttgtgctgcttgtgttagtagtcacttgccttcttattaatagcaagcaacataatgccaatagaattgtcttccatttgatccattacagttggcccatgtggtagatgttgtcccatatatatttttatctactcagagaaacatttttgcctctgcttgatttgaaaccaccagaagattgtatattatttagccacaagagggaactttggtgtgaacattaatttattccataaattcgttttaaccttcttgactgtatgattcttaggataaggaggtagaatttggaggacctgcacccagagttctaagcctggatgattacttcatcactgaagtggaaaaagaagaaaaagatccagattctggaaagaaagtgaaaaagaaggtatggtattcatctcagatctcgttctgattcattaatagtatttaaaggaaaatgtgtttggagagaaatgtggcttttttgagggcagggacctctctcttttccgaacacagtactttagtacttgggtgtgaaggaaagactacaaagtcatctctatccaaatactaaccaaggaaaaggttttggatgattctttgcttttgctaattccatatctcttttgggggaccttaggtaatggaatatgaatatgaagctgagatggaggagacttaccgcaccagcatgttcaaaactttcaaaaagactctggatgatggcttttttcccttcatcatcctggatgccatcaatgacagagttaggcattttgaccagttttggagtgcagcaaaaaccaagggatttgaggtagaagcttaaagaactttaaagtactttgtgttgtcatgtaaatgttatatatctttgcctaattattattcattcttgcttaggtatatttggctgaaatgagtgcagataaccagacttgtgg

SEQ ID NO: 12711 - DNA, 2300 bp, Homo sapien
tacttgctaggtgaataaacagaaatgattactgcatagttcaataggcacactgggaaatttgaaaatcttttgggagtgactttgaaataagccacccagttattttatgaaatataagatgtaagttgccagtggagatttctggtttttcatgtaagaggaaaacataattttaaaaaacatcagaaataataatctagttttcaactgataaaaatgttctgaatttgattcagtaaaattagccgttgtatgctctaactggtaaatgaattgagtcattttaaaatgaagttgaacttcctaatcgggtaattgggttaagtgccaccaattcttttcctttcttttgagtacttaagattactgaaatataaagtaactatcttgaagaacactttttgcatcttatagctactatcacttgagaatagcagttgtatttagaagataacctagctagtattacaaattctctgatactctgagtaatattaatattagcacagtaactacctgtacattcttatcatatttgctatacagctgttgttcagactacaattgtgagtcctgaactgtagctgcctcaaagcgccttcatgatactattctgaagtgactactctgaaatgtggacagtgaagtttggtgaatttggtcatttagtttcttcaaagataatgagattgtgtttcccctaaggatgtatttacagctagtcagtggaaactgaatccattcccagttttaatgcttttccagttcaaacgtgatatgcatgtatgtgtctctttctaacccttcgagcttctctctgtgtacgatttagggttacattccgaaaagcaaatgggagatggacacatctgaggcaaagctaggtgggtatttcctttttcctgtttttatatgtgatacctgatggtaatggtcatagatctttctgctataagaggaacaaatttcctaaaacttctacttgaacagagatttctggcctaccttatatcctccaatctattttgctagtttttatatcttgtaacaaagtgataagtattttaaaagaactgctttcaatactatttaaagtttttagagtcaacagaaatatttgataatttagcaacaaaatattgtcacttataaaatctattcttttatattaatcagaaatgttggtgctgatgagatttcttttttaaagaatatttaaatgcagtccaaagttaaacctgattatgaatactttagataataaaaataatataaagtttaaaattaattaaaaggcatttattctccttgtataataaatgagagtttctgagtagagaggagtagatatataattcaggtttttgaggagcctgctttataagattcagtttaaatttttcttcaaattgttaatgccaaattccaaggtaaaccagtttaaatgattgtctaaatcagaatttggagttgcttaatgtgaagttatctgtcaaacaaaaaagtcatacatatccaatggattccctctattatttgttggtgaaaactgcaaaatattttttcagttttacttcgcttaaagagaaccatttaacatgttgattaagatgtattaataaaaatctaaaacaatgtgctaaggactttttgagatcagccttactgatgtatgaagtatgactgtcagtttatgtttcttttcctggtattatactccaaaactaaaggaaccatctaagtatcttaaattgatacaggaagtttgagtcactgagctgcttcattgcttgggacatgtgtttctgacatcagaggagtgcattttacatgcaattacataagttgtgcctttaatttgccccaactacttgtgttagtagttggtattgactaggttctgtgttaaaagacagttccacggactttattattacattactggtataggtgctttgttgtcaagtctaaaagattttttttagtttatgtcatgtgaaaattatatgtggtttttgacatattcttctagtagtcttccctctgtgggaaatcttaataataaccaattgtcatcttccagagacccttaaagcacttatgtgtttaaatgcaattaaatatgtaggaaaataaaaattacaaaatacttttaaaataataataatgctttagttctgcttatttcgacgttagattaactctctgtgaagttctgtacattagaatgacccataatatgccaagatcatttctctcttctggttctcttaaatattgattatcctttagggcaa

SEQ ID NO: 12712 - DNA, 2300 bp, Homo sapien
cacccgcctcagcctcccaaagtgctgggattacaggcgtgagccaccgcgcccggcccagttcaatgattattattagttagaaagcaagtgacgtggttggagtatagtgtactttgatgctttgtgggaataaaacagctttaggcagtctttcctgaaatagctccctccttctccccaaccgctctctccagtttccaaccctttgttgtgctttctcttcacagcaggtatcacacactgaaaatatatttgtttgtttattctctgctttccctgctagactgcctgttccaggagggcagactatgctgatcttgctcactccatgagcccagaagaaggcccgacacacagcaggtgctcaataaatagttgttcaataaatagttgaacagtgaatgcgtaatctgatttttccaagagttaggacggcagtgtttttttttttttctttttcttttttttcttaagacagagtttcactctgtcgcccaggctggagtgcaatggaacaatctcggctcactgcaacctccgcctcctgggttcaagtgattctcctgccccagcctcccaagtagctgggattacaggcgcatgctaccacactcagctaattttttttatttttagtagagatggggtttcaccatgttggccaggctggtctcaaactcttgacctcaggtgatccactcgccctggcctcccaaagtgctgggattacaggtgtgagctaccttgcccggcctgaatttgctttttttttttgagatggagtctcgctctgtcacccaggctggagtgcaacggggcaatcttggctcatggcaacctccacctcgcaggatcaagtgattttcctgcctcagcctcccaagtagctgggattaacaggcgcccgccatcacgcccagctaattttgtacttttggtagagacagggtttctccatgttggttaggctggtctccaactcccaacctcaggtgatccgcctgcctcggcctcccaaagtgctgggattacaggcgtgagccaccgcaccctgccgaatttgctatttctagaagtgccttgggtgattctgttgcccttagtcactagaaaagtcactccgaatcagacaacgcttggtttgaccccagtctgtcacttacgagctgcatgaccatagggaagtagcttcttctctgatcttgttttcttatctgtagacaataggcatgaccacattctcatggagctgttatgacacattaattaaattaatggatgtagagttcttggcataatgccagttgttcaggcggctgccactacgatattattattattattattattttattgttatgcccaagcaggagaagatttttctccctgtaagatcactctcggagtctcctcaaagtggggttctgagaccagcagcatcagcattacctgggagctggcttaaaatggagaatctctgccccaccccacatctactgaattgaaatctacactttaacgagaccgcgttgaatgtttgcacattcacattttaaaaggactgttcaaagtcacacgtactcttttcttcctgtctctaatttcaggagtctgcccaggaggttcatgagccctggcatcccagaatctgaatccttcctcagtgacagtggctctttacccttctaagtgcagaggaggaagcccagcgcattctgggtgcacttccagctgaggaaataaggaggaggaattcctgaagccctgaacaagtgcctgggatggatccaaactccatcttgctttctcctcagccccagatctgctcccacctagcagaagcttgtacggaaggcgagagaagctcatcccctccagagctggatagagactccccgtttccctggagtcaggtccccagctccagccctacagaccccgaatggtttggtgatgagcacatccaggcaaagagggccagagtggagaccattgtccgaggcatgtgtctctccccgaatcctctggtgccaggcaatgcgcaagctggggtcagcccacgctgcccaaagaaggcccgagagaggaagaggaagcagaaccttcccacaccgcaaggcctcctgatgccagcccctgcctgggaccagggcaacaggaaggggggccctcgtgtgagagaacaacttcatctgctgaagcaacagctaagacatctgcaagagcacatcctacaggctgccaagcccagggacacagctcaggggccaggaggctgtggcacggggaaaggccct

SEQ ID NO: 12713 - DNA, 2300 bp, Homo sapien
tagaaaatgtatctgttaactctgccagaggggttaggaagggattaagaaggagatttaaaggatgactaggagttcctaggcaaataggaggaggaaacagcccatgcaaatagctcagcaaggctatggccagtagtgtggtttgactaaagctcacaatctgtgagaatgtggggagagaatcagaacataatcagaggcctgattatcaggtgcctggccaagttgaggagtttgtactttatcctacaagggagataaactttatctcccttgctttatccgaccaggagaagcaatgaaagactttaatcagaggagtgacaggattaggtttgcatttcagaaggatttcttttttttctttactttctttttttttttttttttgagacgaagtctcactctgttgctcaggctggagtgcagtggtgcaatcttggctcactgcaacctccatctcctgggttcaagcaattctcttgcctcagcctcccgagtagctgggattacaggcattcactaccacacccagctaatttctgtatttttagtagagatggggtttcaccatgttggccaggctggtcttgaactcctgatctcaagtgatccacccacctcatcctcccaaagtgatgggattacaggcgtgagctaccacaccaggctcagaaggatctttgacacagatataaaggatgatgggctagagaaagcgagagcggaggcttagaactgcttagggagcttttcaaataattcaggtgaaagctactgaggagttaattgtgggtagcagcagggcagagctgttttctctatttctagttaggactttggcccatccttccagaatttcagtggcagtgctttcagggttcaggtgagtgaaggcactgtaaaggtcctgatggaatttgaggccagcctgggcaacatagtgagaccccgtctcaatttatattaaaacataaattaattagaaaaataaaaaataaaggtcctgagggccaggcaaaatgcctcagataaagaaatcatcatgaacggcaccaagtggttcattcattcattcatacatttatgtgttactaattcagccagaggtttaaagcacatctttttcattaggaaggtgagccttaaaggtgaatactcaaggggcctgaatacttaaggaggggaaggggatgctatatgctttcacttcaagtcagcgggaagaatggcacactcaaagtggggaggtcagcctggcatggtggcacctgtagtcccagctactccagaggctgaggcagagggatcgcttgagcccagagtgtcgaggctccagtgaactatgaccttgtttcttaaaaaaacagctgggagtttatattctagggatagggtgacaaacgaacaacttccaaaatgcacaagatgtatggggaacaattagtttggctggaatttgcgttggggggagatcagaagctgttgagaaataaggctatagttggtgaagatatccgactcgtaaaaaggcaatgggatttagaaattcctgggattctgtttctttgactcggggttaggaagacagggaagtaacaagtgcctttttttttttttttaatagttaagggacctgagactgggggtggggggcaatgtcatctgccccaggccacacaagtgtaagatcaggcatgcatgtctgccaaggtttcagttcaatgtccgtgcccctcttttgctctcttcccaaggtacagaggcggaacggcgcggtgccctcgggtcccaagagagaagggcgccaagctcagagccagttctgtggaagggtaggggaaggcctgaccccgggggcaatgtggtggcgggacagtcgtatacaccttcaggagaaccacctcaggctgacaggcagtgcggagggccccaagagcgccttagggttgcctgctccagagagcgggactcctgcgctgcagccgggatactgggcgccgccgtgcgcccaccccctgccagtggttcgctccgaacacccctcgtcgggcggcgggtactgcggcccgccccacttccggttgttgtccggccctatatccggtgtccgcccgccctcggctcctccgccgtgatgctgtcccgatcccgctgtgtgtctcgggcgttcagccgctcgctctccgccttccagaaggtacggtctggccgagccggggccccgacgggtgaggagtctgttggcgggcagagaggcggcctggaaggcaggggcgcggcgcgccggccgggcc

SEQ ID NO: 12714 - DNA, 2300 bp, Homo sapien
tctgcattccccttggatctttctcagggctcttggaaactcctacccagaacctgcatttgaagcctgcactccctcccacaaaagctggttgttctgcctgaacatgccccactttccagatggacacacatgcatgcacacacacacatacacatacacatacacatacacacaaacacacatgcacacacactgccccctctttggctagagggtggaggacccagattctacaggggcagtgggggtaaggacaggtcaggaactgagggaggcagttgctccaccctcattcgggtgcccctgaagccagggctaggaggtcccctaacagcagcagtctctggcctgtccccggctgatctgcctgccctgctgctcccagagcctacccaggtgccacatggtgagcagggagcggctgaccatcatcccacacggagtcccctacatgacgaagctgctcaggtactttgtgagcgaggactccatcttcctgcacctggagcatgtgcaaggtgagcaggcctggggccccctgtcagctccccaggcctttggggtatgtcgtcaacccttaaaatgcggagccctggcagggcgtggtggctcacgcctgtaatcccagcactttgggaggccgaggcaggcggatcaactgaggtcaggagttcaagaccagcctggccaacatagtgaaaccctgtctctactaaaaatacaaaaactagccaggtgtgcttgcacgtgcctgtaatcccagctacttgggaggtggaggcaggagaatggcttgaacccgggaggtggaggttgcagtgagccaagatcacgccactgcactctagcctgggcagcagagcaagactccgcctcaaaaaaaaaaaaaaaaaaagctgagccctggggaggggcggagcttgcaccagatgtacagcacagaccaggggacccggcctttctggaggccagtcaggctgttgtgggcccctgtgtggtaccaagggggcaggggacatcctggggtggatgtccacatcgtgggtgggcgtgagaatcacagctgtctcctctgtcgctgtttcctccagcgttggctcttttcatttttccgggttgtgccgatcccttgggagtggccagacagggtggtggtgactgaagttatgaggacaggaactgggccatgtagcagatactgatggttgtattgatgactttttaaagtgaggtgcacatctggggtcatgacatatagtcatcataagtgtgtgcctgacttttctttaaatttctttatatcggtctccctaaaaacagtgttcacactagtgaacccaccacccaaaccacagacactgatagtgctggacatctctcggtggtgtgccagtttgtaaggctgggcccactttagttgggtcaagaggagggcagagggcattctaagctgaggggtgggagggagcagaggtgaggggctgaactaggccaggacacccagaggcggaaagtctgcgcccaagacagaagggaggcaggagtgggagccggccctggcatccatactctttttctccctgtccccacgctcaccgctccctctgcatggcccaggaggcactctctggtcccacctgctctcccaggcgcactcccgacattctgggctcagctctggctctacccaggagaggatgaaggctcagctcaacccccacctcaacctcctgaccccagcgaggcttccctcaggccatgcccctggccaggacagaatcgccctggagcctcctaggacttctccgaaccttctcctagctggggaggccccatccaccagaccccagagggaggctgaaggtgaacccacagccaggaccagcacctctggctcctcggaccttccaaaggccccaggtggccacctgcaccttcaagctaggagggctggccagaactcagacgctgggccccctcgggggctcacttgggttcctgagggggccggcccggtgctagggggctgtggccgaggcatggatcagagctgcctgtcagcagatggggccggccggggctgtggcagggccacctggagtgtgagagaggagcaggtgaagcagtgggcggcagagatgctggtagcgctggaggcgctgcacgagcagggggtgctgtgccgggacctccaccccgggaacctgctcctggaccaggcaggtaggtgccctcctcacccctcagtggggtggcccccaaagcgtccaggcagaggacgagagatccccaaagtc

SEQ ID NO: 12715 - DNA, 2300 bp, Homo sapien
cttatttattttaaatttttatttgcagtcaggagtacatgtgcaggtttttcacatagataaacttgtgtcatgggggtgtgtgtaaatgaagggggtggagtggagtgggaaaaaggcctgaacgcagcgtgccaagcccacacaacatggctgcgctggggagacctggagtcacctcagagctgcggcttcctcagttgtaaaacaagagatcagaggaagtgactggctctgaggtcccttccagccatgacacctcagaccctgcaggatgttggggctctagctaaggccttgggtgaggggttgatctctggaggtccagttggaacagggcttctcagttgatctctggggtccaggtggaacagggcttctcagctgatctctggggtccaggtggaacagggcttctcagccctcccgtcaggtggcatgaggcctggcccagcgtgggcagggagagggcagggcattctgctcgcatgcccaccacgcacacagtgagccaaggcccgggctgctcacagtgcatgtgtctagcacctactacatccctgcactgtgcagggctccgggaatactgagctcacagtccagtgggagacagattagacagtgtgaagaggctctcctaagggtgaactaagagagcattggaggcagattagggaccccagcccctgtaatcttgggaaggcttcctggaggaggcagcatctgagaccacaggtctagcaggggtgggtgagcaggataggatcgatgtctgcttcaggagtgccaccaaagcccgccctccctgccctgccactggagtgagtcagcctcagtggaggaacctgggagggggtcaggctggggtcacggagccccaggagctagtacctgccttaaccagtgcctcttggactttggcaggtgcagctggtccaggacccggcaaccggagggacctttgtggtgaaggcaggtgccaccctgcccctgccactctgcattccccttggatctttctcagggctcttggaaactcctacccagaacctgcatttgaagcctgcactccctcccacaaaagctggttgttctgcctgaacatgccccactttccagatggacacacatgcatgcacacacacacatacacatacacatacacatacacacaaacacacatgcacacacactgccccctctttggctagagggtggaggacccagattctacaggggcagtgggggtaaggacaggtcaggaactgagggaggcagttgctccaccctcattcgggtgcccctgaagccagggctaggaggtcccctaacagcagcagtctctggcctgtccccggctgatctgcctgccctgctgctcccagagcctacccaggtgccacatggtgagcagggagcggctgaccatcatcccacacggagtcccctacatgacgaagctgctcaggtactttgtgagcgaggactccatcttcctgcacctggagcatgtgcaaggtgagcaggcctggggccccctgtcagctccccaggcctttggggtatgtcgtcaacccttaaaatgcggagccctggcagggcgtggtggctcacgcctgtaatcccagcactttgggaggccgaggcaggcggatcaactgaggtcaggagttcaagaccagcctggccaacatagtgaaaccctgtctctactaaaaatacaaaaactagccaggtgtgcttgcacgtgcctgtaatcccagctacttgggaggtggaggcaggagaatggcttgaacccgggaggtggaggttgcagtgagccaagatcacgccactgcactctagcctgggcagcagagcaagactccgcctcaaaaaaaaaaaaaaaaaaagctgagccctggggaggggcggagcttgcaccagatgtacagcacagaccaggggacccggcctttctggaggccagtcaggctgttgtgggcccctgtgtggtaccaagggggcaggggacatcctggggtggatgtccacatcgtgggtgggcgtgagaatcacagctgtctcctctgtcgctgtttcctccagcgttggctcttttcatttttccgggttgtgccgatcccttgggagtggccagacagggtggtggtgactgaagttatgaggacaggaactgggccatgtagcagatactgatggttgtattgatgactttttaaagtgaggtgcacatctggggtcatgacatatagtcatcataagtgtgtgcctgacttttctttaaatttctttat

SEQ ID NO: 12716 - DNA, 2300 bp, Homo sapien
gggcacagccccgcccgcgggccaagagcaagcctgtgggagtctgtgcgccactgctgtcaagggaaggatgaagcaacagtgctggctgagagtgaggatagggggacgggtgggagtcagagggagaaagtatgaaagggtgtctaaggtagagcaagtgcagccgggggacagtgtgaagccagtcagcactgaacctgcaggtgagatctgtgtcacagggttgcctgtgatctgttgccccatcacccaggctggagtgcagtgacacgatctcggctcgctgcagcctcaacctcccgagctcactccatcctcccacctcagcctcctgagtaactgggaccacaggcacacgccaccatgcccagctaaattttgtaatttttatagagattgggtctacctatgttgcccaggctggtcttgaactcctaggttcaaatgatcctcccgcctcagccttccataatgcagagattacaggcatgagccaccgcacccggcctatgtcttgaattttaagctcggttctgatatcaaaagccttctattgctgggttctttactctcggtagccctcactagactgtaagccccatgcggatgtaaacagcgctgtctagttcacggctgtatctcaacatccagctcctcatgcatgggagactctcaatacatagcattgaatcgttgaataaatgaatgaagcaatgaatgagaaaagtcctagaagtggcacgtctagatttctgaagcagccccttccgcatccctggatgattctagacctgctctccccacccaccccacatcccatcccaccctcccctctctaaaccgccccccgcccctcacagcccagccgtgcagaccttgcggctttaaggccggcaggagccgagccgggcggtgattggtggtttattctaaggctcaagtatgagctcatccgcagccaatggccgcgctgcaccggctggccccgcacgctggatgccggaaagcagcggcccgcggcgcgctctggcgtgaagggccggtacgtgagggggaggcctggcccgcggacccggctcccagctcgggcaggtacggtgttttgtccggtcccttctccaccctcccaggcgaggggccccctcggccgtccctccaccctgggaccgtgcaccttgcggctggggccccgtgggttgcacgcgccgctttctgtgtccaggcggggccggcggctctgcccggcaggaccctgcccggcggggtggaccctgaagccagtcctacccgggcaccccccagagcaaggcctcagagcctcaagttcccctgggcttggccgagcagggatggtgcggcctccctctgcctcctggccgcatcctggccgggattcagctccccgccggctgaggctgtgggtctccctccccgccccaccgcccatcctgctctctcctctttctctccaaatgacctggggttggaagttccgggtcctgcccattcccagtgggacctgggagagcaaaggcggggtagctttgtgggcctctctctgagccccttcccttcccgcagccacggctgtcatccctttggccgcctgggtcacacattgctcaggaagaagctgctgtcaggtccttggaggccacatgaccttctcaaaagtaaagccaggaggacagagcgaccctccctggggctgggtcaccctgccctcttctaccccccatccaacgtggcaccgagtctgccactcagtcattccgtctgccaacagttcttacagcccagctctgtgctctgctctctgctggctccaggaggggtcctcactcgctgaccacactgacctcaggaccaagggaacaaaacacagcaggggcaatccatccggtccacggagaagtgctaaaccccaaagggtaaatgagattcccacaggaggagcagggaggagacaacaggcagggtggagggaacagcatgaggaacagcatttgagcccagcgtgtgtggcctccatgtgctgaatgcgtactggataccaagcttgctctacggaggccctgtgaaggtggctgtggatcacagatatcctcagctctctccagagctcaacacagtaccagatgctccagaaatgtttgctgaactgaatttgactggaaaggaaaacagagccccaggcctgcgcggtggctcacgtctataatcccagcactgtgggaggccgaggcagacggatcacttgaggtcaggagttcaagaccagcctggccaacatggta

SEQ ID NO: 12717 - DNA, 2300 bp, Homo sapien
atactgttttcaaggttcatctatgttgtagcatgtatcagcactccactcttttttatggctgaataatattccattatacggatacatcacattttatgcatgcatcaggtgatggaccttgggtgttgccactttttggctattatgaataatgctgctatcaacattcatgtgcaagtttttatgtgaacatatgtgttcaatactcttaagtatacacctagaagtagattgctgcgttatatggtaaatctattttaactttttgaggaactggcaaattgttttccaaagcagctgttccttttacattctcatcagcaatatgcaaatttctccagatccttgtcaacacttattattgtctttttcgttgtggtcatcccagtgggtgagaagtggtgtctccttgtgattttaatttgtatttctctaatgactaatgatgtagagcatcttctcatgtacttatggcatgcatttgcatatcttctttggagaaatgtctattcaaattacttgcccatttttaaatgggatgtctttttattgttgaatttaagagtcctttatatattctagatactagacccttatcagatatatgatttccaagtattttctcccattctataggatgtgttttaaaagtttacttttgggccagatgtcatggctcacgtttgtaatctcaacactttgggaggctaaggtgggtggatcacctgagctccagagtttgagaccagcctgggcaatatggtgaaaccccatctctactaaaaaaaaaaaaaaaaaaaaaaaaaaaaaggaaattagccgtactgcaaacctagggtggtaggtaaagaagtgaggcctagagtgtattttggtttgttttcttgttttgcttttaagaggggagaaacaagcattatgtttgtatcaggtgggaattatctagtgggagagacgggagaatcgctggagtggtgtcgctgagtaggtgatggcacgggactgatgcccacctggaagggtggccttcgatggggcacagacagtcacctgtggaaaaaggttggaagcagagtgtgggcacagccccgcccgcgggccaagagcaagcctgtgggagtctgtgcgccactgctgtcaagggaaggatgaagcaacagtgctggctgagagtgaggatagggggacgggtgggagtcagagggagaaagtatgaaagggtgtctaaggtagagcaagtgcagccgggggacagtgtgaagccagtcagcactgaacctgcaggtgagatctgtgtcacagggttgcctgtgatctgttgccccatcacccaggctggagtgcagtgacacgatctcggctcgctgcagcctcaacctcccgagctcactccatcctcccacctcagcctcctgagtaactgggaccacaggcacacgccaccatgcccagctaaattttgtaatttttatagagattgggtctacctatgttgcccaggctggtcttgaactcctaggttcaaatgatcctcccgcctcagccttccataatgcagagattacaggcatgagccaccgcacccggcctatgtcttgaattttaagctcggttctgatatcaaaagccttctattgctgggttctttactctcggtagccctcactagactgtaagccccatgcggatgtaaacagcgctgtctagttcacggctgtatctcaacatccagctcctcatgcatgggagactctcaatacatagcattgaatcgttgaataaatgaatgaagcaatgaatgagaaaagtcctagaagtggcacgtctagatttctgaagcagccccttccgcatccctggatgattctagacctgctctccccacccaccccacatcccatcccaccctcccctctctaaaccgccccccgcccctcacagcccagccgtgcagaccttgcggctttaaggccggcaggagccgagccgggcggtgattggtggtttattctaaggctcaagtatgagctcatccgcagccaatggccgcgctgcaccggctggccccgcacgctggatgccggaaagcagcggcccgcggcgcgctctggcgtgaagggccggtacgtgagggggaggcctggcccgcggacccggctcccagctcgggcaggtacggtgttttgtccggtcccttctccaccctcccaggcgaggggccccctcggccgtccctccaccctgggaccgtgcaccttgcggctggggccccgtgggttgcacgcgccgctttctgt

SEQ ID NO: 12718 - DNA, 2300 bp, Homo sapien
cggcatccccagccatcggtatccccctactccatgaatgtaaactcagagagaccctccatatcatatccctagcacctagagcagttcctggagcatagcagggctcaggcaatacatgccaaatgaaaaaacaaattaatgaatacaggctgggcgcggtggctcacacctgtaatcccagcactttgggagactgaggtgggtggatcacttgagaccaggagttctcgaccagtctggccaacatgacaaaaacctgtctctactaaaaatacaaaaattagccaggcatggtggtgtacacctgcaatcccagctacttgggaggctgaggcacaagaatcgcttgaacccatgaggcagatgttgcagtgagccgagattgcgccactgtctaccagcctaggcgacagagcaagactctgtctcagaaaaaaaaaaaaaaaatacaaactcatacacaatagacacatcccatgcataagtgctagaaacactcagttatagacaagcatatacaatgaagatacttaagcacacgcgcacacacttgtgcacaatacacacctgtgcccacatacacaaatccatacccaaactaaagacacacacaaacacgtgtatgtatacaaagatgttatgggcaacatatacaatacatatatgcacaaacacacacctactcaccctcacacacatgcacagtgaccctccacaatgattctgggcccaggaagcagtttgtctaccccacgaaccccagcttgtttgaagctcgtcaggatgttccttgcagaccccgcttagccagctggtgactggcccccgcctcctgaacctccaggcttagggccggccaggcaggcaggctgcatctctggcagcccctcgtgggtgggcaggcaggcaggcagtggacgcagaggtcactggggtgagagctggggctgccctggcctccctgctcttggctggaatgtgagctgtaggggccacttcccaggcctcgctcctcccccacagccacccaccagccccaggcccagccaactcgtgactcccagtcctgccaggttcctgcagcctgggagctggacacagaaggcagtgagaggagtggtggtaaagaaagatccagaaccaagggagggcacacacaaacgcagagagagaggcacagtcttcacccacagagacagacacacacacgcagagacaggcaggcgtgcagactcacagtcccaccgaaagatacacattcagacacttccaaacacacccagatacacagcggacacgaacagatcacacaagcatacagagatacagagagacctgacccccacacagaggcgtatttggaggtacagtagtcacacgtactcagaccacacagaggctcagatgcaccgctcatggatattcacagacccgcaaatgcccatgcacacgcgcagatgcacacagacccccgcgcagcgtacagttcctcctcggccagggaccaggaggagatgcctgagtgagaccactctctaccacagggggctgccccgcagggagggcctgggaagactgcttcccaaggaggcaacaggcctgatcctccagccaggtgccctgagaggtttcctgtgggaggcccactgtgtccgtgcctggctaggagggtggtaggtcgggttagagttctggagtcacgtaggcttgggttttgtctctgccagttcctcggacacacagatgcgcgcacacacacaacacacacacactttccaagaatgcctatgtccattcgacatatgcaggcaggggtgctctcggagcctcggtttcttcatctatataacctggctaggaatcccttggccccctaggggtgtgggcatggctgccttcccaggcatcccggacggcccttcctgcagaggcggttagatcatgagccttgacggctgacgctggactcctggatgcccccatcccaggtgaccgccctgagagccgaagcagggctgtgggccctgtgggcgggcgcggcgcggcccggggagctgcgggctgggctcggcgaggcgtctggacctgccgagagcccctcgcacgcactgcgggctccggcgctgcgggctggccgggcgctgcgggctgaccgggcgctccgggaactcggctcgggaacctcgtctgcggtgggcggggccggcccggagccccgccccggctcagtccctgaaacccaggcgcggaccggctgcagtctcagaagggagctgctgtctgcggaggaaactgca

SEQ ID NO: 12719 - DNA, 2300 bp, Homo sapien
aggtgatctgcccaccttggcctccccaagtgctgggattacaggcatgagccactatgcctggcctatataccttattttcttaatgacttgatatatgaaaaaataacgacaatatccaaaattggctataatatggtaaatgctagccagcatgtaaattgatacaattttaaagacatttaaaaattaacacacaattagccaggcatggtggtgtgtgcctgtagtcccagctactcaaaaggctgaggtgggaggattatttgagccaggggaggttgaggctgcagtgagcagtgagcatgccactgcactccagcctgggcaacagtgtgagaccctgtctcaaaataaacaaacaaatcaataaataaaaactaaaacacagcaaaattgacacatattttatggctttttagagcaactgtattttcaacttcaatttctgatgctcattgctaatacatagaaatatagtttttgtatccttgctaaacttatgttctaggaggttttgtttttgttgctgttgactctgggattttctgtgtacactatcatgtcttctgtgaacagggacagtttctttccattctgtatgctttttctttttcttgccttattgcaagggctaggacttcacgtataatttaaataggagtggtgaaagtagacatccttgccttgtcctgatcttagggagaaagcaatcttttactgtgaagtatgatttttaggtgtaggattttgtagataccctttatcgagttcaggaagttcccttttgttctagttttctgagagtttgtaccatgaatattgaattttgtcaaatgtttcttcctgcatcaattgacatgatcatgtggttttacttctcagattgttaatatggcatattacattgatttttaagtgtttaatcagctttgcattccaggtttatgtttcactttgtaattacatattattctttttttatgtattgcaggatttgatgtgctaataatttgttgcaatttttgcttctatgttcatgagagatattaatctgtaattttcttttctttgtactacctttggctaactttggtattgacataatctttttggagggcaatttgttaattgtaacaaaagtctaaaatgtgctcgcctatggattccactttgaagaatttatcttaaggaaatagagatttctattacacacatactttgggttcaggtagacctggatttaagtatgaacccaatcctttattaactgcttaaattctgtgggtctgtttcccaatctgtaaaatggggataagaggacctatttcagaccttattaactgagacaattcacacacagtgcccaagaaccagtaagctttaagtaaatggtaactcttggtattatgttatactctctggcctctctgtaggaggacaattctgtccaaatcagaggatgtcatctttgcttctgtattggctcccactttgaatctccttaatcttcctcatctctaatttcgccgtcttctgttagacgtgttaggccttgagaatacaaaagcaacaaaagatatcgtccttgttttcagagacatgaacctcctagacacaggcgcaaacggtaccaagcaatgtaacagaacaaaagtgagacgtctgcccaaggggcagccgaccctggacatgcattcagagcgtcagtgtcagctgacactcgggagtgacagctcgggcagtcaccgagctgggaagacaggagggagtgccgcaacttcttcagtgtagccttaagtcgcggtgaggggcgcgtagagacttgctgctcccatagcaacgggaccagccaccctctacaggcctgacgggttacttccgttcaccgtcggctgagccaagaaaggccgcttccgatcctccagcccccgaggcgcgggggcgcgcggacgcccggttataactgaacaacccgagccccacgtctctgattggctcaggcagaggaagggggcgggagatcggcaacgaagggcgtagccggcttccactcaaacttgaggtttccccccatcccctcacagcggaagccgacctcgcccgccccggaagtgcaaactgtgtggtctggcaggtgtggattccgccggtgaaggctgaaggcagctaccttaaagatgccgggatccgcagcgaagggctcggagttgtcagagaggatcgagagcttcgtggagaccctgaagcggggtggtgggccgcgcagctccgaggaaatggctcgggagaccctaggg

SEQ ID NO: 12720 - DNA, 2300 bp, Homo sapien
gccactttatgtgcttttcaatctatgtggttttatgtcctgacttacactgaaggcttttcagaggtaaatctacagcactgacacctcatcttcctgaaatgcaactgcttctgatatggtgccaaaaaataactggattacattatactgtgagatggctgttgctaaaagaaagggggaaatcttagctgccatattcaacgtaaatatttcttccttttgaatatagacgtttaaaacactttaacctacttaacattctggattagcatacttttttatgaacttttgagggtcatgttaactgatagtttcctaatgaaaaatatttttggtatagaaagaagttccatgaacagatggctcctcagtaccctgctacctttctggaaatggctgatatacatcatgacatcaggacattgtcaaactttacataaaagtgttacatgaaataaattgttaaaagacaattttttttttttgagacggagtttcgctcttgttgcccaggctaaagtgaaatggtgcgatctcggctcactgcaacctccgccttctgagttcaagcgattctcctgcctcagcctcctgagtagctggaattacaggcatgcgccaccatgcctggctaattttgtatttttagtagagacgggatttctccatgttggtcaggctggtctcaaactcccaacctcaggtgatctgcccgcctcggcctcccaaagtgctgggattacaggcgtgagccaccagcctaaaagatacattttaatgtacagaaggaggatctataaaggtgattttgaggagtagtgtcaagtccccaagccttggtaattttttctttaaaatatattttatgcagttctttctattgtagttataaaccttatttcacttcattatcttaattttatcattcttaacctctccaggtttagtccaacagatttatctctcatgttttcctcctgttctaaagctgtcaaattcagcattgtttctaaaactcaaatctgattatccttcatggagaagaacagcatttgggccagatcttactagactctggagtttgaattgagaacctttcatttgtctacctgttcactttttcatgcagcatttgttgatcatccacactgtgctaggtgctgtcacgttgcaggttaactgactttgcttttaggagttcacagtactattagggaagatagctatctaaatataattgtattataatgagacaaatgttaggatagagacatacattggagataagagacataagttggagatttgtgaaggttgcaccaagttatggctgacaagtactgctgtatgtctaacacagggcttctctgggtaattttttgttgtaaggtttgtcctatgcattgtagaatatttagcagcatccgtggcctttatctgctagatgctagtagaacgtagaaccctttactcaagttgtgacaatgaaaagtgtctcaagccgggcacagtggctcacgcctgtaatcccaacactttgggaggccgaggcgggtggatcacaaggtcaagagtttgagaccagcccggccaatatggtgaaaccccatgtctactaaaaatacaaaaaaattagccgggtgtggtgacgcatgcctgtaatcccagctactcgggaggctgaggcaggagaattgcttgaacccgggaggcggaagttgcagtaagccgagatcacgccactgtactccagcccgggcgacagagcgagacgccgtctcaaaaaaaaaaaaaagggtctcaagacattgccaatgtcccctcgtgcaaaattgccccccagtgagaatcacagtgacctattctaggtcttcattctgtctggtatgaatagataatggaactaagcattaatatagagtcctatatggacagcataatttcattaaaggatttctgattctcaatctagtgtttagtagtctgctttatgtcttgactcagtttgtgcagaaagaggttttatgtgattaaatttttaaagagtttacttgtattttaagttcacatttctaggtttttctttcttatatttagggtctcagtacaggtgtcaaccttttagaagcgaccttgttcttcctttccttccgagagctcgagcagagaggactgtgatgagacaggataacagaggtaagggtggcagagagtgctggggcacacagtacacatcgtaccacctaactcaaaaaacaaagcaggcttgcattaagcttgatcagtgccagctgtgc

SEQ ID NO: 12721 - DNA, 2300 bp, Homo sapien
cttgaaacaagaggaagtcctaaatcacacatcgacaaagcaaacttcaacaatgaaaaagtcatcttgaagttggattactcagacttccaaattgtaaaataatggcctgaatttaagttttctaagataaactcagtggtttggtttttattattaatagagatagaactattgtgtgttaatattagcattagtcaataagttattttaatgtcagatttttgaatgttattatatattacctgtatgatggaaggattaccactgtacacaaatctaatcaataaaaacgttagaaccttctgcttagagtacttttaaaaaatcttcagtgaacttccttttgggcgaaatgagaggtctttattcagtaaacatttgtaggaagaggattttgaggtaatttaaagaggtctgaaagaaaaaaagtctgagtcatttctttaaatggtttctatgaaatgttcttcaagaaattccatgcctaataagaacaaataccacaagttcaatttgttagctctgttcaccttatgtttggatgaattacttctgctgttgtttcttttctctgggtaaggaattcacataaagttatgttatgggctgaactgtgtcccaccaaattcatatgttaaagtctcagtccccagtacctcagaaagtgactgtatttggacatagggcctttaaagaggtgattaagattaaatgaggctgtgagggtgggccctaatccaatctgactggtgttcttataagagaacatattggctatagacacgtgtgcaaaaatcaaagaccctgtgaaaatggccatctacaagccaaggagagaggcctcaggagaaatcgttgctgccaacaccttgatctcagacttccagtctctagaactgagaggaaatagacttctgctgcttaagctactcagtctgaggtattttgttatggcagccctaggtatagtaataatcataaacagttatcaggattttgcttaatcagccctagaagactggttggttgggtttggttagtcactaaactagcatatatcaaatgcttaccaggtctgacaaattcgttataaattccactttaaattctcaatgaaaatgagatagaaagcaaaaactaaggactggttaacaattccaaaacactttattctcacagcattctcagagttctgctctcctttagttatttttataactaaaagctgtggtggcactggggagattcaagtcagtgaagagagtcttggtgttgtcatctgtaaattaagagttgagcaaaggccgggtgcggtggctcacgcctgtaatcccaacactttgggaggccgaggcgggcagatcacctgaggtccggagttcgagaccagcctgaccaacatggagaaacccccgtctctactaaaaatacaaaattagccgagtgtggtggcgcatgcctgtaatcctagctactcgggaggctgaggcaggagaatcacttgaaccctggaggcggaggttgcagtaagctgagatcgcaccactgaattccagcctgggcaacaagagctaaactccgtctcaaaaaaaaaaaaaaaaaaaaaaagagttgagttagacagtttctcagccttttccagctccaaatgccataattctaagatggcaggctctggaattattcattcattcggtgcctaccataggccaggcactgttcttggtaactgggatacagcagtaaacaaaatatataaactccttaccttcacatagcttacattctagggagagaagacaataagtaaacacataaaatatatattgaattaaacggtagttaagagcaaaggtgaaaatgagaaaaaaaaggaaagggaaaacacgggaaaaaaaaataaaaacaaaagtaaaagctacgacatagtctttaacaccatgccaaaagggaataaggattgagactgtaggtaccggttcactgaaccctgggatgcggatccttggctggaacaactggtgcgcatgcgcactggtgtctcgcggcctggcgcgccccctccgaagcgcatgctcgtgggcacgcacgagcctcaagatccaaggtgcgcgcgtcggcgtccgaggcggttggtgtcggagaatttgttaagcgggactccaggtgactctgggggaagcacgcgacgaaaagatgatgccggggtctcttctaacaccagaagggccctgatgatggctgcgcgcagctttcggagccggatgcgcgagggccccggaggcccggcggcctgg

SEQ ID NO: 12722 - DNA, 2300 bp, Homo sapien
ataagccacagagttcaacccagtgagtctcatccctgactgtgtgttaagactacttggaaagcaatatctaggggtgaggcctgaggattaacatttttaaagcttccccaaagatcctgatgcacaagcagggtagcaaacccctggtctagccacaactggctacttgtacttcttcatctccatggtactacattactctaagctccacatactgggagctggtagagcatagcattcatggggattgactctggaaccaaatcccagctccatcacttactggttgtgtgaccttggattaaatgctgtttcctccaagaactctttccctgtcttcccaatcagaattaatttgtttgctcctttgtaatattttctgtccttgttatagcacagggctggttcctgatgagctctcaatggattttcatggaattaaattatcatgccatatattttattgtcattatttgcatgcatttgtgcccctacactaaattaaaaactctttgagggcaaagattttatatcattcatctttgtatatcctagagtgccccattcgtattagacactcagtaagttttgaattctataaactattttttaaatgaattttagagaaagaaataccattagcaagatactctatttagagttattttcaaatattgccaagtacaacattcaatccagcttgttcaccaccaaccccccacctctcagcactaaggttgtatgattctctaggatatggatcctcactctagcggggaactagcagaatgatgaatttccgtgcctactgtcacaaacccatatctcattgtcaagtctgccaacctggcatattcacataaggagtctttacgttatgaagaggtgtaatgtatacagtcaatccacagaggatcaataaacaccacagttttccttcacacacatgaatcataagggtagctggattcaaatgtttacacatcaactctaattttaaccatcttcatccacatcccccttgacaattccctgttcccaaaataaattcgtgtagtttggccatttggcttagattgactgactcaactgtaattctggagccatgagttattttgcttgtgctcttgctttatttgtgtagttagctggttatttgttcaagcattatttgacattttcttagtaaaggagaccggtgagtagcttccagaagcccagaagcagacataacctccattgggacctcctgtgcacttatgccccgtaatcccctattccagattgttatgacccaaactttaaggagaactgaatgaaaaaggacagaaaggttaaatgtatcctactcaacatatttatgatgtttatttttttatttattaatttatttatttgagtcagagtctccctctgttgcccaggctggagtgcagtggggcaatctcggctcactgcagcctccacctcccaggttcaagcgattctcctgcctcagcctcccgagtagctgggattacaggcgcccgccaccatgcccggccaatttttgtatttttggtagaaacggggtttcaccatgttggccaggctgctctcgaactcctgacctcaagtgattcgcccgtgtcggcctcccaaagtgctgagattacaagctatttatgatgtttaatgtgtgctgtttgtctctcacctccagaattaagctcctcaggacagggatcctgttttgttcactgatgtttgcctggtcacctagaacaggtgcctggcacacagtagctgtcagtcagtatttaattgaatgattgaatgtatccccatgtacttcttcgtctatgcctttctcctcatgagaaaatgagaagagggttgcgcttgttgactgagatgcgatgagggctaggtttgtggaggcccagccgagttcctggacagatccccaacccaaagcttttgggttgccggacaaccgcgtcctgaaatcccaccttctgggcgggcccgggccgaggcgccgtctctgattggtcagctggaggtgatgggcatgagcgacagcgaaggagcagctacacactaaacttccgggcgcggaggtttgcgcgccttggtgagccgttggcgtggtggtcccggagtgatcctggcagccggtggggaagacaaggagggtgagccgccaggggcccccagggtgtgcttctcaggtcgattagccctaaaatgttagtagcaggggattctgggagttagtagcagggaattctggtagtgagggagcgggaccgggc

SEQ ID NO: 12723 - DNA, 2300 bp, Homo sapien
gagatttccattaagaagtcttgtggagaagaggagaaatgaatgggactgtaatatgaaagttaggtcaagggaagtaaggtttgttttgcaggggaaagttgagtatatgttaaaaccaaagagacagagtttatggagaggtataacttgaagttaacaagatgcagacagggtgccgtctctcacgtctataatctcagtactttgtgagactgaggcgggaggatctcttttgactccaggggtttgagaccagcctgggtaacaaagggagaccctgtctctacagaaaaaaaaaaaagaagtaagctgggtgtggggggcacacacctgtagtcccagctactcgggaggctgaggtgggaggatcacttgagctgtggaagttgaggctccagtgagcagtgattgtgccactgcacttcagcctgggcaacagagtgaggccctgtctcaaaaacaaaggccaggcccggtggctcatgcttgtaatcccagcactttgggaggctgagacaggcggatcacctggggtcaggagttcaagaccagcctggccaacatggtgaaactctgtctctactaaaaatacaaaaaattagccaggtgtagtggcagacgcctgtaatctcagctactcgggaggctgaggcaggagaatcacttgaacccaggaggcagaggtggcagtgagctaagagtgcgccactgcacttcagcctgggcaacaaaacagggcgagattccgtctcaaaaaacaaaaaacaaacaactttaaaaaaccccaaaaaccaacaaaacagaaaacaaaacaaaacaaaaatgcaggggtaaagtgatggagtcaattcccggagggtactgaaaaggactaattcaagagaactcaatggaactcaatggaaagtcgcccttctttctcatagaggagagggaaggagagagagagaggagagagggagacagacagagacagaaacagaggagagagggagaggaggaagaagagagagagacagagagagagagaaagagaaaaagaaagccggtaaattctgctgagggaagctgtgggagttgataatcgggaccctgagtggagtgggaaacgtctggagctgcatatacggagaggcggtagagtcaactagggatgaaaacgaggaattaaaaaaaaaaaaaagactgatctggagggtccaccaaggaatttccttgtaacgggtaacagctgtaatatgacatgttgaagtattaacactgatgactgctgtctacattattttccatgtgcatgaattgagtagttacagggaaaaagcgaactgcctgttccaaacggcttacacagatgaactgaagcgaagaagaaaaatgaactttcttttgatgtcaacaagatagagtatcatttactgttgaagccaggttatactgattattttcgatctggtagttaactttatcatcattacatttggctgagtcattcctgggccctaagtagagacggctagaattaccacgtgagtaaaacattataatatcaaaataattagattggccacaaaaactaccacggaaagatactgcgtagcaaaaacgttggcagcaagttccaaagccttggcgaggacaagcaaggagcgcgcgcgtgcagccatacctggggcccgcccagcgcagccgagcgcgcggagaaaggccagcagcagccccgctcccgccaggcgggcggacgccggcatcctgcggcggaagcacgcggaggcacagccagggcctccgccctttgccagacaagggcacaccccaaggtctgggagcgtcgttctcagaaaagtacaagttcttctttgaaggagctccagaaaagcctctcccgcccctccccggctccccaagggcagggctggaccgagctgcagagttggccggacactgactgggtcaagtgaccttgggctgaccgcacccccacccccggtcgccccgggtcgctggtgcactgcgcctgcgcgcgtctccccgaggagttcgcggcgaggggcggagcttggcgcgccagtgcctcggtttccaggcaccgggaataacagaagccagctgagagcgcctgcgcggctgtcggttgatggggaggtcaggtctgggaaactaggccctggggttttccctgagcaggagcggtgcccgagggcctcaggtacgcagaagggcggggagacatgggatcagcacctccacctcctaagggaccgaagggcaggagagcgagaggacttgtccccagaggt

SEQ ID NO: 12724 - DNA, 2300 bp, Homo sapien
tacatacgccatgttggtgtgctgtacccattaactcgtcatttacattaggtatatcgcctaatgctatccctccccccttcccccaccctatgacaggccccggtgtgtgatgttccccttcctgtgtccaggtgttctcattgttcaattcccacctatgagtgagaacatgcggtgtttgattttttgtccttgcaatagtttactgagaatgatggtttccagattcatccatatccctacaaaggacatgaactcatccttttttatggctgcgtcttagtttcctttttgtgttaatataatgagttttgtcattttccaaagaataaaattaagagacagaagttttctgactcaatgaaaaaggtaagaattaatttttaagcaatctctaaagtagtgattttcaattaggagagtacaaattcagggcaaggctggagagagtgtctttgtagtttgaaaagaaatattcagttgccgggcacggtggctcacgcctgtaatcccggaactttgggaggctgaggcgggcggatcacgaggtcatgagatcaagaccatcctggctaacacggtgaaaccctgtctccactaaaaataccaaaaaaaaaaacagccaggtgtggtggcgggcaccggtagtcccagctacttgggaggctgaggcaggagaatggcgtgaacctgggaggcggggcttgcagtgagccgagaccgcgccactgcactccagcctgggcgacaaagcaagactccgtctcaaaacaaaacaaaataaaaaaacaaaaaaaacaatattcagaattactattacttgatttatgttttcattatagcagtggatttgttgtgaaattttaaacttaaatgagaggattcttttttaatactaattcaaagggaacatgagttttaattaagttgagaaacactaccctatagatgaaattagatcacagtaagctgattcctttatgggctggagacagtcctcaggactttaattctttgccctgcccttgttagatatgcagagtgtataaccaaggtaaatgtcaacgattctctccttatataaataccttctgggatggaaagttcatgttttataaaccctaagtcagaatctaaaactttggttgtcagaaagttctgcctcatgtgctgcattctctgattacatattcagcttatttcctcttgttttctgttggagatggaaaactacctggcaccctcttcttagtaatataacttacttgaaaggccttttggtcaccaggacttttttccattctcagcctgattttccttcgattttcttacctcatgcatctgctttgtgttttattttgtttcaggcataccatgaagttccctacacaacgtcctttaccttggccaaacagttgtccttttataagatccgtaccattgccccaggcaagactcacacagctgctattgatggtaagttgatttacaactgtatcacatgccttagtagctgagcctcttttattctatcaggtattaggttttctttatatgtatatcatcccgatttcccctgaaaatctagtattatttcattaatgtattcaggtacatatttttattgataattattataaatgcataataaatacatccttttatgagaacaccacacctatgattccagacatctgttgtctctgattagcaccttttataagtattctaaggtagtactcatttttctcactacaaatacagtactggagagagaatacaatatcgagtcgctgactggatctaattggttatagtgcctagatactgtatttgtcctaggtccaggatcatgtggctagttttatatttgtatattctaacaaccggaagctaatccatgaagtctgcttggctgcatcttctctgggttccaggactcatttgtgccttgttatttctttttgcttctctctcagagcgaggccggctgctgacctttggctgcaacaagtgtgggcagctgggcgttgggaactacaagaagcgtctgggaatcaacctgttggggggaccccttggtgggaagcaagtgatcagggtctcctgcggtgatgagtttaccattgctgccactgatggtgagtctgtacatatcatttcaagctttctggacacatggctgtgtttcagttcttggctgggaaagaaatggactagttatttgtatagctgaattgtggatgtacttttttatttgtattaaattggtggccggttatatatattgagcttta

SEQ ID NO: 12725 - DNA, 2300 bp, Homo sapien
ccacgcccagctaatttttgtatttttattagagatgaggttttgccacgtaggccaggctggtctcgaactcctgacctcaggtgatctacccaccttggcctcccaaagtgctgggattacaggtgtgagccatcacgcctggctgagactactattttcttttcttctttttttttttgaggtggagtcttgctctgtcgcccaggctggaatgcagtggtatgatctcagcacactgcaacctctgcctcccaggttcaaagcgattctcctgcctcagcctcttgagtagctgggattaaaggcgtgtgccaccatgcccagttaatttttgtgtttttagtagagacagggtttcaccatgttggccaggctggtctcgaactcctgacctcaagtgatttgcccgcctcggcctcccaaagtgctgggattacaggcgtgagccattgtgctcggtcaaggctactgttgtcaacgaagagctcaagttttacaatatcaaagaaaaggtgacagttccaggtcaactaaacaagacagcaccctctcagtttgtcttagtaataggtcctacttagggtgacctgtcaaaaagttgagaaagaagcttcaattcattgctgattttgtcctttgagatggaaggctgcttgacagttacagaaattcagtagccctgtggggtcccaatctggtcattttataggagaggtgacagagtactgaggtaatatctaggacttccaaatgctcatatctttttacagctaactagacaggactggagaaggtggggtgatgcatgtgtggggtcacaatggatgtgtgtaaaacctgaaacctcaaccctcagtttctgccacagcctttccaggagaaaaggaacagctgggaatcccattgaggatggtccctagaaatgcataataatttaatttttaaaatataaataaaaactggtttggctaaaagttcccaaggaaagaaaaaaaaaaaagaaaacagaaaacccaaaacactgctaacaataaatggtatagctgatttagccaaccctccaatgggtaagcctgtgccctagggtaggtgggagagatgtgactgtgcttttcccccagctggtatcagcctctgtgagcctctcacagggccagctctggcaaggctgagagtaattagataatatgtttcatgcaacatgaccgctaaacaaaaacaactattaatatttcatctggtggtcaactgtagaaacaggagaggaaaatggctgtgttgggttaagagacagtatactgctttacagtatcttctcgagttttccagggtatttgtagctatatgtgacttttctgctgtacacgctgattttagctgtcatccctgagtaagatgtgacttcacaatgtccacagtcgctgtatccactttctcaattttctgtgatttggtcagatgacaagaccacagggtgctaaatcaggaatcctaaattgtcagtctcccaaacaggaaacacttcggaaataaataccttgatacaacagagccaaggaaagaggacatattattggagtctgtgcgacttaagataggttttagaaataagttgcttctgattttaccttttgtggtgtataataatcctcttctgaatccaaacccagtcgtcctgaaacacacataagaatgaaaatcattataatgagggcttccttcccagtgaataggttctgtaagattctcttttgccaggtgcggtggctcacacctgtaatcccagcactttgggaggccgaggcaggtggatcatgaggtcagaagttcgagcgagacaagcctggccagtgtggtgaaaccccatctctactaaaaatacaaaaaattagctgggtgtgatggtgtgtgcctgtaatcccagctactcgggaggctgaggcaggagaatcactcgaactcgggaggtggtggttgcaatgagcccagatcatgccattgcactccagcctgggtgacagagagagactctgtctcgagaaaaaaaaaaaaaaaaaaaaaaaagatttactgaattaacacttctcatttaggggctgcatgatgggtttagatgcatacaactttgaagtcaggttgtatacctgtgaagaagtggacagagacaaggctacccctaccatattcgccacagccccaagaatagacttccttgtttcgtgtcagaaccaccacatgattatctccacaggagacctgctccactggattgctgaggaagaagttcagctgcatgg

SEQ ID NO: 12726 - DNA, 2300 bp, Homo sapien
aattggttttttcccattcaactgagaaacaatttattgagcatcttttctgtttaacagagttaatcgagaataacagaattaagttaatagaattaacagatttaagccaaactaaactctggagtttatctagataaacaagaggcaatacctatcctcaaagtgccttctaattaataggaggatgtagatggaatggcctctacctgaaatgatctctctactttgtttagacttaacattttgtatattcctgcactcacacagcaagtttggcttggacagatgccactcctaaatgcctctctagaatcttgcactttaatagcccttatagaaactgttttaattgcctggtggttttctgttacatgtaagctctcttaaagtaggaacttttcacaaatcgatatgacacaatgtatttttatgtatttgagacaggttctcactctgttgcccaggctcgagtgcagtggcatgatcttggctcaccgcaacctccgcctccccagttcaagcaattcttgtgcctcagcgtcccaagtagctgggattacaggtgtgtgcacgcctggctaatttttgtatttttagtggacacggggtttcaccatgttggccaggctgaactcgaactccaggcttcaagtgatcggccctcccaaagtgctgggattacaagtgtgagccaccacgcccggctaggcacatggctttctcttagccccatcacatcctgctttttcagattgctgggttcaacttcccagctccctcttactaggtctgtcacattaagcaggttacttaggtacctctgtttctgtaaaatgggaatgttaggataatacataatacataatacataggataatacataataatgtgagataatacgtaaaaaacctttagcatagtacccagaacataacactcaataaatgttagctgttatgtctgtgatgtagaccacattctcacaacaaaacaagcttggagatgagaagttgcccaaggtcacataattgcccaaggtcacataactgatggaacacctattgttcaccgtattgctgttttcctacttgacggtagggagaacattattgcagatttcctgttcccaaacagtgtgtggcaccaagtgctcaaagaatgtttcatgatatcatatggtcaaatatctggaaaaacacatagaataaattgaatctggaaaaagagacgggggagaaggaaagtgtcaggagagttgacttaaaatatttttggagttgtgtagaagagggagggacttaggatggccctgggagaaagaactcggcccagggaccgagatgaccggaggcagacatttaggctgtctatattattattattttttttttttttgagacaaagtctcgctctgttatccaggctggagtgtagtgcgcgatctcggctcgctgcaacctcctccttccgggttcaagtgattcacctgcctcagcctctggagtagctgggattacaggtgcctgccaccacgcctggctaatttttgtattttatagagacggggtttcaccagttggtcaggctggtctcaaacgcctgacctcaggtgatccgcccgcctcggcttcctaacatgctgagattacaggcgtgagccaccttgcccggccatattatctttactatactatctctctaaaaaagaatgctgtccaacgttggaatggggaagaaggtgtacactgggaatgcttccccaatcaccctcttgtcacagacctgacgtcaagatgagactggacgacctctgggcctccaagttgtatgagtccggaccggggaggcagagaagggtcaatagacccgagaggccgtaccgtcagtgatgcccttgttcccgtgggagcccttcggttccacgcggttcccaccacgcgcccgccaaccctagcccgaggcctcactttgcaggccttccccgaaagcgggaagccttggccgctagactagccaagagggtaagcaaaggcggaggaaactcagccaggccggaaacacagagaactgtttccgggtcggggggcaggagccaccatcgagcttcgcggggttgctgggctgacggatccgcgggccggcatctgaagcgagcgggacgcagcgcggccagggcctccgggcatacgcaggctggtccccaaggcccgcggccgccgccatgtcggtgctgggcgagtacgagcgacactgcgattccatcaactcggactttgggagcgagtccgggggttgcg

SEQ ID NO: 12727 - DNA, 2300 bp, Homo sapien
cctgtacatgaatgttcacagcagctttattagggcaaaaaactgaaaacaactcttatgtcctttagtgggtgaatggttaagcaaactgtggtacatccataccatggaatactactcagcaatcaaaaggaactgcccccacttcaccacgatgcaatatatgcatgtaagaaatctgtacttataccccctaaatatataaaacatttttaaaagaaaaaaaggaagaaactattcatacatgcaacaacttggatggatttcaagggaattatgctgaatgaaaaaagatcagcctcgtaagattacattctgtatgattccattcatacaacattcttgaaatgacaaaattacagagatggaggacagaacagtggtagccacaggttggggtgagggtataagaaagggatgtggctgcggctgtaaaagggcagtgcaagggatccatgtgacagaactgttctgtctcttgtgatggtggtcacatgaatctacacatgtgataatattgcatagaattaaatacacatacacgaaaaaagttcaagcagttgagcacaaatattttaattgtctaaaatgacattttctttaagagttatctacagttcaaagctcacttttatgaggtgtcacatccatcaccattttaagagatataaaatcatgaaaagatatcaccagaagctatgtaaacatttcagctaagggtaaagagaaagttaagggtgttttcacaaggaaattgaaagagggcaatccaaatgaagtcaacatggtcacacaaaaatcttggtaaaagaactagaatggaagcccaagctgctgagcaagtgggagaagaaaagaaaacatagtccaaacagatcacacaagggaacccaggacaaatgctgactttggcattatctaggtaacccctattttttgtcataggtgactctaataatagacctattgttgcaaaaccagtcaaaatcctaccaaattaaaaagaagtccctcattgacttgttgggtgtaggtggtaccccatgtcctcccacaccaaaagagatcagttctggcaagaaagctccaacgtgccttgatggtgctgttggtaggatgccttaggccaggcacgtcccagcgatgttctgctggctgaggtacaaggtgggaggagaatatgcctcattcattactcaatcaatttcttggccttgaagaagcgtcgcaggtagaagacctgccaggtagctagtccaatgagacagaacattgaaaagatgctgaagtataggacccgagtgtttgttgactctaaaaaaaaacaaaagcattgtaaacataatgaagtgagcctcctcagctggctaaacaatggcaggggaggtgggtaaaggcaattaattaacttcactctgtccctaggtctaacagtaggatttcagataatttttctttttaagttcattatcctggctgggcatggtgtaatcccagcctgtaatcccagcactctgggaggctgaggcaggcagatcatgaagtcaggagatcgagaccatcctggctaactctgtctctattaaaaatacgaaaaattagccaggcatggtggcttgtgcctatagtcccagctacttgggaggctgaggcaggagaattgcttgaacccaggaggcggaggttgcagtgagccgagatcgcaccaccgtactccagcctgagcgacagagcgagactccatctcaaaaataagtaaataaataaaaataaaagttcattatcctatatataaatgttgaaaattacaaagattggtgctatcagtttgatgtgggtatagactaattgaggatgttgtcacctgcctatcacagtaggagtttctactctcttgaaaatctaacaaggctcatttacctttagcagcaacaacagcgaagcaagcaatttcccctccatatacccaccttggcaaaactgagaaaagggtacaccagaattgaaagtttggagactgtctcatttatgggtcacttaagaagtaagagtcgccttccccctcaccgttggtatcacgcatctcctcttctctcttcttcatgtaggcaaaatcattaacaatagattctgaaaggtcttctaggcgtcgcagctctacctctaatggtttgagcttctcaacttttgcaatctggaaaagaatggaatattttcagctctctgaaaacatcgcttcagtcaagaacataaagaaggcaacagagaagtcttttttaaagtttcaccagatttaaatt

SEQ ID NO: 12728 - DNA, 2300 bp, Homo sapien
ctctggcctgctttacagttctttaacaaatgtcatgaagtattttttctttaacagtataattatttggcctctcagaacctcggtttcctcatctgtaaaatgaacagattgtccagactatttcacagggtttttgaaaatgtcagaggagatcattatgatatgtgaaaatattttaaattgcattatctattatgtaaatgtaagatggaaatttaaaggaaacacatacacagttttttcatgggttgagatctcttgctattggtcagcagagcctcaggaatgcaagtagacaatgaattagataactgcttatactgattccctgcattggcagggaaaaggccaatgcaaattatcaggatgtactgtgtggactaccaatcttatcttagatcagtgatacaacaatccaactaaatgctcctaagtggacacctcataaaataattattgtatggcatttgtcaaaattttaaatgctttacagctcctttgtttgttcttgttttgtctgtgggatttcatttctaggaaaataactaaatggactaagtttaaaaaaaaaaaacaccaatcatgtacattactaagggcagacagtccatcttctggatatttctgaagatgctcaataaacgttaatcaaagtaggtaatgattcccaacatgggctattgtgtcttccacgtttattttctacacttgatgttagccaaaaggccaaggagcaattccattttctttctttccttctttcttttctgagacaagtctcactccgtcgcccaggctggagtgcagtggcgccatctcagctcactgcaacctccatctcccgggttcaagcaattctctgcctcagcctcctgagtggctgggattacaggcgcccgccaccaagcccagctaatttttttgtatttttagtagagacggggtttcaccatcttggccaggctggtcttgaactcctgacctcgtgatccacccgcctcagcctcccaaagtgctgggattacaggtgtgagccaccgcgcctggccgtttattttaatatattcttcagctctgaatatttgctagtatcccagtaatagtttgttaaatcaataaacgtgttgacatacatgcatagcataatgtctggcacacagtaggtactccattgaatgaatgcatgaattattaccgtgtcaatttgcttgtctatttgcaaatgttaatagttaatttgatccctaaagtgtttgtgaacttaaaacacacacatacgcactttccctgacaacgcttatctgctaaccccttaattatgttcatctgagactggaccaaaacatgttgttttattcaatttaaataccaaattcaaatttattttgaatatagcttagaacacattcaatgtttgctaaaataataataataataataataataataataataataataccatgtacattcagttagccagacaattactccagcccaaataccctgctatgggacatgaaccggatgtctgcccggcacacattcatcaggtgacccctaaaacttcttctctaaggtccacactgtctaatagccaagttgaaatctttcctcgaaattttcctctctagtgtctcagtgccccaggtgtcatcaaggtgtcaaaggcgcttgggagtgcctgcaaaccgccccatccccggagacacagcctcattccccgccctcgcgcctaggcggccggtgggcgggcccagcgaagggccttgtggctgtttcctattggggcttggttgctatggtgtcactcgcctttaaactcgtgggtacatctttcggaaattaaaggagaattacttccagggctgcccatacttgccatggccgactcagtagtcactaacttcaacaaaaataaaactgttgcaatagtattctattaaagcttctttaactgcttaaacttgcggttttgacatggtacctatcctttcttcccttttcaaaagattcgctatagagtctttctctacatgccagtctccaaaatggcgcggacggcatcagaaggtcagaggtgagtcacgtgggtccccccggttccggcgcggttgaggccttcggtggtgaacgagtctccagcaccatgtctggtttgtctggcccaccagcccggcgcggcccttttccgttagcgttgctgcttttgttcctgctcggccccagattggtccttgccatctccttccatctgcccattaactctcgcaagtgcctccgtgaggagattcaca

SEQ ID NO: 12729 - DNA, 2300 bp, Homo sapien
cctctttctttctgtaatcaaggatagaattagaagtaccgaaggccgcagaattgctttaggattcagagcagctccaaggaatctgtgtttacgtattatgtgtgtttttccgtttccctccctttttatgagtgagaaaaaaaagcgcctaaattcccaccaacataaaccaatgacatacaatgatgaaattctgttttcacctctgcctgtgacagggaatgcaaaaatagcaagtggcccagttccacgaatccccgcctcctgccctccccgctcctgccgggttggatctctaagaatggaggttagcgcacagcctcgcgcgggccgctcagcccccggacccggcggatgatgtcaggcgacgggagcggccgcggccgggccggggaggccgcggcccaggggagctgggagggagggtggcctcgccaggccgacggcgcgcccggccgcgcggcgttgcctggagacggccctggcggcgctgtgttgctgtaaacagccgcttccctgttactatctatagcaggatctcctggctcccgggcgcggcggctggaggcaggtctgcggtccggctccccgcgcgccccgaactatccgcccgccggcctcatcctgcctcgcccctctccaggtgcccaccgcgggccccgacccccgggcccgaagagtggagaagggaagaccggggctgtgcggggacatgcgtcttcgcgccctggaggtggccagcgcgctggggctgagccccggcagcgtgaccccggctgtcctacgcagcagggcaggagattggggggcgtggcacactctggagcaccttgcctccccaaagccccgtgttccaggacgtggagccgctcctggggtcccagcagtcgaggtattccgcccaggcgcagctggacactgtccttccagcccccgtcctccaccctccaagtccgcgctggaaaatcacccgctgcgggctcccgtaagcacagcttcctggcgggaccgaaccagccctcagcgcagatttgagttccccgcaggaagcacaccccgccttgtcatcccgaactgaccaccctgcccacataaccacacctcgcactccctacccctggggcccagctcagaaccgggcagacacccccttcaaatgtcttcgcacgtaggttttgcacagtgtttatctgctggtgtctcagggatttgacagtttccttaatattcccacacatggccgagaaaaataaataaataaatgcgctgtcttctttaaaaaaataaataaataaagtacccagtatcgtaaagtaggttatcgtattctcttattttggatcctccactttctgcttccaaacgcaggaacagtgctagtattgctcgagcccgagggctggaggttaggggatgaaggtctgcttccacgctttgcactgaattagggctagaattggggatgggggtaggggcgcattccttcgggagccgaggcttaagtcctcggggtcctgtactcgatgccgtttctcctatctctgagcctcagaactgtcttcagtttccgtacaagggtaaaaaggcgctctctgccccatcccccccgacctcgggaacaagggtccgcattgaaccaggtgcgaatgttctctctcattctgcgccgttcccgcctcccctcccccagccgcggcccccgcctccccccgcactgcaccctcggtgttggctgcagcccgcgagcagttcccgtcaatccctccccccttacacaggatgtccatattaggacatctgcgtcagcaggtttccacggcctttccctgtagccctggggggagccatccccgaaacccctcatcttggggggcccacgagacctctgagacaggaactgcgaaatgctcacgagattaggacacgcgccaaggcgggggcagggagctgcgagcgctggggacgcagccgggcggccgcagaagcgcccaggcccgcgcgccacccctctggcgccaccgtggttgagcccgtgacgtttacactcattcataaaacgcttgttataaaagcagtggctgcggcgcctcgtactccaaccgcatctgcagcgagcatctgagaagccaagactgagccggcggccgcggcgcagcgaacgagcagtgaccgtgctcctacccagctctgctccacagcgcccacctgtctccgcccctcggcccctcgcccggctttgcctaaccgccacgatgatgttctcgggcttcaacgcagactacgaggcgtcatcctcc

SEQ ID NO: 12730 - DNA, 2300 bp, Homo sapien
gggcacactcaccaaaggtggcttccagcagccgcgtcgggacctagaacacctctgggcctttcaggtctttgggcagtctgccttttaaataaacactatgagctggcaattctaatgttgtcagtgacaaagtacttcttcctgaaaaaatctttggttgttttaagtcctaaacagttgctgggattactattgagtttgaataatgtaatatgtacgcttcattttaaaaaattacttaaaaaacagagataacacaatgactgtgaagactgaatttgagttgcttctgttccatgtaaccatttggagttttcgtgtttaaaatttaaaattgcgaagcagtgtgatacagtgttttgccatgtttttatttgacaaatgcacattttagttaataactaaatatttttactagatttgaatattatctttaaaatagataattccttttgcttatttatttttgagagagggtctccctgtcactcaggctggagtgcagtgactgcaatcaaggctcactgcagccttgactgccctggcccaagatcttcccacctcagcctcccaagtagctgggatcacaggtgtgcaccaccatgcccagctatttttttttatttttgtagagtcggggtctccttatgttgcccaggctggtctagaactcctaggttcaagtgatcctcctgccttggcctcccaaagtgctgggattacaggcgtgggccacagcgcccggcccccttttattttaaatctaaagaagactcgagaaaaaaaacattacgtcagtagtagatttaggagatgcactactaatactacgtaagtttctcttgtgctgcctgggaataaaaataaacacttaacactaacttggggctcacaacatgcttgacactgttccaaacacacacacacacacacacacacacacacacacacacactcattttaaaagtcctcatctactcttaaaggtaggtcctgctattatccttatttttgtagataataatatagtctggggcgcagaggtctgctcaagatcatccaactggagtggcagcgctggaattagagtccaggcagtgtggcttcaatgcctgaactcttagccattagaaaggaaaaacaaagcaaaatcagtatccgcaacaaccttgcaggcacggaggccctcagaagggacaggagaggccgggcgcggtaatcccagcactttgggaggccgaggcgggcggatcacctgaggtcaggagttggagaccaacctggccaacgtggtgaaatcctgtctctactaaaaatgtaaaaaattagccgggtacggtggcgcgcgcctgtagttccagctacttgggagcctggggcgggagaatcgcttgaaccgggaggcagaggttgcagtgagcagagatcgcgccagtgcactccagcctgggcgatagagcgtgactccatctcaaaaaaaaaaaaaaaaaaaaaaaaaaaaacaaaggaaaagaaaaagaagggacaggagggcctccttccgctcctgaccagcccctgctggcccgtgggcagagggagagccggcttccagggacctcagggagggacgtttgggagtgctctctcagcgtcccctccaccgccctctctacacccttgccgcgcccctgtcctcgtcggccaggccaaggtttctcctggcccttcccagcttccggccctttgctccagggcaggtcgcagggccagacggtgccaggagctcgcgagtcctctgtttactgtttggtttccacggtgacacgtaggcgccgtcagcgactcccgtcaccgccccgcagcgcggcccccacccggcgccgtgacgccggcccgccgcttccgctctgcccatatttggctcagccactgcgccgccggcccggggtaggctgtgggcgggactcccgccgcgccccgcccccggtccctgccccgcccctggaatgctgggcgaaggctccgagccacgagacccccgcctcctgtcccgggacccacccaggcggaggcaagggcaggggcgctgggggcccagagagagggcgccgcgatggatgaatgagctgtttccagcattcctgtgcgtctgctggttgtagctgcagtcaagatttggggcggtctcgtttgttgtgggtgggtgatctgggatcacgattttctcactctgtgcccggaaatcatgccatctctcgcccaacgctgtattttataggcttcaactcaaaattttccttcatggcacagtggaa

SEQ ID NO: 12731 - DNA, 2300 bp, Homo sapien
caggccctagagaggacgcgctctaaccacacaccctaattattagtccctgaatatagatcagtttagtttatccaaagccccagctgaagacacatcaagtactattgcctctgttccatgttttgttccatataaacatccagacacaggtctcatgggagaaacatcatgaggcagtttcacagtccctggctttgatctttacgctgtagtaaaggtgtcattggcctttctggggcgaagagtcatgctcttccacaagagtatcaaattactgctcattttccaatgtatattctttcagggccttgctttcttcttacctgcccacaccaatgctgtgagggagactgctgatggcgaaggtgaaaatggtcaggcaatgtcattgggacttggtctgtctctccttccattagcccacttcttttatccagaaagatttcactgcactggggaaataaggagaataaagtctcatgcactcactcacatgagagagacatgcatgttcgggtttgctcaatggcacccatctgtctcaagtcttgttgtttctttcactctgagcatctgcactccaagaaggcatgaactttttctttcacttcctttcttctatgggtgatgacctgacatcactctcagaaggaggccgaaagtcgctgagtataaaaatcgtcactcctatctggcttaggcagaaggtagggggctcgatgggtacccaggagctctggaggtaggagatgccatctagggaaccccgttctacctgagggctctgtgtctctgcctttgtatactggagggcaccatggatgtcgccttccctctggagtccccttcaccatttcctctctagaaggatggaaggtgggagtggggttggctattgaagctggaacggggaagaaggccacttggggtctgctgagggctgggtctgctcactgctgtgtccggagtggaaaggagaagcccgctggagcagggtacaagcccaagggtcaaactgcgccagcagtagagcaagccgcggtctcaggctgcagccctagcagaggtcaggctggtgcagccagccgtctcggggcctaagggcgctggcgggggccggtgggtaggggtaggagtccccaaatgccttcatctcagcccatccttctccaccgaaaaataaagcaggctggcgagatcgcctcctcacccgctcagtcctgaagtgtccaaggatgaaactgtgcggaaattctccctgtcgctctcagtttgtgggggaagcgccgggactgaggtacatggttaacacaggctgtgcgtgaaggggcttttgacttttcccccggctccggcctctcgcgtctctctcctagggctgcggctgctgctgcctggcgggcacaagccgggcggcggtgcgcggggggtgcgcttacataaccgctcgccgcgtcctgctttctcgagcgctcctgcaccgtggggtggcggagccgggggactgcatggaacccgggacgcccccgcggggagaggagcgcgagcggccgcgggaggagggcgcccaaggcggcgggggaggttaaggtcagtgggtgtgaagcgccggctccacaccccctcctccccggtcccctccttcccttcctctccgtccccctctgacgtctggagctggcagctcggccggttccgcattcccgacccctccccgccgcccaggggccgctatatagccggggctgatgcaacccgtcccgccgcccgccacagcctgcgggagggacgctcggcggccgcgacggggggcgctggcggcggcggacgctgcagcggcggcggggctggcgccgcggcggctcccgggccgggacaggcctgggcaccgggcggagctccgcggccgggcggcagcggcgcggagcgggcacggcgcctgcagccgggccccggccccgggggcgccgcctccccccgcaccttctgcacggtgggtgcgagggcgcgcgctgggggcgccgggacgggcggggcggggcagggcgcggcgcgggcacctgggacggccgcccccgcacgggcggagcgcgaggagccccagcccagccccgcggggaggctcccgcagcccagggacctcgagctttccccgcgccgggcgctgcagccgggcccctcccgcgaggcgcccggcagcctgaggcttccttttggttcccgccccgggacgggaggctccgtccgctccctggacagccggggtgctccctccttctccctcccgcgctctcctc

SEQ ID NO: 12732 - DNA, 2300 bp, Homo sapien
aagggtttggataagggtctccccactcatccactgcctaacttttgcagctaccagggaatgctcctcctgactccctgggtttgttgtcatctccctacctgtttgtaggatgtgtgggcatttttttccaacctgcagaatccctggcaggaataggctctctgggccttgtttgtcgtggggctactggtgttgcaatgggctgtctctctcgagtgtctgtttccagctccactctggaaagaaaggggccaacgccgactctaggccggcctgctctgtattcattcagctccagctcaacttgagcaatcagagccagggttgagggcaagctacattcttttctgcctttctgctgcaggatgcagtttgctttttttccatgcgaatgaattatgtttgaaaccgaaatgggaggaagagaaaaatggagtgagtgtatatgggtatgtgtgtgtgcatacctatataggcaggggagggcagcaggcacattatttttccattttcctttaattaaggctctgtggaggtgtgtttgaaaacagagggtctcctatgcctttgaggagggtgagaacactgttttggctgcgtcccgggccatatgcagcgtatggtggccaatgaaaccgggcctggctcattctgttgcttgtcttggcagtcggttccgtggcttgtattaccagctctggaacttaggggctgccaagctccatgtgcctgtgtatgtgtgtgtgcgtgtgcatgtgtgtgcacatgcgttcttgtgtgtgtgtgtggtttggcctctcggaactcagcagagacaaatgccttagcgacccagtcttggaattttcagactgtgtttctttacttattgctggctgtgggaggcctggccagagcccaccattcttagttgttgttgttttttagtctgttttcttgctgcagcccacgggatttagttgcagagctccatttgcaaagcttcagctggccagtggcattttttaaaaaaaagaccagggcgattatcacaccttgtgtgtgtgtctgtattaggtgtggtagtgttaacccctgccagccaccaaggaccagagctggcgtgaagtagaagggaaaatagaaagcttgtccaatggttgtacgctcccagcttcctcttgctgcctgggttaaagattcctggcagagataacttcatatgtatttattgagcgcctacattaggcagaggacaaagcgatgttataggcaaggccttggaagcatttctctggtctccagggaagagcaggagttccctgggggttggttccaggttcttctatggctgggatggctgtgcagggatcacggctgccagtgttcagtggcttctcttgaacccagctaccgctccttgtcttcttatgaagcagtgcagggatggagtagagggcacaggagatgctggctgtctgccttggggcagaaatggaaacctagttcttgatggcaccttgttgccagtgtctgtgcagctgtgttctggcctgcagggtggaggagaccttagaggaaaccgaggccgagggcaggtgctgggccccatttctgcaccttctacccagccctgacctggcaccctttgtttctgttctgcagtcaactgccaggatgcaagatggtcctgcccccttggggtttagagctggaaagtgggagagcggagaatcctctggggagaatcctcttcatggctgcaggaaacagagactagtccagaagggaccttgaggggtcatctggcactagtgcccctccaggaaggaaggccctggtggccacactgacttcactcttactatgtgcaggcactgttccaggtactttccaagtattaactaatttaatcctcttgacagccatacagggcaaataacattgttattctttacagctgaggaaagagaggcacagagaggttagggaacttgcccaagggcacacagctagtaagaagggacagagctaggattcacactcaggtgatctggctccaaaaccgccactcttaacccccccttcctcttggcctgcagagctggggacagccatctgaagagggccttttgctgctcgccttcactctcagtcttggggccttccccatcatcttgcttctcgccttctggatctcctcgacttttggaagccgcgtgacctacgtcattcagattccaagagagaggtcatcctgggtgattccttagctccaagaagaggcttggtggttgattctccaagattcatggtag

SEQ ID NO: 12733 - DNA, 2300 bp, Homo sapien
gcctgggttccatggggcttcgaatgcttctgctcctactcttggaatcctgccactatcaaataaacatgctccgaccagcctgttggtggatgagagaccatgtggaggagaaatgcccaaggcaaagccaggccagaccagtcaattatcagccaacctaccagctgtctgaggacacatgaccgagcctagccgagatcagcctagcccagcctatccccaaagaacctttcagatgacccacagactcatgagccaaataaatggcttgagtcatcgaagtttctggtagttttttgggcagcgaacactgatagactatctcatttagacaaaaagtcaagcttctttttactaactgtatcctcagtacttagtgcctggcacatggtagatgcaccatgaacgtttgttgaatatattaataaaggtgtaaatggttttaacattctattgagggaaacaggaaaaagataaatcagtaaacgaataaaataagtataaaattgggtaactgctatgggagaaatgaatagtagctgaggtagaggataagaatgaaggtggaaggggaaaccctccatgggctcactgtgtctttcagaatgaaagctaaaatcctgatgttggcctctaaggccctccctgaccgggccattacctcactgacctcatcgcctgccacttttgctgcctctgatatccaactacctggcccccctgctctttttccaatactcaagcacacttccacctcaggtcctggaatgtccttccctgagacactcaccattcactccctctctttcttcgaatctctgctcaggtatcccctctttgggcaaggcccttctgaccacccagaattccctaacctccaaccctgctttattttcctccataggaaaggaattttgtcttacttaatttaaccttagggcaatattgtcttagtctagaaattcagctcatggatacaaaaatcctctaggagccgtaacttcctgtcaatcctaaaatttaataaggcaaatgtttggcttcgagccatactgggaataaggtaaggccttttgaaaaagccacgatgcccaggtgagggttgaattgatcactgagaaccctacaaatgcgctcatggcaaggctgggaataccctacacttaccctctcggtcatttacttcagagtctgcggggcattctaatccgcgttgtcatttgctttgtgccacattcctaagaggtaggcagggcaggttttatcatcctctgtttacagatgaagataatgaaggtcacatagctcaagtgagctacccagggccacagacatacaaagtggtagaaccagaatttaaatcttggttggtctgactccaagtgtagtatttgtttcactttttctttctttctttctttcttttttttttttaactgtttctgcattctgggttctgaccaggtgaccttgaatcataaagattcagggcctgtcttgagctgctcaatatggaaggcatcttttctctaaagagtgtgagctccctgccaagcagcacaggcgcttaataggctttcagagcagcaattctagaacctcccttgtggctttctgatctcccacagcccttgtgtttgatggtcaggaaaggagaatacccttggatcgtcttatctccagaccaccccgaggctggctggacttaaggggtgaggaaagacaagatgggtgagcagctgctttcggctgaaaaccagaaagaaatcccagtgtttttgctttattttggtttaaaaatcaagtcgtatgacaatggaaacattttcctggttgtcctctcctctctgcccatgttgacagaagacggacttgctaattctggctggggtttttccctgcctgggctgtttttctcttttatcttcatcaattgaagagggctgctgtgtctttcaaactgtcggaaggtatctgtatttttttttctttcacataattctgtaggtcttttcccagatatgtatttttctctctaacttctaactcgctgaagtttccgcccatgtgacttccagcgtgagttaccagaaaccacaagagagagagagagcgtgcaagccccaaagcgagcgacatgtccctttggggagcagtccctctgcaccccagagtgaggaggacgcaggggtcagaggtggctacagggcaggcagaggaggcacctgtagggggtggtgggctggtggcccaggagaagtcaggaagggagcccagctggtgacaagagagcccag

SEQ ID NO: 12734 - DNA, 2300 bp, Homo sapien
cccgcctctccaggcctcagtttccttatctgtaaaatgaagttaagaatatattatgaagagttttggaagaggcccatgatgaccgagggaaaagaagcagtgagaggtctcagaaggccttctaaaagaacagagttctgtgctccctggagaatgatgggaaacacaggaggaatagtgacaatacgagatgttaaattactgtagaaattcttagatctgagtctgaactccctctccaaatattccattataatccaagactctatagtttctaccaaaaagtaggtgccttcaagcagggagtgatcatttgaatctagttctctcctgggaatcagtggttctaacttggctgcacgtttggatgaccagcggagcttgtgacatgcagatgttcaggtccaccctcggagatcgctaaatggggtgttgcccgaacacttgggatattaagagtttcttcatatgattctaatgtgcagacaaaatggagagccacttcccagagcttcaagttattcattttctggtctgaagtttaacaaagaaaaaaaaaataaagaagcagtgatgcccagtagctctcaaaatttaatgtgtaaacaaatgaatctcctgggcatcttgttaaaatgcagctttcaattcagtgggtctaggttgggcctgacaaccttcttggttgttttgtggttgccgttttgttttttaaggccttaacactggaggggattctggccttctaaaaagctcccacaggtgcccacgctgctaaccacagactgtgcttgaatagctaggctacagcttgaatgattacagacttgaacgagaattatggctcttcttgccagctgggaccttcagaaagaagttacttcacttctctgagtctgggttttcttgtctataaaatttaggccagcaatagtaactttatcacagaattcttgtgatgcataaatgagctaatgcattcaatttgtttagcactgtacaacaaatgttagctttttgctaggatagccagcattcgcggaatgcttactatgtggcaggaattttctaagtgcattcgtgtattaattcattcaagtctcagaacaacacggtgaggtaggtactattatttcatcatttccattttacagatgaagaaactgaagcgcagagaggtggagttccttggtctacagtggcacctcattgtagctaagctggtgtttgaactcagggagaatttgggctccttaccaggatccctcgccaaggacagaggtcagtgcaacgagtcgagggtttgccctttgaaatgggctaggaccggcaggtggcagactagggctgcttgagttcaaagaccgcttccaagaccaagcccggagccagctctgtgctaagcgttccatcacacaaccgcggacagcttcttcggcttcttcaaactctcctttccctcccccgcaccctagggtcttcgcccagaatccatcaggaaaaatagccccacataacaggttcaaatctaacctccccaagacaaaaccacgtccgcagggaaagaagcgagtaaagcgagttttctgtaactcccctttaacccaggagcgcaaccagcccgggaaatctacaaatctctctttagttcagcaaagggctgggagcctaagccaagggggagaaagttggggaatccctcttgaattccccagaacacttaggtggcgccgggctttggtgcacgcgcgcagggcatgcggacaggcaccggagaggctctattttgggcattacttcgggaaggcggatcttcttgcagggtccgctgatagcgggtggcaaatgaatatgaggggcagtgcaaagggtgggggttaaccgggcggtttccatggcgcccggggcgtgggggaggaatgcatcccgcaagctgtggcgaaacaactgctctgcccggaggaccgggctcgagaaggcaagagacactgggtcgggggtggagtggtggcgggggggttgggggcggaagaagccaggcaggacgggggcggggcggtcacgtgtgcccgactgggcgaggccccaagctggcccgggagaggactctgcgggcgaagtggctgcgcaaggagagaacttttcctgcacaaggaacgcctcgtggggagacccaaggcaggagcggtccggagccggctgcggcgtgtgcggccggccttgggacagcgatcgccgcgggtggcaacagagagccccaagcaaaagtgggagcaggagcttggaggtgagcacag

SEQ ID NO: 12735 - DNA, 2300 bp, Homo sapien
aaaatacctcttggtctgggtagacactttcactggatgggtagaggcctttcccacagggtctgagaaggccactgcggtcatttcttcccttctgtcagacataattcctcagtttggccttcccacctctatacagtccaataacggaccagcctttactagtggaatcacccaagcagtttctcaggctcttggtattcagtaaaaccttcataccccttaccgtcctcaatcttcaagaaaggtagaatggactaacggtcttttaaaaacacacctcaccaagctcagcttcaaacttaaaaaagaggactctgtcaagaatagagcccaaaaactcaccaaacaaacaagtaattatgctaaatccccttggacccctttggacactctctaattagatgtcctaggtcctcccaattcttagtcctttaatacctgtttttctccttctctttttcagaccttgtgtcttccgtttagtttctcaattcatacaaaaccgcatccaggccatcaccaatcattctatacgaccaatgtttcttctaacaaccccacagtatcaccccttaccccaaaaccgttcttcagctgagtctctcccactgtaggttcccacgctgcccctaatcccgctcgaagcagtcctgagaaacatctcccattatctctccataccacccccaaaatttttcgctgctccaacacttcactattttgttttgcttttcttattaatataagaagacaggaatgtcaggcctctgagcccaagctaagccatcctatcccctgtgacctgcatgcttcaggcaatccagattgcctgaagcaactgaagatccacaaaaaaagtgaaaatagccttaactgatttcattccaccattgtgatttgtttcgccccaccctaattgatcaatgtactttgtaatttcccccacccttaagaaggctctttgtaattctccccacccttgagaatgtactttgagatccaccctgtctgaaaaacattgctcctaactccaccacctatcccaaaacctataagaactgatgataatccaccaccctttgctgactcctttttcagactcagcctgcttacacccaggtgaaataaacagccttgttgctcacacaaagcctgtttggtggtctcttcacatggacgtgtgagacaggattaccaatcctttgttaaacacacagccaggactgtacgtgcttggaaagatgcgagactgggaggcagtggtctggctaaaggacgtttgctttaaatattcccataaatatttgcttcgagtatttggagacggcattcaggttcacaacctgcccagctttctggatcataaccacattgagatgcaaagaatttgagcttctccttccaataagaaagaaagagaaaaagattaagacatgaactaccctttctaggccatggaaactcagagtgagatttctactccatcctgctggacttggctctaaatcccaggcaaggagtttggcacaaagcactgctcccactgtcctggcttcagctgtgtgtaaaacaaggtaaaagcagtgccaaacaccaccaggcatggctttgcaattctatgcagtagaggagatactgcactctaggaaagctggttggtccaactgaaagcactgccaagttctgatgacaccagaatagtctgatgcccaggggctgctgccagacagaagagcattcctgaaattacaggtctaagttggtggactgacacaggttcgagaacgacacagcgaaggtatagtatgttctagaagcatgcttttggctggggcaagagcaactgtggatgaaagagcaggtccccctgcttttgtttcccgcctctcttacagcatcacaatcactgcctgtcacacccagttactgtcacccagagtcacaaacactgttggacaatcagcaaattatagcctaccacacccaatagttaggtgcaatctaacacacgcccctgggaacattcacaaactgttctacctacctgattgccaaagacagccacggagcaggctgttgaaacctcattagccccgaaccagacggaagcgatgcgggagggcatgcccaggatgaaaacctgggccacagagcagatgagctggcccaccacggtgaccggaaagagatgcggcttcaggctgcccagcttcacccaggcccccaggcagttgagagccgagccagtgagagcaatggtgcgcaggccgaacttctccagcagccaagccactggc

SEQ ID NO: 12736 - DNA, 2300 bp, Homo sapien
tgcaaatgggaccctgggagattctacttaacttccagacctccaactccaaagtgcttagaaggccatatatgagctggagtgggcccagcttcccagctatgaagaaggttgcatttgcccctctgcttgtggctggtttctaccttcaattaaagtcttgaagatgagcagtaggaagcctgactctgacaaaccagtatgaccaaggatcagctaaagctccaaggacacaaaagaggcctctgttctgcagaagcctgcctgcctgggcctttctccaggctcttagcctgggatgcactggccagagaagccaggagatctgctttctcacctccactctgctagaactctgggtgaccctcaacaagtcacagagctcaattaacctcacttggcctttgttttctcctgtaattattgggtttgtaattataataaacgattacagatgaactttcaaactgtaatattctatcattttaacccacaaatatggccagttgtgttatctgttgtatttttgttttaacatttttcctgctaacagattattaagctccttgaaggcagaaactctgtcttatacctcttggtactttctaaaatatctagcagagtacgttttaaagatgcatttggttaattgattacatactggtataaagaactctacacagcaactatgagtgaccacttttgtgaatattccagaactgagaaccactagtaaacatcttgaatggctgtaattgacagaaggaaaaacgaatcaagggggtcagcagattggcagttgatggatgatgtgaaagtgaggagcgaaagcaaattgtttctttacctgtagctctttcaagtacaacaaaggaaaaatgagaccttacgacaaaggaattactcatcttccttcactcttggaatctgaagcttgcctgagttcacaagctattttcccatttccgcctcaatattatgtgcagcagaagggcttttgggaattgtatcacagccagtcagtactgaagccaagcctttctgacctcggaaacacccaagtcatgttatctgtcggtcactggagtttggactccaacccagataagaaatggtttagcactttgggaggccaagacgggtggatcacgaggtcaagagatggagaccatcctggccgacatggtgaaacccgtctctactaaaaatacaaaaattagccaggtgtggcgcacgcctgtagttccagttgctcaggaggctgaggcaggagaattgcttgaacccaggaggcggaggctgcagtgagccgagattgcgccactgcactccagccaggcgacacagcgagactccatttaaaaaaaaaaaaagaaaaagaaaaaaaaaagaaatggtttaatttgttgggggtgtgtgtgtgtttatagccattttttacgtgcctatctcctatgtgtataaatttatgcagttatgtgtgacttcacactacagatgctttagaagttactacgttattcacacaataaactgaagcttccatgcttgtaaatgtggtaacagctttagccttccaactcttactgaatgcaagttcttgggcttgcagggtatagaatttctccccagctgggctctcagctctgggttaacagattcagtgaaactaaaaatttgagtagcacaagaaaataatgatcaatgttattttagtctactccagatatgggagtagaggaaccatttttcatcaatttgcagctagagaagagccagcccgcactgagaccatcaactacatgttcttataataggcattgatagtgagggtggtcagaaggatgtatgagccaaaatgtcagtcagaagaaagatttctctggtgttttgaggtgagaaataatccctgcatgggtgttaggaaggattggaagttggaaattagatttcttattaggaatctctttacatttgtgttgtcacctcttggccattggtaactgtgattgggttgtctctgtcttctatagcttggaattgcgattgggttcttggtccctcctgttttggtacccaacattgaagaccgggacgagcttgcctaccacatcagcatcatgttctatataataggaggtgtggccactctcctcctcatccttgtcatcattggtaaggtcattagtaaacagatggggtagcagggggcgaaggggcagggagattctgctgactttgatgggacccttgtgaacatgccctgaaataccatggatatttacagaaactggagtctg

SEQ ID NO: 12737 - DNA, 2300 bp, Homo sapien
ggcagagctgagataagaatcatggtctgctggactgctgcagtgctacctcattgtttgagactattttaatgaagttcccattttttgagaaagaaaagcataccatatccacttttgtcttcaagttgtatggaaaatacaattagattacatactttttgttttttaatttattatttatttatttatttttttgagacagggtcttgctctgtcacacaggctggaatgcagtggcatagtcatggctcattgcagccttgaaatcaaaggcttaagtgatcctcctacctcaacctctccacttgggctcaactgatccactcaccttggcctcgcctcccaaatgctgggattacaggtgtgagctacagcacccagcctttttttttttttttttaaggcttagttcaactcttgttgagtagtaatttcagttagtctgatttaaataaaaccaaaatagataaataatctaataatggaatgactttttcccatcctcattattattttcttggtccacggtttatctgttgtcaggttaacctcttgggcctgaagtggtaataaactaacaggctttctttgtcactttggcaatacaagtttcggtattgttctctgctacccagtgggacagatattaaagtcagcaatggcccaagacagtgtgaaacaccgccgcccccccccgccaactccccgccccaaacaagcaataaagagatctagagaaggaagggtgaattgatgagcccttcagggagagctggatcacaaaggtggtctctgtcgaagatcagagagactgagggtctactggacatcacaggccattatcatttgggccaagatccacccatcctctttattttctcactctctctcaagaggagactcctccggggtttagaaaagctgcatggatgcacctctccacttttctgcacaagtatgccttccatttcacagaagtgttatctgttagaaatcccaacagatagctgatgaggacagagcctgagcacttctgaattgctctgccaatttctcaacctaatttccctaaagcttaagggcctcttagagtgtatacaacatctatttccaaattttgtcctggccctggcccagcccagccaagcccagcccagcataggtgtgctgttaaaacttaatcaggagaaagggattcttatcctggccctaccacttagtagctgtgtgaccctgggtaagtcatttacacttttcagtctcggtttcctcatctgcaaaatggagatagaaatatcaacccgaagggctattgtaagaattatatgacaaaaagtgaaggctctttgtacagtgctaggctcatagtggctgctcattcgctcatccattccttcgttccttgaattcaccaagccttctccatcttcctagctcccccttgtcatcgcctctcgaaaccttttccccccaaaaggttgccttccagttatcttccttccatcccacctccatttttccagactctccggatcctctcaatcagaagcaacacagacacctacatccctcttctcccccatattctccttacctggcgaccgggcccccagcacagcagtggcagcagcagccgctgccgcaaacaagctcccccaggacagctccagcccggagtccacctgagccatttgtccccgccccctccctcagccctgctccaggattgggccgtttccgtcagtactctctctgattggctgtcccggtttcgcccgagcaggagatggggagtgaacccctttactgccaatcagcggttgccgctgcctaagcctctccccaggtacgccgctcacgccgtaagccctcctgttggacctagcggaactccgggtttggagtcaacctcttaggggcggagaaaaaaacagcggaaaaaaaaaaaaaaaagaagactcccttcagctgagggcagggctctgcgcccgcgctgcgcggcggtgacgacattcgcccgcgtccgcagctgagcgttatgagcgcctgcgcagtggctccgagcgggcggttgcttgttggttgttgtagtaaccggggaagcagccgtcggcggctgccctgagccttcctggggaaggaggagggaggtaggcgcagagcgcggtccacgcctgctcgccccgaaccatgggaagatgagacaggtaaacgcctgcgcccgcgcgcttccctaccctagggaggagcattcccgggtccgggctggcgcctgcagcaggacttcccgctcagag

SEQ ID NO: 12738 - DNA, 2300 bp, Homo sapien
gtatataagagtatataagtgaaagagtacaaagcacaggttgaaagcaggcttgctattacttactcttgacttatgacctcctcatcctctgaggatgatgctgtttcctccaggtcccgggccatcacgattggcatttcctttagggtttgtcatgcagtcagcagacgggggcctcagagacctttcctagcagattcactggatcaagcaatttggatggcacagattcctgcaagaaatcaacttgattggatcaattgacctgaaacacaatgcagttgtctatttattggttattgctgataatctaagtaatgaaaatgactatattcctaaacagtgctcaacctctagaagtttactttccataacatatggaatgtgcctcaatatgtgcctcaatatgccacaaaaatcaagatttttttcaaacatacagtctgtgctctatatatttgaagagctgttactaagtttgagtttctcattatttactaaatcgaatatgcaccaaaaggatagactcctcactttcactcagtttgaggcaggtgactgattccctaaaacatatattccttgctagacaaacctggcctgggttaaaaataaataaataaaaactcaaggtttaagacccttgcaggccgggcagggtggctcacgcctgtaatcccagtactttgggaggccaaggcgggcggatcacctgaggtcgggagttcgagaccagcctgactaacatggagaaaccccgtctttactaaaaaaaaaaaaaaaaaatacaaaaaattagccgggtgtgctggctcatgcctgtaatcccagctactcgggaggctgagggaggagaatcgcttgaacccgggaggcggaggttgcggtgagccaagatcgcgccattgcactccagcctgggcaacaagagtgaactccgtctcaaaaaaaaaaaaacaacaaaaaacccctgccaacatttatttagactctatgacaagcacgctgacaagatgccatcatgtttccagtaaaataaattcaacaatgaaccgaaagatgaatatattctcttgaatcaaaggtccatataaataggtgggggaggggaggaatgcccttccactcttaaaaattattcttcctaaaaatcacaaagtttggtacgactctcaaatagacgatgaaattaggaaatttccaacactgcatttctaacttaaaatattttttctaaagtaaaaaagtacatgttcgttgtgtgtgtcagaagaagaaataggaactacaaataaaagaaacatgtttaaatgaccataatcccaaattactcagcgataattacttgctgtcaatccttcttaacttttccatgcattcataaatacgatgagactgtaaataagacaaaaaaaaaacagaccccgataatgatcaaagatcttcggcgcaataggcaatgtctaacaacttcaatggctttcttcaggggattctcaacgggatttcttgatctttcccaaaatgctgggaagccctttaagtttaaacaaacaaaacctccaaacgggaagggatgccaacctctcctaggctgcctgcagagcggggagaaacaggtctatcggaagaagagtagagatactcacctaaggagactcctctcccgaaaggaatctgcttctcagccccacccccagctcaccccaatcccacgtaggtccgcagatgctccccccgggaaggacgggacgaccccgcagccgcgattcaacgcggcgcgcccggaagccaacagctactcccgggctctgagcgggaagtcctgctgcaggcgccagcccggacccgggaatgctcctccctagggtagggaagcgcgcgggcgcaggcgtttacctgtctcatcttcccatggttcggggcgagcaggcgtggaccgcgctctgcgcctacctccctcctccttccccaggaaggctcagggcagccgccgacggctgcttccccggttactacaacaaccaacaagcaaccgcccgctcggagccactgcgcaggcgctcataacgctcagctgcggacgcgggcgaatgtcgtcaccgccgcgcagcgcgggcgcagagccctgccctcagctgaagggagtcttcttttttttttttttttccgctgtttttttctccgcccctaagaggttgactccaaacccggagttccgctaggtccaacaggagggcttacggcgtgagcggcgtacctggggagaggcttaggcagcggcaaccgctgattgg

SEQ ID NO: 12739 - DNA, 2300 bp, Homo sapien
agaactttggatagtttccagagttcctgtctgagactttgtagtttaggctgcctgtttttttctgtacttgctgatttagaaatatagtggaaaaattaaggttggaagagatcataggaatcacctggcttcatgcccacattttacaggtgttaaagatgaagaagcaagcaagccacaaaaaaatccttcctgctaaaaaaggtaccctatcagcaccgtttctcacaagtgggtactgtcaccaagtcaaagaacaagaacaataagcatccacatgccatttctagaaaacggggaataaactaggtatgctgttctttgctttcttcactagaaagcagttggcagcttgtcccaagtctaaagactgcctcactcctaagattgggagccttacagactgtgcattcagagtgtggatctttttatgtttttttttttttttttttttttttattgagacggagtcttgctctgttgccaggctggagtgtagtggcacgatcttggttcactgcaacctccgcctcccaggttcaactgattcttctgcctcagcctcccgagtagctgggactacaggtgcgggccaccacacccagctaatttttgtatttttagtagagacggggtttcaccatgttggccaggatggtctcgatctcttgacctcgtgatctgtctgcctcggcctcccaaagtgctgggattacaggcgtgagccaccgtgtccggcccgagtgtggatctttttaaagttggattgggaggggctgacttggccctgagatttgtggtatgacctttgttaagggatgtggttatgtgagtttttaagagtcgagtgaatcttggccaagtggattgtattgcatttaaggaattatcagtttaagttcccaaataattgaattcaaggtatccaatatatacaactttgctgaaatgcgattagggaggcaaacagtagaaagaatacagatgttaggttcaaatacctcatcccttacttaaccagctatatgaccttaggcaggttacttaacctttctgagacagttttcctgcagttcatagtatgggcagggggattaagtgagatatgagagctcttagtttaaatcctggcacatagtagggactcagttcatttaattttatttctcttcctacctccctgccctaatgagggtgaaggtttttctgatctgtgagtaaatattcatcagcctaaaattaagctgagatttcctgaggatagggaaagagaataaagtcagaggtctttttctcccctgtggttttatactggaggaaaatatatattgttccatttagcatgggcttcctttaaaatatgtgattttaattgggatacttgtattaatttagagttcctagttcagagtcttaggatgcatcatcaaattggcttgaaaatggactatagcgtgtaaaaggagtatgtaaattattgtgaactcatcagttaggattctttatgtgtgcaaaggattacaacataatccaaatggtcctaagtaataaagagaatactttcactcatattcaggcatatcttgattctgaaaatcccactttatctcttcagtcaacctcctgctgactttctccttcaccaacagctacaggctcttctttcaaggtcacaaaatggttgttgcccttccagacttctcattctcatcctataccatcaagaggaagacaggctatcatctgtagccattatagaagagaaagaaaccattgctttctcacagagtccagaacatgtctccttaaacttatgggctccaattggtttatgtgcctatctctgaaccactaattatactggatgatgaagtatcttgattggctgaaaccaatcaaggcccatccctgaaccagggatagagttaattttaaacacacagctaagaatgggagatgtgatttcccacaggatatttgggatttgtattccagaaggaaggggaaacttgctaagcaacaaaccatagtaatctgcatcagcagttagttcaggttttgagctgtaaattaatgaaggcttttttgtcgttatagggatcatccatgcatcatgtggactggaggctgcaggagaattccagttttggtattccatgccgacgctattcttacaaaggacaacaatattagagtaattggaggtgcgtataacctctcccacagaggacggagctgggcatggcccagacgtccttgtcttaaagaagttgatatgacatatatatagggaaagg

SEQ ID NO: 12740 - DNA, 2300 bp, Homo sapien
gttggcagggagggattggggaagggaaattcagagaaggcctacagcagtgttggtgttggttgtgcttgtttcattcctttccccgcctcttttttttttttttttttacgcccataagcacagcagaatcgtgcttgttaactattctagagtcaggtcgctttctatgtaggatttaggaacatcaatagacactgcatgataaaaacagtggaattttatagcattgttttcttattcctagaacttgattaatttctcttgaacttgaaagattcttgaaagattctctgcttctacttccacttgctacttacactcagtgagtttctaggcctgggagttaatgagattgagtcttctagatctttgtgtagttgtgacatggaaaatgatcttgtgtattgtgttgtgttgtatttctagaactctatggctttgacgtgctcatagattctactctgaagccatggttgttggaagtgaatctctctccttctttggcctggtaagtcagttccatcaactaaaaaaggacaaatcttcaagtagtacttaaagcacttttttttttttgatcatttctcttggcactagaagactgtttttttcctagttattaggtggagataaccagactttcttaaatcagctggtttatggcataatatcaaagtgcatatgacaaccatggatctctgtcttcctagtcaatttacaattatatcattcctgtttattaggtttctaagggatgattcttgcattcagttttatccctgtagtttttttaatagtaggtcttctattaagggtaaagaaatacataaggtatttccttcattaccgaaagttttacaggttcaaatccacatacactataaaggtataaacctggatctagggccatgtggataatatgtggtccttttaccctgtctcatgtttaaagtcatccaagtttaaagtcaaaaacttcaaacaacttaaaaatcttttttttactaacctattgtttagaagaaaagaaacatatttttcaataccagggaaaattcttattatatttgcagctacagccagaatttctgttcgctgtacacttctctaaactgagaactctagagatttatgccaaagaccacccagctgctgagtttttaaggatgagagatattggcaaaatgccaaggaatcaaataaagacagattgactacttttggagtgggagtttggcttaacctccatagtaaggtgtagagctagatattacagatgcttcagatgttatgcaactttcgtcaagtcagccttttgcaggttgcccagtaaagtatattatactatactttaaaagtgagaaatccccagaacgaggcactgagtatagcggccagagcagtttggttcatggaggaacacctcagcactgaagccaccgtggccgtcactgccgcagggaggcctcttgcttttggtcgatgttgtttttgttttcatgtgggttcccgcccatctggtgagattttggtataacttgtatttttttttttctttttttgccgtatttgcaagcctgcaagcctaagaaatttgttttagagcagacaataaagactttaaaaagtaccagtgtggccagagttgcttctcttgcgtgtgaatgtgacttgactgttgcagcagcaaaaagtaatttgaatggtggtggacatactcataaaagagcatactgaaaatctgaacctctaaaatccacagttttaatgaagtggtattcttgacttgtgcaaattttgaattgcacaagaccttctggtataaagaaaattgcatgttagagaatcaatggatggtgctgcgtttgcattacagaggacgaatttaacaccaggatttcatttctcatatttttgcccaggatttttcccccaccgcccccgtggattttatgggctttatgtgttgctcttcattgacatttggaaactttgctatattgggacccatcagagggcggctattctgttaacctacacacttatcaattgctcttttctttctctgttctgttagtgatgcgcctctggacctaaagattaaagccagtatgatttcagatatgttcactgttgtaggtgagtagtagtattttctgaactggactcacataaaaattaaccggagcgtccattttatcagactccataggttttgccaactggcaggtcctaagccatgctgaatggtttgtactaaaaaattatattttcagggaaatgtttatatgtttcta

SEQ ID NO: 12741 - DNA, 2300 bp, Homo sapien
cataaatgagaaaattccccatccaaggggaattatccagtggctgagttggcagatggtgggctgaagatcctgccccagtcccaagggtacccaggaatttcatcctgtccctcctactgagcatgaaggcaagagcctaggagaacccacgtggatctgccgacagcagctctgttgggaattctgactcagacggctacagaaaggaggggctggggaaattaatctcttaacttccctgtctgattttgatcagctccacctggatttctttgaagccctgggcacttgaaggagttcttattttcacagctgcagaactcaatgagaagtttgcattgagaatgatttccatcctcctgagacatcaaaaagataatttcgtaataaaacctatgggtcccccacccaccacccccacagctgccaattctgaggttagttcttcattggaaccttcagttcacacttaggcagatactgcccacctttcccacaggggaatcatcacacaggtttgtacttacagagagcccatgagtctcttcagagttcatggcttcaaaccaggcaacaaaggactccaaattggagcagttggcggtgtagattgatgagaaaactgagtcacacatgtggtcttggattcattcagcaaacatctgagagcccttgtgcaccaggtacccaggctgcattctgggtcgcagagtgggttggagtccacaagggccgctggggacccaggtctcatacccttgtgctattgctcatatagtctgcagcacctagctaggcagggccaggcctcccctagtaggctggggagggagcctctcagcatcatggctcaggaaaggtgggacactgggaaacaaccatcttgcatgttggtgaatgtgtgggcatcttccttggtggtctctgttgccccctctttacccctccttgtctctaacaagagtttgggatctggcatcaagctgtcagtgcttgaatcctggcactactatccactggttggatatcttgggcaagctgtttaatctccctaagcctcagtgttcttatctgtacaatgggggataatagttcttgctctatgggattattatagagatagaataagttagtgattgttgtcatcatctctaagtcctctatctggatacagcctgttggccaagccaggccaccctcttgtgcttacatcctggaccctcactctccccaacacagctgtctgcaccttgactttctaactcacagaatcatggaactcactcactccaggtctcttccagcctgccttgaaccagcttgaccaggaggtacactgtgttgttaggtagcccatttcagctactttggctcctccttccagctgccttaacccagggagagggcaatcctcatacctccctctccattcacttctcctccagctgggtctcagctgccttgttttattggtctgccttccctcactgagcgaacctgctggaacagagatcttcaagctcagcaggcgcagtgtgcctcagaggttgccctgacttagggtagagcagatctggttaggctctggagtttatggaagaaaggagctgggttttaaccagtaggactgggatgtccaagccaacctaatgttgatgggaatctccagtcttgtaggcttgtatccttctgtctatgagaaggttgctgggccaggttggactttttggggtttgccctgatggcacaatttcaggaagactccaggttgtctccaaggccagatgctcacacacatggtgtgtggcctcagggagcagcaaatcaatcaactcatcgagaggctgaccctgaatccagagaggtccatcccccatgacctctcctacacctggccacaactggctgctatcccaggatcaacagagcttcccaaattaagtcttacccaccagaattgacatgataccagatcctacctggttttctgtgtaaaactacttgtctcagtgcagacttttcattttctttctttttccttcacttcactcaacctcatttactgagttcctgcttccttgattttggttgccaaaacatgtgatcccacaactactaggcgaatgggctggagttgcccttcacgcaccagaatgtcaggcaccaaaccctggcacctccaggcttcatcatgctcactgtctccgtgctcaagtcatctggaccctcagccatagttctctatcatctcctctgtgctgttttctaagttcacaactgtcttcccaagctgttca

SEQ ID NO: 12742 - DNA, 2300 bp, Homo sapien
tctgtaaaaaaaaaaacaaaaaactctatgcctcagtttcctcatccgtaaagtgacccaccgctgtgctgggatacagagaacagccccttcagttagtggcctggaagccagacctctcagaaagggtccaggaaggctggagtgagatggggtgggagcggcactcactctcaggaaagttcagttcagaggcaagccctgtgttgcggggtgcggggagccacgtgccctaccctcccttggctgctcgtgggaaaaggcctagaggttcgggccgagaagaggagcgaaagcacagagccgacttcccctcacccatctgggaaatgggctcgggccaactgctgacttcgcgctcgctggcgcagctccctgcggagacctcggcggggagggaggctgaacatctggatgacatttctgcgagagcggctccggagcggcggtcggggagggagaggtgcgctcgtgcgcacgtcgggccgggagggaggcgattcctcggggcctgggtcttgtttttctcgctctctaccgcagccccttctcccgcccctcagcccccaccccgcagcccccagcccccgagcctccccggctcccgaccagccgagctccttcactggcggcctcgcctcgccagagggcaccctcgatcttccggaaaacgccaccatttttcactgcccctggagcgtctccaggcttctgcccgcctcccgactccgatcttgtcaatgaagaatcgggccaggatcgccgcggagcggacgccgaccctccgacccggctcgcaggctgggagtcccctctgcgaggctggcatggccgcccctaccgggtcccgcgccctctgcggaccctgccccgggttgggcctggcccgcgggcggccccgggaccgggggaccaggagggagagtagacgcgggccgcggacggcgcggactgacagctggcgagagggcgccggggctgggggaaagggagggagggggctcatcggagtaactttccagaaaaacagccaacgtgtggcaggagtgattccaagaggggaaaaaaagttcagctaccacgtcgaacgagaggactcgcaaagtatttttcaaaagggctcggcttttcctgtgcctgtttaaaacattaacatcgtgcagcaaaagaggctgcgtgcgctggtccctccctcccccaccccaggccagagacgtcatgggagggaggtataaaatttcagcagagagaaatagagaaagcagtgtgtgtgcatgtgtgtgtgtgtgagagagagagggagaggagcgagagggagagggagagggagagagagaaagggagggaagcagagagtcaagtccaagggaatgagcgagagaggcagagacaggggaagaggcgtgcgagagaaggaataacagctttccggagcaggcgtgccgtgaactggcttctattttattttatttttttctcctttttattttttaaagagaagcaggggacagaagcaatggccgaggcagaagacaagccgaggtgctggtgaccctgggcgtctgagtggatgattggggctgctgcgctcagaggcctgcctccctgccttccaatgcatataaccccacaccccagccaatgaagacgagaggcagcgtgaacaaagtcatttagaaagcccccgaggaagtgtaaacaaaagagaaagcatgaatggagtgcctgagagacaagtgtgtcctgtactgcccccacctttagctgggccagcaactgcccggccctgcttctccccacctactcactggtgatctttttttttttacttttttttcccttttcttttccattctcttttcttattttctttcaaggcaaggcaaggattttgattttgggacccagccatggtccttctgcttcttctttaaaatacccactttctccccatcgccaagcggcgtttggcaatatcagatatccactctatttatttttacctaaggaaaaactccagctcccttcccactcccagctgccttgccacccctcccagccctctgcttgccctccacctggcctgctgggagtcagagcccagcaaaacctgtttagacacatggacaagaatcccagcgctacaaggcacacagtccgcttcttcgtcctcagggttgccagcgcttcctggaagtcctgaagctctcgcagtgcagtgagttcatgcaccttcttgccaagcctcagtctttgggatctggggaggccgcctggttttcctccctccttctgcacgt

SEQ ID NO: 12743 - DNA, 2300 bp, Homo sapien
tgtaatcccagcatttggggaggcccatgcaggaggattacttgagctcaggaattcgagaccagccccagcaacacggcgaaacccagtctctacaaaaaaatggaaaaattagcccggcatgttggcgcaggcatctacttgggaggctgaggcaggataatcacttgagccagggaggcagagtttacagggggccaagattgcaccactgcactccagcctggacgacagagcaagaccgtgtctcaaacagacaagcaaacaaacaaatgtggtgtggcagaaaatcaagcagggaaggaggatggggtgtgcctaggttgggggatgttgcagtttcaaatagggtgataagggaaggcctttgagcagacagttgcaagataggaaggaaaattattaaagttatacttttttggactccacctctaccaaatcagtctccagagctgaggccctggcatctctgtttctttacaaacctcacacgtgattcaggtgctaagcaagttctggaagctactactgcagggtacctctctgcccagagtgaggaccatttgccttctgttttcagcaagttggggaagaagtgggggtgaaggtctggaaactgactataaggtgatggtcgtatgctgtgagcttacaagaaatggaaaaatccaaagattaatcccttcttcctcatctggtgccgaagaagaagggaacaagggattcattggagcctatatttcatctgtcttggatttttggcaatgagtgtttcttcagattaaaatctaacaaagtattctcactgagaagcaagttaacaaaggatcttagagataatctctaaagtaattacaagggaggaaactgatagcggaaagggctctgctctgactacacaggtagttttcaggagagctaagatgagaacacagctcttctgatatccaggccagtgctcttgctgtcacaggcatgctaacacacagtcctatccagtaacatgtgtgactgaactgagtgatttactggatatttaagaaatgcttgcaatgaggtttcaggggtgctactcccacttccgaatccttgcttttaacctgtgtccatccaggccttcccctcaacataatactggaatgttgtttgctttcagggctatcagcccatctcctatggatctcagccaaccagtgtcagggacctggccagtgatattgacttggagatctcatatgaagagtcaacaaagacgcaacttaaatgccccattaggctgggaatttgtggtacatctccctctgccagcctaggagaatggctggcacccagtagtatgtgctggagataaatactccagtaatgtctggtgtcagaagggcatttggctctgctgcttggcacttaggtgattttcctcaagccccttctttgtacctcagtgtgctttattgttgtgttagagatactactgctactcactttgcgggattattgggatttaatgagatattgaatatttgtacttttgaaagttattactactcagctatttgatgtgttgattcagcctctctgtaaacttcttgaaggcagagattatgtatattgcagtttccataattcatggtaaaccatttattacacctgattccctgttttctcatctgtcaaatggaaacaataccacttatcttgcttcccacacaaggttgttaatgcccctcacgttaagccaataactgtgacggccttctgtaccttgcaaagagctgtacaagtgggaggcatcagtatagcagtagtagtgctttgcacttaatatattgatatatttaaacagagctacaaatacagacagttcctaacgaccaaattattttaccgtctcgcaggagcagcgttggcgagttttaataaccggaggttgcttccagatgtcaagcaaggcagatttaagaaagattcggtagtttggaggatggcacacagaatccaggaaccatgctgcgtaccctttaaaaattggggtggaggggcggggctgttagcagggacgcgtctgggccagtcggtttccaggaagtgacgtcaggcggccgcggagatggaggatttgctcgacttggacgaggagcttcgctacagcttggctacctccgtgaggaccaattcgggggccttgggggccaggatttggcgggtggggaggagcgaccccgccggccccgacttctctgaggcgactcagggcggcaggcctcgcgccgcgccgggtgaggcccagaaggaggcagcct

SEQ ID NO: 12744 - DNA, 2300 bp, Homo sapien
tttcatgtcattaaatattcttttgcaacattaatttttaaaagttgcaagatattccacccatagatgtaccataatttagttaactaacccctgttgtagaacttctggctttttctagtttcctcatctctccctcagaaatgctgcagagatgatttacctatatttaacatttttgcgcccatttccaatttttccttagaatacaattctttggggcaaaatttcagggtccaaggtatgtgcatatttttaaataaacttttttattttaggataattttgggtttagataaaaattatgaagattgttacagtttctgtgtaattcacactttctcctattattcactttttttttttttttttgtgacggctgagtctcactctgtcgcccaggctggagtgcagtggctcgatctctgctcactgcaacctccgcctcctgggctcaggcgatgctcttgccttagcctcctgagtagggactgggactacaggcatgtgccaccacacctggctaattttttgtatttttagtagagacggggtttcaccatgttggccaggctgatctcgaaatcctgacctcaggtgatccgcccacctcaacctcccaaagtgctggaattacaggtgtgagccaccacaccaggctattcactcttacagaagtataacacatctcacaattgcaaccaatattgatacgttattattattattattattttgagacggagtttcactcttgtagaccaggctggagtgcaatggtgcgatcttggctcactgcaacctccgcctcccaggtgcaagtgattctcctgcctcagcctcccgagtagctgggattacaggcacgtgccaccatgcccatgtaatttttgtatttttagcagagacaggttttcaccctgttagccaggatggtctcaatcccccaacctcaggtgatccgcctgcctcggcctcccaaagtgctgggattacaggcgtgagccacctcacccggcccgatacattatgattaactaaagttgatactttatccagatttccttagtttttacctaatgttcttttttcaattgcagcgtcacacccaggacaccatattacattgtcatgcctccttaggctcctcttggctctgagtttcttagacttcccttgcctttgctgatcttaacaattttgaagaatactggtcatgcactctgcagaatgtccctcaattcgggtttgtctgatttttttttcttataattagactgggttatgagatttggaaggaaagtaccataaagtgccattctcatcatatatcattccacatactatcaacatgatttagcacatagtcttgatcacctggctgaattactgtttgccaggtttctcccctgtaaaatcactcattttcccctttacagatgttgtacttttgggaaggaagtcactatgcacagcccacatttaaggaggcagaagttatgctgcaggatggctgtctacataagttatttgagattcttctgtgggggatttatctcttcttcctcattcgttaatttattcaatcacttatatcggcatgggctcatgaatatttcttttgtactttgagttataatccaatatcacttgttttattgctcaaggcaatttgaaatgttctgagtaactcagtgcaaaacaacctcttccaaaggttgtaccagctcacagggtagacgtcattaagatccatttcccctcaacttcacagacccattaaaaaggtcagaaagcaagagataagctgacatccctgcctagcgcccaatttctggaagcccctaaggaagatgaggccagcatgcaggggtctttccccacgtggggcacctcaacccctgagacgccctttcccggccagaccctattcaacacccctccttgtcccctgccccatctcctggcttcctgtggctccgcccaccgcggggcggaagtgggtgtggccacgggcggaagcactgggtcaggggcccaatcgtgcagccagcccctcccactcgccaccgccccacccctccggcccagaccggaaatgaggtcagagagggaagccccggcggtgagagtcggcccaaaaagcggcggccgttggaggtggctgcggcagctggtgagggggaggaatgggttgagagtgttggggtcctgggggctagtaccagaggggatcggagcgccaagccgcggctgagcggctaagggcgtcttggggctgcggcagacggccggagggt

SEQ ID NO: 12745 - DNA, 2300 bp, Homo sapien
acagggtagacgtcattaagatccatttcccctcaacttcacagacccattaaaaaggtcagaaagcaagagataagctgacatccctgcctagcgcccaatttctggaagcccctaaggaagatgaggccagcatgcaggggtctttccccacgtggggcacctcaacccctgagacgccctttcccggccagaccctattcaacacccctccttgtcccctgccccatctcctggcttcctgtggctccgcccaccgcggggcggaagtgggtgtggccacgggcggaagcactgggtcaggggcccaatcgtgcagccagcccctcccactcgccaccgccccacccctccggcccagaccggaaatgaggtcagagagggaagccccggcggtgagagtcggcccaaaaagcggcggccgttggaggtggctgcggcagctggtgagggggaggaatgggttgagagtgttggggtcctgggggctagtaccagaggggatcggagcgccaagccgcggctgagcggctaagggcgtcttggggctgcggcagacggccggagggtgagggtggtggggccttgcttttcagggcccttgtccccatccctggggatgtgggtcgggccgtctccggggccacagccccctcttcccctttcttctttctgcctctctggggcgggctgcagcctgagggcttggtgtcccgagccatggtcgccccagccctcagggacgggccggggcgtggtggagagtccttcgaaacacagtttttgtcatatatgtggccatgttgcgacccccgatcccggagggagctcagtcgccaagacttgcattttggcagtttctgccctagaagagccgatccccgcccctcgtgagcccaaatgagcagttgcctcctgcctctcccacctcctactccgcccctcacttccaccctgctcctgtctctcttcttacttgctgtccaccagctacccgttccttcctgtgcgtgactcagcctcatctctgcccgggtgcgtgcctggccgccgggtcctctcgagagtgtgcatccgcgactggagatggggagttctagggttcttttgtcactactgttggaattacaggctttgaggcaggaaaggattctgcacaggcattcgactgcaagttgtttgatgacttcgttccatgttcaagtttgtgctgttctgcctgaggtttttatttgttcttttgtttttgttttttgtatttttgttgcctgagtttttaaagcagtaattctttattagggaagtagattttgacatgctgttcccacttgtttctttattttggtcttagggacagttgtctcccaaacctcaatcatggcattttaatccacttttttttttcccattttttccccttcttttcacaggtgttgataaaccacttcttaatgcttaaaagaacttggtcttgtttaaatgtatgtgcttttggacactttgagaagcttcgtttgtatggtagttttggaagtaggtgtcactattgctcctacaggtgtggcagataagccagaggactgttttcctgtctttaagttcattggcataggcacagcatgaaaataggttttagaaagccctttgcaaagtgaaaactgaatgaatgggaatatggtcagagagtggcaccacttagaattttaagctgatcttgaaatactttgggcatagaggcaagagaaaagtgctaaaaatttaatatgtatttaattagatgctgtacaaattaaatatttccccttaagggggaattttgaagattgctcctactactgtcatttcttgaaatgtttgtctctgaagtgacccctgaagtgtgatgtttggtttgaggatgaacagaaaaataagaaattttggaaagcagtttggccagaaatcttagaaacttcaccctatccctgtcatttcagctgctattgtatcctagttttctgtgattgtgtggcactgaagcacataactaggaccaacatttattttctggagggtaggagaggggcttaaaaattgttaattattcaaaaatatatgacatactgtataaggttctatacctggtagcttccaggtggtagttggtaccagaatgggcgcaaacttagtctcttctccattctgacttcaaacctgggtcactacaatttcttggatcacgaaaactgcattcttccttaaatggtgtcactaagttgtctttctgtttctttctgccatggtcattgtcagcagtgacc

SEQ ID NO: 12746 - DNA, 2300 bp, Homo sapien
gactcagcctcatctctgcccgggtgcgtgcctggccgccgggtcctctcgagagtgtgcatccgcgactggagatggggagttctagggttcttttgtcactactgttggaattacaggctttgaggcaggaaaggattctgcacaggcattcgactgcaagttgtttgatgacttcgttccatgttcaagtttgtgctgttctgcctgaggtttttatttgttcttttgtttttgttttttgtatttttgttgcctgagtttttaaagcagtaattctttattagggaagtagattttgacatgctgttcccacttgtttctttattttggtcttagggacagttgtctcccaaacctcaatcatggcattttaatccacttttttttttcccattttttccccttcttttcacaggtgttgataaaccacttcttaatgcttaaaagaacttggtcttgtttaaatgtatgtgcttttggacactttgagaagcttcgtttgtatggtagttttggaagtaggtgtcactattgctcctacaggtgtggcagataagccagaggactgttttcctgtctttaagttcattggcataggcacagcatgaaaataggttttagaaagccctttgcaaagtgaaaactgaatgaatgggaatatggtcagagagtggcaccacttagaattttaagctgatcttgaaatactttgggcatagaggcaagagaaaagtgctaaaaatttaatatgtatttaattagatgctgtacaaattaaatatttccccttaagggggaattttgaagattgctcctactactgtcatttcttgaaatgtttgtctctgaagtgacccctgaagtgtgatgtttggtttgaggatgaacagaaaaataagaaattttggaaagcagtttggccagaaatcttagaaacttcaccctatccctgtcatttcagctgctattgtatcctagttttctgtgattgtgtggcactgaagcacataactaggaccaacatttattttctggagggtaggagaggggcttaaaaattgttaattattcaaaaatatatgacatactgtataaggttctatacctggtagcttccaggtggtagttggtaccagaatgggcgcaaacttagtctcttctccattctgacttcaaacctgggtcactacaatttcttggatcacgaaaactgcattcttccttaaatggtgtcactaagttgtctttctgtttctttctgccatggtcattgtcagcagtgaccccaggccaaagaacagtttttcattcattctcaatacctcgatgagaccatgtgctactctgtgtttccacaactctagtgtgattttgaagttgtatgtttttctgttcctgtctagtgagacagtctctaatctttctggatctcatcattaggtaattcaatgacaagtttaattggggaaaagagagaaggatctagtcccccgaatttgttttgggtcctgtcccagttgtcttctggttagtaggtttttgtgcttaagaatatgttgacttcaggcatttaacaagggacaaaacatctatttttagtgacttaaggaagtggtaggaacagaatctaagtgtagccagatgaaaggtgacttattttgtttagacaggcagaactgtggactaccatgatctgtttcatcaaattattccaaaacaacagatcctttttcaggctttctttttctttttcttttctttctttctttttttcctaaacttccttttggcagatgtggcctcatggatgagctggtacacgacttagcctcagccttggagcagacatctgagcagaataagcttggtgaactgtgggaggagatggcgctgagcccccgacagcagaggcggcagcttcggaaacgccgaggtcggaagcgtcgttctgacttcactcacctggcagagcatacctgctgctacagcgaggcctctgagtcaagtctggatgaggccactaaggactgtcgagaagtggctccggtgaccaattttagtgactctgatgacacaatggtagccaaacgacacccagctctcaatgccattgtcaagagtaagcaacattcttggcatgaatctgactcctttactgaaaatgcaccttgtcgaccactcaggcgcaggcggaaggtgaagcgagtgacatcagaggtggctgctagccttcagcagaagctgaaggtgtcagattggagctatgagagaggctgcaggttcaagtctgctaagaa

SEQ ID NO: 12747 - DNA, 2300 bp, Homo sapien
tatgtgttctacatttctctgttttgaggagaaacacaattttgtagtgtcactttattttctgcttgtgtctggacttcaaagggaattaccaccactccgttcagactgaagtcctgtctccctttgatgttgtcacctgtgttaatttattattaaatcagcatgctgcttagacttgttcccaggatttatgcaaggtatgaaaaaggaagcgttttccctactttacacattgataattagctatttagaattaactatttgagctttcagaattaattattcatgaggtatttgacttaattttctgtacaggacagagtgatcaataaaaggtgctttggatggaattttccaaaccactggctttgtattataaatctcagcctgtagcattctttgcattcctaaagaatttcttaggattttagtcaaattcttatattttcctatttataaattgaattgactcttaagcttttgctatttagagacatgaaagtgtgtgtgtgtgtgtgtgtgcacgctcatgcttgcgtgcacgcatgcatgcacccttttcaactgtgcaagttattttggggactttctgagtcaaaaaatttgtccattcaacagctgccttgttgccttgctaaccaggttttcttaggtttgtctgaggttccagttttaagactactaagggtcttaatcctcagctgggactactgattaggagtttatctggtataattttatatgttatttactttggctagttttttaaaattgtggtaaaatgtacataatataaaatttactattttaatcacttttaagtgttcaagtggccatttgatttttagaacttttattcattcatagcagttttaatcaacagctaatgaggatcgcctgtgtgccttgagccaaggttggtagatcattggaaaattatcaaagaagtgtaaataaagtttctgttctcaagatccctgttcttaatctcaaagagattaagccttcttgtttcattagagaagcaagatatatgcacaccagttaaacattgcttcatggtagatgaggccccaaatgttcaaggaacactttgtgtaaaggtgagactcattttggtctttaatcagaggcaggatctgtctagtttgagagggacaaaatcttcacatacgtaaagatttttattttacttcttaatttgcatacagtacaatacattcttggggaacagtggtgaactaaaatagcataccacgtagttcagtgttaatcccattgtctttcacagaatcgtttgcttttaaaataagctgagtattcagatgaaggaacatattgtcacataattaatatttttatttttttacctgtaaaataaaaagcataattaatatttttaaaagtcacagaaactaaacttacttaacttgtgatgtagacagtattaaaaattcagatttacatgacaggaggttgaacttcctattaaaattctatgcaaatatctgtgttcatgcagcattaaacttttcaatgtattacctcttgggagtaagtatttcattagtgagtttagagcaattgtggttatagtttttatgaaaaataattgtataaaaataagcatgtaatgcaacacatatttattgaaattaatcttgaatgtctgctacactgaaatcaggtaaaaagtttagaatgggtgtgtattgtggataaagagtgagttattattaattctgaataatgttgtcccaatgcttaatggcaaaagatggtgcccattttgtttatgtctgtaataggttaaggatttaatctgggctacatgtaatgtcttacaataagaattaaaaagttcaaaccatttttcttcttcttacatctgcagacaggcaaatgtacactggggaccaccatgttcacgtgacatcaagaggaagcggaaaccagtggccacagcatctttgtctagccccagtgcaggtgattacatgcagttatcatttattgagcatgtaccgtgtgccaggcactaaattatgtgttttgtataccttttcatgtaatgtttgtgatagtgtaggtcattttattcccactttacatgggaaaactgagactacaagaaataattagcctagttcttgctgactctgaagtctgtgctttttcactgttacatggctatctagagtttgaaaccctatattccactatcagcaatctccagtcatctgagcttttgttttagcagacaggaaattaggtccatgttaatgaaagtccaggtg

SEQ ID NO: 12748 - DNA, 2300 bp, Homo sapien
ttttttttttttgagacaagatctagctctgtcacctaggctggagtgcagtggcatgatcttggctcactgcaacctttgcctcccaggctcaagcaattctcctgctaagcctcccgagtagctgggactacaggcacacaccacagtgtgtggccaatttttgtattttctgtaaagacaaggtctcgccatgttgcccagggtggtctcaaactcctgagctcaggtgatccacctgcttcggcctcccaaaatgctgggattataggcacgagccaccacgcccggcctcgatgtttgatttttcctaaaacctggaagcatttgctggttttttttctctccacaaaacattttactagagcaaaaataaaatgcattttattccaaaaaataattgggtacaatgaagttctaccttaattgagccattaggaaataaaaacacctttgaatgtccccaatgttgaattttctgtcattcatactagggagacaggctctgtcaacatgtttctttgtttgcacttaacaacaatacaagtgtgtgtgctgctttagaattaattttccgaaagtttcccatattttgtggtttctctaaaatagttatcttttagaatagacatgaaaatggaggcataatctgtgagtttgcaaagaaactgtttattctttctgtggccattgctgaccatgggatttttgcagttaaaactatcatcagccaaagagaactttttcttctaccagtgatgagaccctagaaacaaattgcttgcattactatttgtaatcaactatgtatgctcaaattgttgccaaagccaggcatggtggctcacacctgtaatcccagcactttgggaggctaaggatggattacctgaggtcaggagttcgagaccagcctgggtaacatggcaaaaccccatccctgctaaaaaaaaaaaaaaacacaaaagttagccaggtgtggtggtgggcacctgtaatcccagctacttgggaggctgaggcaggagaattacttgaactcgggagacggaggttgcagtgaactgagatcacgccattgtactccagtctgggcgacaagagtgaaactctgtctcaaaaaaaaaaaattgtcgccaaagtcacaagaaactgaacgataatgtaatatgtgacacggacaaaaataaggtcaagtttctttgttataagaaaaaactccacaatccactgtaatggaaaatatttaatgagacaggtcattcattcagtcaacagctaattgttcaatgcctcttagctaccaggtactatcgaggtatggtattctttctctccccctgatctcccttctcctccttcattttctctttgtgcttctcctactcctctttttctcccttagaaatttggcaagggataaagctattacagtcataatgtgctcctattctcctggtagttggtaggaaaaaaaaagattttttgtttctatggagagacaaatctcactttcctcatcctccaacctgcctgctcactgcagctaccatcttgtatagggcctacaggaagaaagaatctatggtaaagagagaactttaatatatcaatcagctgtggtggtgagaatggatcttgaggctcagaaaaaagaaaaacgaatggagctttgaaatatctggaagttattccaagacccctggtagggatttcagataacgaaatggatgacgccagtggtgggagggcacccaagcatttatccactcaagatgcccccttcatattttatccttggtgtcgtggcagcagtgctaataggacatgagccttcttgccccagtaatggcccattacggcttcaggaaaagccatcatgtttccgcagcatttatctgtcagcaggagactattatgagagcacaaactcacattgtattagcgttatcagttaattatgatccttgggaccagtgccagccaatgggctagcagtctgctgaccatcactcagggatataactccacacccccaaattcaagcatgtaagaagacagcaggtccgcagagaggtgtggtcagggacatttcccctggccgggagcccatggagcactgtcctcagagatgcgcaggttaggctcactgtctaggccaggcccaccttagtcactgtggactggcaatggaagctcttcctggacacacctgccctagccctcaccctggggtggaagagaaatgagcttggcttgcaactcagaccattccacggaggcatcctccccttcctggg

SEQ ID NO: 12749 - DNA, 2300 bp, Homo sapien
caccttatggaaatcatgcttaactatctcctccactagtaggccataagtccaactagagcaaaggccatgtccctcttgttcactactgcttctccagtgcccagtacagagtcaaacacatagaagatgttctatgagtacttactctttgaatgaataccctacatctattttatttgtcatttcagaaaacacatggtattatctcatgctgcgtaacaagttagtccaaaacttagcagcttaaaacgagaatagtcacttatcctctctcaatttctgtgggacagaaagtcagacagggcacagcagggctggttgttctctgctccatgtctgggacctcaactctaagacttaaaggccgagggctggcaagacctgaagtctcggtttgccatgatctggtgattgactctggctgttggctgagagcccagcagcagctgtcagcgagaacaccctcatgtggcctcaccatgtggcttgggcttcttcacaacatggtagctggtttcttctgaggaaccaagaagaagctgtctcctttttatggcctggtcttaagagtcatacagcttcactttcatcacactttattcattagacaccagtcaccaagtacatcccacattcagggggaaaggaattagatcccatcttttgaaaagaatggtcaagagcttgcaagccaattttaaaaccagcaccacttggctaacacaagaagcaatgtatagagtgaaaaacaagtgtctgaagaagtaagacttctgttcacattctagctctgccacttactagctgtgtgagtttggggaaattaccctctgagacttggtttatacaatacagggtgatagttgttgatccctagtgatttttctacgcttggagtcttcttgccttagtgagtttaagaagatccaggctgaactaactttcttggagtcttgcaatccttcccatcactgataacccttggtttctgaccctggaggtagtaagaggttgctacgggagcacagggtacccagaaagttcagatactagggacagctttagagaacagatgtgaaaccactgaggccctggggtctctctaaggcctttaacccagcccttgtgtagtaacctcagcttgtcaagaaatgcaacgaccccacaactaaggaatctgaatctgccggctaaggccaaggaatctgcattctcccacaagactgtgattcatgctaactacaggcaggggagagggggagcatcttaaagcacacactcggccgtctcttcctaaagttcttggcttcagcctagagatagtgcctttcccaccatttacaactctatggcatgagggaggcggagggtgcgtccagtgtccaaccacgcaccacagctggttgtactttcaccttcctctaggccagcggaccctccccaagcattgcctcccacgcccacgtcgcggtcccaccctggtccgcggggtccagagcgtccaaagcccggtctaggcagatggtctaggggtgagctctgcgcaccccattcccaccagtgcaggcaatcgaataaaacagggtgacttttaacccttttcgtttccagagatagtgaccccccgtctcaatccctagatgtcctcctctaagaactgtgcgcgctgggagggactctgcgctcactcactgtgaccacctcggctgggatatggggaaactgaggcctacagagggaagggaactgctgaacgtcccaaagcaacacaggcactgaatccggtctagaatcccagtcttccaggccagtgctctcggtcctaccggctcagggcccctgcgaagaatctttttcaagaaattcccgaccgcaggaattccttctgcgctaggaatctccatggagtttgcgctccctctggcacgttgaaaacgtcctccgcagcttcgcaccggcttcgcggcgccctgacagctgggtgaggagggagcgaatgcccaccggcgtccttggggtaacttgggacagaggcaccgccgcggggggcggaggactgggcgcgaaggcgctggccctttaagggggggacggagcgcatgcgcggcgcgggccgtagtcgagcctggtgggcggctggctggcaggggacgtggtcggcggcagcggggcccaggggcggcggggctgcagcagcggcggccccagcttcgccgagcagcgatcggctggtgggcttctcgttggcgggctccgcgttggcgggctgctccccaggcaccagcgcagcgcgcgct

SEQ ID NO: 12750 - DNA, 2300 bp, Homo sapien
gcaatgtatagagtgaaaaacaagtgtctgaagaagtaagacttctgttcacattctagctctgccacttactagctgtgtgagtttggggaaattaccctctgagacttggtttatacaatacagggtgatagttgttgatccctagtgatttttctacgcttggagtcttcttgccttagtgagtttaagaagatccaggctgaactaactttcttggagtcttgcaatccttcccatcactgataacccttggtttctgaccctggaggtagtaagaggttgctacgggagcacagggtacccagaaagttcagatactagggacagctttagagaacagatgtgaaaccactgaggccctggggtctctctaaggcctttaacccagcccttgtgtagtaacctcagcttgtcaagaaatgcaacgaccccacaactaaggaatctgaatctgccggctaaggccaaggaatctgcattctcccacaagactgtgattcatgctaactacaggcaggggagagggggagcatcttaaagcacacactcggccgtctcttcctaaagttcttggcttcagcctagagatagtgcctttcccaccatttacaactctatggcatgagggaggcggagggtgcgtccagtgtccaaccacgcaccacagctggttgtactttcaccttcctctaggccagcggaccctccccaagcattgcctcccacgcccacgtcgcggtcccaccctggtccgcggggtccagagcgtccaaagcccggtctaggcagatggtctaggggtgagctctgcgcaccccattcccaccagtgcaggcaatcgaataaaacagggtgacttttaacccttttcgtttccagagatagtgaccccccgtctcaatccctagatgtcctcctctaagaactgtgcgcgctgggagggactctgcgctcactcactgtgaccacctcggctgggatatggggaaactgaggcctacagagggaagggaactgctgaacgtcccaaagcaacacaggcactgaatccggtctagaatcccagtcttccaggccagtgctctcggtcctaccggctcagggcccctgcgaagaatctttttcaagaaattcccgaccgcaggaattccttctgcgctaggaatctccatggagtttgcgctccctctggcacgttgaaaacgtcctccgcagcttcgcaccggcttcgcggcgccctgacagctgggtgaggagggagcgaatgcccaccggcgtccttggggtaacttgggacagaggcaccgccgcggggggcggaggactgggcgcgaaggcgctggccctttaagggggggacggagcgcatgcgcggcgcgggccgtagtcgagcctggtgggcggctggctggcaggggacgtggtcggcggcagcggggcccaggggcggcggggctgcagcagcggcggccccagcttcgccgagcagcgatcggctggtgggcttctcgttggcgggctccgcgttggcgggctgctccccaggcaccagcgcagcgcgcgctcgcccggcttcgtcactcgcctccagctacatccgccggccgaggctgcgcgagcctccgggcttgcggtccccgccccgcggtccttcctccaccctcagccagggcagctgcagcccgagcgaacagccacggagcatcctccgcccgcccgggccgcgccaccgcccatgctgcagccagtcccaggcagcgaccccgcggccgcagcccgccgctcagtgacctcagcctggcccctgcgcgccgcccgagccggtcccgctgagccgcgggccccgtgccctgcgatggctcggctggtgcagcgcggcgccaggtgccagccgtcctcccgctgagacgcgcccgagtggggacccgctgggcctcggggctcgcagccttcgcctccccgccgcgcccgctccctttctggggactccgccgctgtttctggggacgaggggacaggggacccagacaaagcccactttgtgcagggagttggccgcaggcggggaatgtgcgcgtcggcgcgcgccccctccccgctcccggccagctgcgagtcttggctcccggacttgtctcgtcgcgtcggagaaatcgccccccagcgccgctctcccgcccgggggtcttggttccgagctcgcgcggccgggagtcgcctcggtcttccttggggcgcgcgcagatgtgagcgtgcgagagttgtgtaggggattttgttccctccgaaactgagac

SEQ ID NO: 12751 - DNA, 2300 bp, Homo sapien
gggcccagccctcttgccaggcatgcatatgtgagatatgcatatcatgtatgtgtcctcttggggtgagacttctgcacagccatgcctgcctctgaccagtccacttttcatgttggggctgtaggcctggggcaggttcagagtctacccaagtacctatgtatgagcaggcagcagcagggcatggccccatctctccttttagcctctgtgtttcattaggcattcatcctgccaaccagggcaggcccggcgtctgggctctgggaacaaatggggcccacatcctggagtggcaaattttgggggatgcgctacctgtcccagctggccctgtgcctccaacccagagctccccacagacctggtgtaatttcacaagggccatccctttccccaggcttccctgagggaggcggaagtttgaacccttatgtggggttcattgggctagggtagtggtatgaggtttaaaactatttaaggattaggaggagaaagagtcttcaggaaactcttgtttcactggactctgcagcctgcagaactggggcaagggtaggagttccagtaggggaaggagcaggtagactcttcagctgcctcagctgggactgaagacctaagctgattctctttcctctccactcctaagaagcaattttctgttcctctccttccaccactttttactttctgctatctcccatctcccgcttcccttccatttcctttctagaaaaccctggtatttagctcaggccaaactgcctcagcagaaaggtggccttggacaaaactggtccaagaatttgaagtggcagtacttgcggattggctctgtccagcaaggcctcagctgcttgttgcgtctgctttccctcccctaacagaagggtaccctggcttattcaggggactccttagtccacactgtgtcacctgcatgccttaatctttcattgctggggtgtggccttgggagatcctgggccagcccctccacacatctccctaagtcagagtggctgctggccctggtagatttgacttgctcttgcctcactcgacctccaaagtgggactgaagacagtggtcaagagacttgagttcgggacagtaagccaggggttaaggttctttcctttttttgaaagccaaagacccagtttgcattgtgctgctgcattcatggttagaagctttccatgcctaggttctagggaatttatttttctatgtgtatatattttcaaactttgtttcctgggtactgggcatgtgcctgtctgagccccaggtctgtctacaccccaccattcattctgtctgtctgttccctggacactgcctaaaagggtctcaagacagtgccctgtgggttcctaggactagggcccatcactgttctcttctgctgggaaatgcagctttaaaatggctaaccacagcagagggcagatgcttgatagattatcttttccttgctttcttgtttctgttttgaaagtgaaatggggttttaaattgttatttaaactctttttccaaataaaggtttaccttttttccccccaatgttgttcattttattaggatcctgaagggattaggtccttgagagagggcctgaagaatgaggtgggcagaggaagagactaaggagcttttgatcttggggtggggtctcaagacatgaatctagattgagaaatgtgttgtaagatctccctctattagctgaggtaaattcccactgctgtgaggcctgggaggaacagggcttgagtgaagcctcctgccttgacactgctggggtacagctttcttctgtccttcccaagtgagagaatgattctttggactgcttttcattcttcctccatctgctccccccatgcctcctcctagtatcttctgcacttcaggagggtctgtgcaaagtgggataagatgtgtgttttcctgattaaagctatggcagctgcatgagacatgatgcgggtggcacatgcctcttgctgagcatctatttctgatctcttttgcattctggagccagggctgagcagtgggccatctgtcgctggaaaaatgtctcttccttcctaggcctacctctgttggtgcttttgtcttccaacctccctatgtagtaagaccagccaagcccacatgcccactgggagccctgaaaccagatctggttttctgtcttacctgaacaggttcccagaacccacaccaggcctctgaatcagtctctgagaatctgattgatttaaagccacttggt

SEQ ID NO: 12752 - DNA, 2300 bp, Homo sapien
agcctcacttaactggccgcagaaaaagcctctgaaagaacatagatcagttgggctgacacattgtgcccacactgtgcactgaacagcccagttgagactggatcctttagcagaggttcccaaaccgtgcattggaataagtaagtgtttaagggcctcattccagggctgctaaatcagaactctgggagtagggcctagaaatttgtattttgaaagcattttcccagtggagataagggaaccgttacccttgattaggatctgatttggaacttggacttctggataactcatggtacaaaatggaaggagggtacaaggagggttttacttaagctacatcaaaggagggggcctgacctcgggagcgcctttggtagatccaccatttgtgcactaatttctaagcagcttcccaaccttcagattgctgggcctctgtttcatctcaaagggataagtgctgttgcctgaaggcaggcagacattgccacctctagaactaagggtaagtagtgggaaggccacaatactaactctctccttcttcctcctattagcctttcagtgttatgatgtacccagctggtccaggatctggtgactccccagaaggcttccctgaacaaccaaggctccagccacaaactggaaatcgtgcaactcagacactgggtactgaaactgggtgcattgtccagtccctccttcagagcctgtttggggtagaagattgggggagggggactggggaagagagactcaaagaggtcgcaggtggcacagaagtgatggcagaactggccttcatttagtgacatatgctttgttcaaccagtcagtaaaggcttatgtggtggctagtagtgctagcgaatgcagattcggccgcttgcaaaaccaacgagcaaggtcgtggtatggtagaaggagactgactttattataaaccaaagctagcagtggggaaaaacgatccaggcttttgctttaatggagctgcttcacatttccaagcaaaatgcgaggctttaagaagttttggcatggagggtatgcaaggggtgaggcagtgcaggtcttcatgacgagttctgatgacttgtcttgagttactgcccatctggtgaatgggctggcatcatctcgggctgggctgagttataaattaactgtagccttgaatcaatctcctggtggagatttccacagatgcctatattgtttcaagatttagtctctggaacttttaagcgaacatacaattagatatgctaacagtgtgtatggggggtgctggggtgtcggggggtgcctagtggttaactgaacaaaaataaagaaatagaagtatataacaagaatataacttccaagctgggtacttggttacaataggtgcttggattgtattagagatacctcaaagtgagcaaacaaccagccagaactggtccctggccttgtggaagtttctctcttctgtctctctcctctctcccttctctctctcctctctttgtcctctctcctttctttcttgacttccttaccaatgggaaaccctgtttttctagattagggaaaagaaggcccgtttagaaagtagggaaggagacaaagtcttacttcctgaagcaaggtaggactcaatttgtgacctagaatctgagacagggaagtagaggcaggaaaacgggggaaatgggggaataactcgcttcctttctgggtcgagaagggctagaagtcaaggttcagtggagccttagagaaagtccagctcttcattttacaggtgaggaaactgaggggcggagaggctatagtgtggtaacaaggtggacacctagtcagctgcagaagtgggaataaactgtggcctttgaataacactatggggcctccagtgaggcgctcaattttaattcgggacgcctgggtggcagccgggtgctaggggtggctagttgccatgggaaccggctcctcccacttcctgcgtgcgcacccgtagacctgcgctcccaataaagttgttgttgaagcgcggcggcggcaccacgtgggccggaccgggccgggggcggggccgagctgagggaggacctgctggctgcagtgaggagcggaggcgggcgcgggcggccggccatgatcgcgtcgtgcttgtgttacctgctgctgccggccacgcgcctcttccgcgccctctcaggtaccggccaggcgtaccgacagacaggagcccggccagggctcgcctctgcggggctccgcgggcctggggcggc

SEQ ID NO: 12753 - DNA, 2300 bp, Homo sapien
acttataaaaagagtttacaggtattacatttcagggtttttaaaaaatacacatttttggccgggtgtggtggctcacacctgtaatcccagcactttgggaggccaaggctggcggattatgaggtccggagatcgacaccatcctggctaacacaatgaaaccctgtctctactaaaaatacaaaaaattagctgggcgtggtagcgcatgcctgtagtcccagctacttaggaggctgaggcaggagaatggcgtgaacccgggaggcggagcttgcagtgagctgagattgcgccactgcactccagcctgggcgacagagtgagactccatctcaaaaaaagaaaaaaaaagaattaaaaaaaattatggtccttaaacatttttattttttccagaattgactattatgcaaaaaatattgctgtcaaccattctaaagaaaatatctgatgatgtcactctcctgttcaaaaatcttcattgtctccctattgccttttaattgcattcggatctctccctgaagctgccctggccctggtggcctccccttctgctactcgtcttcacagcctgcactcctatgcggggagctgctgccttccttcatcctgacctcctggaaatgccttttccccagactctacttgtccagagcccaagcaagttccccaatatgaagaaacctcaccctcccctgaacgcccagcgcatttccccaaagacccatctcagtttccctgctgctgttggatccaggctggtggtgcctctatccagtggcttagttggagcacctacctctagattttctcactcacccttcagtacctgagaccagatggtgccgtccaagtagagcacccagagccctagaccaggacacacatgctctctgatccctctttctcccccttaatgcttccttatcctctgcaatagtgtgggccagccagatgccctgaggatcaccaggactcatgtctacctgatcatcctaggagctgatcactctccctggactgtttggtatttctttagaaggaccacatgagattgggccaccagaatggtgctgccatgccgatttagggtgactcaaattgtttatacaagcaagaactctaccaaaaatatttgcccaggaccctcaccctagggtggccctgtcaatttctattatgcattgcacatgccttaaaagggtcctgtcttaatcatgtctgcatcccttccccacagtggtgcctattttagcgcccgtacgtaatagagactcaatatgtatttctcagcatgaatgcttgaaggaacaagtaacatctcaggtatacatatttcttctgatccatggttctaatcatgttttccttgcacacatttctagatcttcctcattctgagtagcaaaaaaaaaaaaaaaaaaaaggaattttcacatcctcaaaccctccagtcactgacctgaccattgatgtcctgaaaacttatcaagaaagaacaaatgtgcctccagattctcccgaaaccaaactgcaactggacttcaactccaacacatgtgagaatggccgagtgtgggaatgctagttgaaccgtctcaaggtaggcagccccatagtttggattgaacaatgctttggctgcaacaaactgtagtgataggacatatgttcattgcgctgtgcttttgatcttcagctccaaggttaagatgctctcccacggggaaaagaaaaaaggaagaagagctgggcagaagaaaactgacttcacccgtcactgaaatacttcatacctgaagcacagctctcttgcgagaagaacatgatggcagctcttcacagtcacctaattaaggggcttgggttgggtcctgactcagagggaaatacaacaccactgagaggaaccccccacagcacctgagcactcacagccaagcctgggcttggccccagtagacatatgagaacaggtgactgccagaaccacccagagggcgggaagcctgctgttgccaggtccaccatgtgaatcacaatgactgcatgaggtcacagaatgttgaagatgaaatgaaagtggctcctgagtcacaaagtcacaggcgggtggggatcctttcaacagggctcccagcaatagagcagtcccactctcccagatgagctggagaagtagctacctctcccagacagagttggggtcaaattcatgcacatccaattcccatcaaagcctactcttcccagggcttgctgggagggaaggataactgcaggctcccctg

SEQ ID NO: 12754 - DNA, 2300 bp, Homo sapien
cgtcactgtactccagcctgggtgacagagtggactctgtctcaaaacaacaacaaaatactatagataatatccccttaataatgtagataatattaagggtgatgcaagtaaagccacctagtttactaaggtcccacggcaagtctaagtaagcgttatctcttcttatgacaagaaacaaattgaggccgggtgaggtggctcatgcctgtaatcccaacactttgggaggccaaggtgggtgcatcacttgggcccaggagtttgagaccagcctgggcaacacggcaaaaccccatccctttccaaaaatacaaaaaaattggccaggtgtaatggcacatgcctgtagtcccagctactagggaggctgaggtgggaggattacttgagcctgggaggtcaggctgctgccagccgcgagtgtgccactgcactccagcctgggcaacagaacaagatcctatctcaaaaaaacaaaaaaccgaagttgaaatctcaaacaaccctaacaacctgggagctatcattccattctcttttccatggaaaagagagattttgtgggtaactagcttaagggtggagagccagttagtgatggagaggaaatttcaatctggtgggccacacttcagaatccgaaatcccattatattgctttcccttctccagccttccctgggattatctcagttttcatgaaataaaaaaaaaaaaaaaagcaaacccaataattagaataatcaatagaaatgccccaactagagctatgaccaacatatccatcgtgccataagcaatactgatgagcagtgatcttgtaaggcagaagaaatcacggccttggccgggcgtggtggttcatgcttgtaatcccagcactttggaaggccgaggcgggaggatcacctgaggtcaggagttcaagaccagctggctaacatggtgaaaccatgtctctacaaaaatacaaaaaattagctgggcctgatggcgggtgccggtaatcacagctacttgggaggctgaggcggaagaatcgcttgaacctgcgaggcagaggttgcagtgagccgagatcgcgccattttgcactccagcctgggcgacagagcaagactccgtcttaaaaaaaaaaaaaaaaaaaaatcacggccttgttccgccttctggggcaacatggagtgagatcacagcgcctgagaaagaactttgaaaactgcggctgtgctttacaaaaatgtatcagtattattaaatgctgcctccaccttttaaaaatcaaactctagaaaaaacactcacctgtttggcctctccggcccctccccctccctgccctgaactgcagctgtgcgcagccagttgcctgttttccttaaaggcctcggggtgctcgtatcttcttcagacgttcagccaaaatttttaaagtgcggctggggggaagggtagcgcactctgaattcatttagctctatcgttgaagcccgggttcctagatcagggcacaaaaacaaatagaaaagacaatttctggaagattggaaaacagctaattttgcaggtgcttcggcatcagtggtggcgatgaatttaacatccatgccgggggggataaggttcaaccgcagatgaaatggttaataccttatacgaaattcacggcgaaaaatcctgaaacaggacatttaaattcactgccgaggcttgggggtggggtggggagcagggatcggaaacgacgctagtggttcttaaatgcgtttttacttgggaatgcccggcagggaaaggaaaggtcatcgtctgtttaatttccacccccagctctggacttccagcattagctcgccgggcctcagctgttgtacacacacggcgaggggggaggggagggcggaggcgcggaggaggggccggctgggaggaatctgggcgtcctgccgcgcatgcgccttgcctgagcaacaagtgggctccacagaggaagtgtaaaggggagggggaagaactggtgcagagcatggcggtgacgtcagcgctccgcccgggcggcatcccgcgcggccaagccggggacagcgcgagccgcagccggagcaggagcgccgagacgcgcctccggaacgtagagtaacaatcacaaccccacattccgggcgagcgtgagcacgagcgggaagggatgcgacccgggccgaggcgccgcgcgagcgccctgcagccaacgtgagcgccgccagccgcggcggcccgggcgccggccaggcctgggggcggcgggagcctgc

SEQ ID NO: 12755 - DNA, 2300 bp, Homo sapien
aaaaagagagggagggggaaggaatttatgtgcttttctacggcagctagtaaaattcctaagggagaacaaatgccaaaattgactgtcttggtgtattttagacccgatcgtcagggtgaatcatgtcagggctttgcagtggacctgcagcctgggagctgaagacagggacacgaaacatccctgtgtctgggaggtgcccttctgaaagaggcaggagatgggtatttgctctcaccaggctcctctccttcaggatttttttttttctaattcattgcaagatggagtttttttttaaaaaattggcactgataaaagccaaggatagaaaactccccataaaacacggccccccaagggaagtgcaaaacccatttgatgcaaaatatagatatcttcaccctggatttttccccctttgctttacaactctgcagacatcaggttagcaaaaggtaataaatagtccttgcacagcagggtctggactagtgaaaacagtttactgaaattaatgggcctcgtttgaaccaaaacctccactttggaattaatgccagacatagttttcctgaactctatccaaccgcctaagcggcagacaattttcattctatttgtgctggaaaataaagcccaagcccttgatctcagtgtagattttcattaaaaaaaaaaaaaaagtacagtgaatactatgccaatttccactttctgcccatagaagcccttgtgctctgggctgtgcgtgacggtcagaagttatctggtaaactttgcattgaaaagcatctccgaactccctccccatctgtggcctcacagctttcaccatgacatctgagagattcaaggaaagctccagaaacaggcttagctctcaataacaaccctcttccctacagatcttagaaaggctggatctgaacaacgctgcctgcaagacctccattcccaccctaaataaagcgccaaaccatccaaccgaaacccacccctcctcccctggtactcagggtgtctacagctctgaggctccctttatttttatttttattaatgtatttttaaggctgaaaggcacacacaccacacgcattcacacccagtggttatggggttttggcaggtacgcggagacccggtgccccagctgtcagtgtctgatcccaacccctcctcctcctccctccgttatttattaataaaagcctggtcgtgggcagccggcgttctggttttcattgtacagtctgcactggtgacacaggacatgtggaaaattttgagagcactgcggtgaatagtgtggagggggagcgtgagcagggggaggggaggggagggaggggagcgagttactttttagcttccgctaagtacttggcggctcgccaggcccggagaattgtgggaagcgaaaacctccccagtataaactgccagctttaagcagccctgacagttctgctccttccaaacttggcagccgttcaaagtgctctttcatttgaaatgctggaagcctgccatgtgcaatgcagatttgctgtgcctgtgcgcagaaggaactgataaatgccgttgcagttgccatggggacaggaggctatcagaatggccttgtgatccgcagcctctctgcgcggcaggctctcgttctccccctcccgcccctcctccctctagtcagtgagatggtgaaataaatgttctggaaaaaggttaaccctccccgctctggttccgagggtgagaggaggttaacctctaagcacttccttggccttaagtgccagcccggagcacaggtgtcagcgccgtccttgggtgggtcaccatcctcccgctctcctctttcacacccccagctttcttcctgctccctgggggctttcacaaagcggtatttttaatagaggcttttcagcaagctcaagtgtaagtctttgagtcatcaaaacccggatgtaaacacagcagccctgcattctgcacagtttgcgtgtattttatctttttaataatatttagctggcaacttaaaactgcaaggatgccagatattttagccagccacttacatcatgcagcatccatcttggggagagtggtggcgggtcctttccttgttctcttgctccctgccgcctacctgagaccgcaggaaatctgggtctttctgaaggcatcttcttgtggtgtagtccccttggaaccgcggcctttagaatgaacatgacatcaccttgggcaacaacgacagagggtgtgttcctgtaggagacaagaca

SEQ ID NO: 12756 - DNA, 2300 bp, Homo sapien
ccagcagattcagtgtcttgtgagggctcattcctcatacatggtgcctcctctgtgtccttgcatggcagaaggggtcaacaagctccttcaggcctcttttataaaagtcttaatcccattcatgaggggagagccctcaggacctaatcatgtggcaggcagattgtctgaggtcaggagttcgagaccagcctggccaacgtggagaaactctgtctctactaaaaaaaaaaaaaaaaaatagcctgctgtggtagtgcacacctgtagtcccgactactcgggaggctgaggcaggagaattgcttgaacctgggaggtggaagttgcaataagccgagatcacaccattgcactccagcctggatgacagagcaaggctctgtctcaaaaaacaaataaataggccgggcgcggtggctcacgcctgtaatcccagcactctgggaggccgaggtgggtggatcaagatgtcaggagatggagactatcctggctaacacggtgaaaccccgcctctactaaaaatacaaaaaattagccaggcgccgtggcaggcacctgtagtcccagctactcgggaggctgggcaggagaatggcgtgaaccctggaagcggaacttgcagtgagccgagatcttgccactgcactctgtctgcctgggcgacagagcgaaactctgtctcaaaacaaaaaaaaacaaaaacaaaataaataaacaaacaaataaataaataaataaagagtgttaggagccttctctcctgtaagctgtgaacaactaagcttgtttaggtcctgaaatgtcactgtcattgtcagcatgataaatgctttgtgctgtaataatacagagaaacaggatgtctattccccaaagcctctgtgatggagaaggtgggctttccagaggctctgactgtggaatgtgtctagaatcctctgcatgttttccaggttcacctccacaccctcatctctgctcagccgggtccttgctaggagcaggaacctgcctggtgggtctctgatggcagccccatgctctgcagaccccggactctccgcagccccagctcctgccttgtcctgttgtcttccaccaaggggcacccttctttaaaaagctggactcttttttttttttttttttttttgagataggttcttgctctatcacccaggctggagtgcaatagtgcaatcacagctcactgctgcctccactgcctgggcttaagtaatcctcctgcctcagtctcctgagtagcagggaccacagacacacaccaacactccaagctaatttttaaaaattatttgtagggatgaggtctcgctatgttgcccaggctggtctcaagctcctggcctcaagggatcctcctgccttagcctcccaaagtgctgggattacaggagtgagccactatgcccggcccaagactgactcttaaaaaaggacagagctagtcccaagcttgtgcaaggacagtgagagaggggagactcagaagtagccaatttttcccccagtaattaataagacatttaaaggacttatcaggtcaccacagctccatcatccctggggaattgtttggtttagcagaactgttcccaccctgcccccctttgctttcttctttccttgcccagacccctcccccaacttagttgacgttgcacaaagctttcaaaaaaacaagttttgttcccaggtcagctatatcctcccaggaagtttccccatcccagggtgaagtcaggccaacacagggtgaagagttaggaggtcaggggcgggggaggggcgggtgttttgcacgggacaaggagttcttttttgttgttgttattctttgcgtcatttccagagagacaggaaggaaaacatagtaaacattcttcaattctgcacaaaagccgagaagggattttcttcaggaacctccttgtggctctgccatggcggggagggttgggggtaagaaatataagacccaattccctgtggaggcggggattcggtgaaaccaatcccttgaatgtggggtggaaccaacatgtaactcaatttgctttggctctcactgtgcatttgagctaaagcaagggaagcatttccccttcccctggctgaaagctcagctgaccccgaggctcttctggtcatgcttaggtatgtacattttatgtcacgaaatccagtatcgacttagagatttaaagcagccacccaaagatattaaatgactcttgcatttttcttcaaagagaaatcttcttcctcct

SEQ ID NO: 12757 - DNA, 2300 bp, Homo sapien
ccagtactcctctctccagccccagggagtctggatgggcctttgtcaagtttcacttcacaggattggccagctgggcttgtttaagtcagcaccaaaacaggttaaacaggctccatatgttgggttgaagccacgcccagttgttcgtcagaactacctggttgattttatctcgattcagaatctgctttcttcacagccaattgcctgattgcagagtctaaggtctcaaaattaaatctcaaacaggagactgaaaagcaagcagtcaatttgcaaagacttaaatataatattgcggtggggatggggcatgttgagactcagaaaacaacaccccaaactgaaggcctcagaaagcagcctcaaaagcaaaagtttttctctgaccttctcctgccctcctgtctctctatcccattctgtccccaggccagccatagaaactagaatccctcttccccaaggcgggtcagagaaacagaaccccttttctccaaaccataaaacctaaaaataattttccttccaccttgctgtgtaaaaactgtccataaagaaattacctgactaccttgtttgactatagctcataagagcccccattccagagagggtcctgccccatacccagaaggaaggagtgcaggctcagagaggctgagaaaaatctagacaaacaaggctcgctgggtttccccactcagtctggtagcatttgatcacagtcttttttgtccaatcatatttctgcctggctgtccatactttcttggacctaagcacaaaaatgaacaattttccctgtatctttgggtcgtctttctgaagtctcctgtgtacacatgttaaataaattcgtgtgccttctctccaattaatctgccccttgtcagagattttcagcaaacctcctaaggatgatggggatgttttcccttggcccctacaggcatatattcttttttttttttttttaatctgtgtgtgtggggaggtccttttgaaaattcaaatgaaaaagatgagtccccttacacttccaaatttgcagtggaatttaaatttatttatttatttttttgagacagggtctcactctgtggcccaggctgagtgcagtggtgcagtcttggctcactgcaacctctgcctcccaggtttaggtgatcctctcacctcagcctcccaagtacctgggaccacaggctcatgccgccatgcctggctaacttttttttttttttttatagaggcggggttttgccatgttacccaggctggtctcgaactcctgagctcaagcgatcaatcctccctgggctcccaaagtgctgagattacaggtgtgagtcactgcacttggcctgctctctttttcttgcttaacatcagagtagctttcacacatttttttattcattctccaacattgtgtttttagcctaaagacagtgatgtcaatacctacagttgagcggagtcgttacaaggcagcttatgtgtctaaagtgtcttggaaatcctgtgcaaacaaatgagcattttcctcaggtatgaaaaagggtgatttattcacccagaacttggggtttctttaagatgttgagtatcctttttaagatttaaagggctgcttttttctagtaaagtctcatcccagctggcatcacgggacacgctgatctggagctgttattgaactgatggccattcccatgcagaacgatggtacgtttggcctcctgctttgtggacaagtataatgggataacccacaggatttacccacaaggtaaatccaagaaaattcactgcaatgtcttgtgctaatagtttaatgaaattgaaattctccctccagcaatttctgacagggcatggggattttctccggtgtcaccatacttcagcaggagtgactgtgtcatccaggtgcaggtattcttggttgtcctttacctgttgtctcttcttgtcacacatagctaagaaagcagatgataggttcatctctattacatggggaattaccaagtggttgcctagcaactcacacagcacagtcaacatggtctctgttgtggaatgtagagtggttagctttcttttcaagaatgtatttccatacttcttttgggtttctagaaaagaaggtacatttcctggatttgaggttagtaaaatggacttttgtattgcttttcccagtatttattctatagtaggccattattgtaacaaacaacaattatctgatcaaatcattaatacagcaattgtttcactttcattca

SEQ ID NO: 12758 - DNA, 2300 bp, Homo sapien
tccaggttgctgcaaatgccattaattcattcctctcatagtttatttatttgccccttcggaaaactaagataggaccacacctcatgcttttgcttatttcattgattctttttttgctttgtgtgcgtcgtactctcacccacttccattactgcaaatccaacttttagctatccttaaagatttacctactgatctcttcctactccaacaaccaaaaaaaaacaaagtttttttttctccctttattttattaattaggttttgttcacaatcttctggtacttatcccattctctttcatattatttattacagcgcgtcttatttcccatatcagattttaagttatctgaaggcagattgttttattccacttcaaaagaaggcaatatattaatagcttcatggataaaagccacggttttcgtttgtttgttttggtgagacggagatttgttgcccaggctggagtgcaatggcacgatctcggctcaccgcatcctccgcctcccaggttcaagcgattatcctgcctcagcctcccgaggattacaggcatgtgccaccacgcccagctaattttgtatttttagtagagacggggtttcaccgtgttgcccaggctgatcttgaactcctgacctcaggtgatccgcccgcctcggcctcccaaagtgctgggattacaggcgtcagccactgtgcctggccaaagccatgggtttttagttgagtcctaatgggcaaaaacgccacacaactggaaaaaaataccacctgcgtcataaacttgtaaggaatcataaaaggatgcatataaagcggcccggctcctaattacttggtaattgttaactattgctttcactctgtccccaaaacaaaagccttacatggtgtaggcatattacttgttggtaaagctgactactaacaagtacacccatacccagtaatacattagaattacctgtgtctagaggactaacgtgattaaccacgacctagcagcacttacaaaggcctggatgaccagtataaaacaattccccactatctaaatcagcactgtccaatataactttctgcgatgctgggaatgggctatatataatctgcactgtccaataaagaggtcactgagctcctgaaatgtggctagtacaactgagaaacttatccagtcgttagtgaccatcttactggacagctcagctcttgaatctgcctcgacccgtcaactctttaaactcgcccatgtcctctttttcactagcgaaataattctttttctaagtaaccttcactgattcaaggcatcagaacgtcaactgatcccaagccctttttttctttagctgttacacacgtgtgttcaccgtgaaccttcaccaagaaacagcatccatataaaacccatagcacatgacaaagtcagtcaaacatcaaaggtcatgaaatcatctacttaaaataactcatcgcgcctcgacctcgtgaagcacggtctcgagggtggacgggaacaaaaaacaaacagggcgacaggcgtagagaaaatgcgaggagcacgcggggaggtctggcacccctgtcacggcgactccaggctgaggccgcccgcacgcccgctctcccacgccgggcactgtcgctcccggcacgcgcacaggccggacacgactcgccccggcccccacccccaacggcggcacggcggcacggcggcacgcaccaagacagtgcgagagtcgctcctctctctgtatcgactccaagccggccccacccccggctcctctgaaccccgcctggaaaccttgcccaagccgctcattgctcaaggcccccgtacaaaatggcggcgaggcctgaggaaccaaccatagagacgcccgccggccgcggacagagcgtaggcctctgagcgctggccccgccccgcgccggcctggtcttccggcgggggcggggaaagggcgcatttccaagggcccttctaggagaacagcgtgcggtctccatggtgccgggtcatccgagtcgggtcacgtggctggcgaaagccgtcgcggaggcgtggggaggagaaatgggcgggaggctgtggggatagcgagacacccagcgacgacgaggttgtcatggtgccgcggggccgtgctcgcgcatgcgccacctgacccacaggccggtcgtggagctgcgaccccggccctaggtgagaaagggagggctcggtccgggaggaggggagcagggatgacggcgggagagggattgggcgaggagcg

SEQ ID NO: 12759 - DNA, 2300 bp, Homo sapien
ggggccccacgggcggtctctgctgtcccttctcccgcgcagggccagggctgaggctgcctgccgagcgcccctcactcccctagcccctgtccttcgccgccttcccagcgctgcggcgcatctggctgctcccgcgcccccctggcgaccggcgccgggaaggcacttgcttcgccggagccccaggccgagggctctctggggtgggcagcaccgccgcagcccccggcggcgcaggactgggggcgtgcccagcccccggcgaccaccctcaggcgtgcactgcgctgcgccccagcggtagggagaggcccacgctctccgcggaggctgcgggttcccggggggcgctgggacctgcaaaggggattccaaggtgaccagtcgacccgtgcggacgggacagcctggacggaggccccgtggcatccacccatcctaggtgcaaccgccttcccagaacttttctcgcgcctccggctggccgattccttagcccctggaaaagttctctcgggcgcacggaatcctatttctcggtggcttccgaagctggccaggaaccccggctgtgaggcgtggggtgggatggggacgtggtgagggctgagcacggcggcggggtcgatcccaggaaaggctggccaagcatccactcgtgcgcccagggcgggcttgtcggcatggaaaggatttcggcgccatgagggttgtttgggtttctctcagcaggagggcgggaggcgggcgcgaaggggggattttaatttcgcctcaaatgaaaacgctcttcgcaaagaaatagcccgggcagccagcgttggagagatgtgctggccaggacccgctgacacaggtattctggttgcgcccccacctcacccggtgcccgagagcgagtgtgagtgtatcgattgtttcaattgatttttttaaagctagatagcagaggctgcgtgtctgtacacgcagatatatacatacacaaatacagatactcaagcgcacacagattacacgtacagagtcacagacaaggacacacacacacacatcgtggtccctcacgcacacatacctccaaagagccttgggtaacctggtgaggtccctgagtgctgcccaagatgtgtgtgtgggtggggacgcagggacggagaaaggggagtgtgaagcaggatttccagcaggtcaagtgccgctgattctcctgcccccgaccccaaatccttccctttctcctcctagggaggtctgaaccagaaatcccaaacctgggcttgtttccacatccacagaggggaggagtcctatcccccggtgccccccaccctcacaactcctaaagactgcaaacgagtccctccctcctgtgccagactctgccgcgccaaggcgccgagctcgctcaaaaccccaggcaacactcacccccaggtggggcctagacccgaggccgctgcgggctcgggtctctggcctgcctgatccggggttagggaactggggaggggaaatccgcgggacagggggttgggggcgtggagtcgcgtgcagtgccccagacgcgcggcacggaggagcgggcgagggcgccccctggacgccgtagtcagtcagtcctcttctcaccccgggccccgcaggaatgtaatcgaggatgctggccctgcggctgctcaacgtggtggcccccgcctacttcttgtgcatctccctggtgaccttcgtgctgcagctcttcctcttcctgcccagcatgcgcgaggaccccgcggccgcccggctcttctcgcccgccctgctccacggggcgctcttcctattcctctcggccaacgccctgggcaattacgtccttgtcatccagaactccccagacgacctgggggcctgccagggggcctcggccaggaagactccatgcccctcacctagcacccacttctgccgagtgtgcgccagagtcaccctgaggcacgaccatcactgtttcttcaccggcaactgcatcggcagcaggaacatgcgcaacttcgtcctgttctgcctctacacctccctggcctgcctctactccatggtggccggcgtggcctacatctccgctgtcctttccatctccttcgcccaccccttggccttcctcacgctcctgcccacctccatcagccagttcttctccggtgagtgggccttggcgggcaggttgggctctacacaaagacctcccaccccaaaggttgccgggccccaaaccccaaccccaaaagttgccagatttagcaaataaaaat

SEQ ID NO: 12760 - DNA, 2300 bp, Homo sapien
cagctcatggtcacacagctggtaaatggcaataaaatgctcattcttagtctgcttgactctcatagggccagaatccaagtgaagttttcatattgattttgcctccctattgattttgtcagggataagcataagttttagaaaaacaaaatgacatttgccgtgcttcccttcactccattccttaaggggagctgaggaaccactagctttagatctgaagctgtaatgtccttttctgttgataaacgatatttctaaataaataatcgtccttgtccatttgtgtttccacgaccagatctccttttcctgactgaatactcccttcccccactaacatcttcccacgttcgcttagcttctttctctctttccctttcctcatacacacagattcagacacacaccttcccacctcacacccatatgcaaaataaaattagaaataccacccgactcacaaggtatttggggaatggagatcttcagtcagtatacccaaacccaagcaccccagccagcctccctccctgccaagcccatgtgagaggcagacagagcttgtgaaaaggggcccagacggccacgattatgagacaaagctgctctgaagggaaaagggccatgtgtgcctccccatgtctgtcctgtggccactggaactcacaaggctaccagctgctcacggccaccatgtggcatatactgttctttcacttacatgtcagatccttttagaatgtgaaaaggtttcctggcctcttttttattttgatgtatgctgataaattacagaggaaacagtgtgtggttattcaagaatagaggctgagctgatcagcatatggccctcatttcaagggattgctcttgttttaatcagccagttgagaaagcaataaatgtttatttattaagtatgccatcaccgagaggagaggaacagggcaggtaggtgagctgcgacacccaggaaattgaggatggtgatggcaccaatattcctgcagtgtttgatgtttttaaggctctgctccccccaccccccactgtttgatacacattggtgtcactaccctcttggcgcatcacagtacccaccttagaatagcggagccctggaaggggaaggaaatagaaataagaaggtgggggtgaggctcaaagaagaagctccaagttcaagctctgtgtctggataaactcccattgtctttccttctctcaaatcagagctgcccgtgggtcccagggtgatgctgggctgtgtagaggctgagtgcaggagcattaatgctagaaccaggttcaagtccaggctctgtcacttaatggctgtatgaccttagacatgagacttagcttctctgagcttcaacctcctcatctccagaatggggctcagccagcttcacagatcaggctgagaggattaaggaagcatcttatgctaaaggcttagcacaatgcctgctacctagtaggggcccgataagtagtgtctaattatgatctaatcaagcagtgcttgccctgggcaggccctgtttaagggttttacatagattgtcatttaaccctcatatctctatttcacagatgaggaaactggaatctaagatcacactggaatttacagacgaagaaactggaatctgagatctcacagtagtgaatggtgaatattcaaacccaggtagacaggctccagagtcccaactcccaaccctctgtacacagcccttccgaggagatgacgctgatcttcatgggtgttgccctggcaagctgacctctcaagcccccagggttccttcagtccgagtggagagcagggaaggtcgtgggacctagccgagagggaagggcaggatgatggctggagaatccacatcagggctgaatcccaatctcccagctggaacgggcgctgaaaccaggcagggcgccccagcccgctcaaggggaatcgagaggggaggagggggcaagtccacgatgctgagactggcggccagagcaccgcccccaggagcggagggaggggtggcggggctggggggtgcccagctgccatccccgccgcttcctggcccttactcgctggcgcccaagtgggaagccagcagctgcccgctccctcctccccacatccccgctacttgcccagttcccgaagcgaagcgcaggctgcgagccagccgggccgagtccacaactttgcagcctcgggcagggcgagagccggcgtccggggctcctcttgtcggcgaccagagctcggtgagttgatt

SEQ ID NO: 12761 - DNA, 2300 bp, Homo sapien
ccaccacacctggcctctctttacggcatgaccttgatgcttatcaggtttctcctctaggaggtggagtgggttggatatgggcttacaacagcttctgtgatgatgaagcagagaaggaaaagacgaactgcttttgttgagaatttatgctgtcccaccagactgtgaatagcataactacagcaacaacaatgaatatttgcagagcatttattttgtacatggtatttcatttaatcctcacaatcaccctttaagcttatgattattgttttcccccattttccatatgccaaaaaaaaaaaaaagcacagagaggttaagtcccacatttaggtggcccagctgggactgaaatgcaggcagctagcgttcccagcactattcttgtattgatctgatttgtctttgtacccgccagcctttatcctagaagagaataaaggtgtcagagcagaggggtgtgagacctcaactagcccagccctctcagaattacagatgagagggaaaaacaaagagagatcaagtgagctacccaaggttgcacagcatgatagccgctaagcaagggctggaacctagaccctgatgccctgttgccactgcagaatacgtgttcaaaagtcttcccgtcccgtgaatgaaaaagataatgagtgggccggcgcggtggctcacgcctgtaatcccagcactttgggaggctgaggcgggcgaatcacgaggtcaggagatcgagacaattctggctaacgcggtgaaaccccgtctctactaaaaaatacaaaaaaaaaaaattatccgggcgtggtggcgggagcttgtagtcccagctactcgggaggctgaggcaggagaatggcgtgaacctgggaggcggagcttgcagtgagccgagatcacaccactgcactccagcctgggcgagtgagtggataatggatagacttcgacagagtctgtctatgtggctcacccttgggtcttcgtggggtggttgggtcatgagaaccagggggtcaggggaagagggagatgactagagtgcgccagcctgatacggttgtgtggaagggggtgctgtgctgctggttatggggaaatcaacccatgaaagcataaccagcctttgaccccctcctctggcacctcatgaccttgtgttcacagggcttcctctatggcattcttatcatattgttaacagccctaactggtgaaagggagtcactttcagagagcattgggcagtggcttctttcccatcagctattgtactgcaagtgccagataatgtcgatgacataaatgtgcctaggcccctgcctgggagggagaggctgtttactactgccccttgttttgcacactggtctttgggggttgcaaacactggcacctgtcctcggggtcaaaaccagtgtctatagcagagtgggcaggactttgatgaaactctgatacctgcaggattgtggcccaccgcaaaccggaaatgacccagctcactcccttggccctccctggtggggctgtggccaattgtagatcactcctttgctgtagaaggagtctgggtagcagctgggtaccagccactaggctggtgccaggacctggtccttgggcggggcagagggctatctttgtgggagtggagtggcttttcttgcttctggctgatgggactaaggagactgggaaaggcgacatgcctcagggagggcgaggggaggtggcaaaggagctgccaaggcccaatgcatcagggcagctggagcaagctggaaccagggaccggcagccttgtgtgtttgagatagtaatttgcagatggttcctggtagcgacagggtctctgaggcggagcctgggtcttcgcgtaggatctgccagcctgggttccccggcaggtcagagaagctttggggcggggccaaggttggcccctgcttgggaggagccgggatgcctctctcacagtgatgcagagaggaatttgctgacagtcccttgccaggtggggctggcttcgcccagccggcgaggaggaggacccgctggcagtctcctcccaggtggggagcgtggagcctgtcactgcagcctggcggcctgagcgccgagcctggggctggggccgcggtgctgaggacgcaaatgtggtgagcacgcgatgcgggtgcggtgaccggggctggtcgggccgggaagaaggggcgccggatccaggtcccgcacggggagggggcggggaaggattgcttgtttctgtgctttctgagaccttgcat

SEQ ID NO: 12762 - DNA, 2300 bp, Homo sapien
gcccttgacaagaatgacatcccttttccctttttctttttttttttttttctttttttttttttttctttttttgagagagtctcgctctgtcacccaggctggagtgcaatggcacaatctcagctcactacgacctctgcctcccaggttcaagcgattctcctgcctcagcctcccaagtagctgggattacaggtgcctgccaccatgcccggctaatgtttgtatttttagtagagacggggtttcaccatgttggccaggctggtctcgaactcctgacctcaggtgatctgcccacctcagtctcccaaagtgctgggattacaggtgtgagccactgcgcccagctgacacacacatcactccctcctcaccataagagagcgtcaggatagagcagctctgtttgcccttctcctgccgcaggcctcccctaattcatagctctacagtcccctctcttctctgccccagcctctggcagcccatgcgttgacaaggagtgaattcagtccactctggaatgttccagaaggatccttaggactgggccaaagtcctaaaggagctccagaatttatctcttaagaactgtggggggcaggggggctcttctttctgggggaggctgatcctgtacagcacattgttcccacctaccccaaccctacaaaggaagagcagaactacctagattttgctcacaaacaatggtacacaattttgcaagttccttacactctcaactttttatctggcaaatttggttactgatatctgtcctgttcacctcccggagggttgacaagtgatatgccttctattcagtttctgtgttgtttaaagcaatacacctacctaaggttatattgttcattctttgagacattgccatttggtagagaggatccggggcttaattacagcagaatatgagctagcaagccagaggtggggctccagcacctgctcctctttggtcacatctctaggcacctcgatttagtcatctgtgcaatggaaatgatactggtcatcaattagcacagtgtcaagcacacagaaagaactcaataattagtagctattgatattaagatgaggctaaaagtagtacctcccttatcaaatctcaaagaaagagtgtgtttatgtgctgtcactgctgttaaggggaaaggcagaaacagaaccacgtggcacctctgccctgcctgggcagtctaggcaccctcaaatgccctttcctccagatactgggccttaggaactgtccacctctaaggtcctgaagacatatccaaggcttcaagaatccccaggaaggggatgagcccccatctgtaggaccaccatagtggccctgagctcctggcatgagaccctcctaagcccatccccccacccccagacccacatttcttcctcttctcccctctctgcagtgtccgtaaggattacaagtatgtccagtgtggtgtgcaaccccagcagtcctcagtgaccaccatcgtcaaatcatattactggagggtcactatggccccacaccccaaagacattatttggtaagcctcctccatccctcccctctcctctgagctcctctgagactgaagaaggcagcaggacagggccttctctccccatgtcattgcccaacagagactccaaggggactaagttccatgctctcctaagcaccacaacctgtgtgtatgcccagactcattcccacaagtgtgggtggcatccaacccttagcaaaaaggcttttcctgcagagggaactcaggtccatttttttttggctctatgctctggatcctttataaatggtgtgacaggggacggtccagggtcctgttgcatgcaagtctgggcccaggaggctggattagaccagggcaggctgggtccacagctggcctgcagcaaacagcacgtgggctctaagaactgatgtctctaaatgtgcctccttcttccatccttccccaggaaacacctgtctgtccgccgcttcttttggtgggcccgctttatcgcaatcaacaccttcctcttcttcctcttcttctttctcaccacgcctgccatcatcatgaacactatcgacatgtacaacgtcacccgccccatcgagaagctgcaggtgcctcctctgctcaggccaggcctggggaccccagggagatcaaggaataattcaggcgaggatgggatggggggagccccctgggagggggctgtggagcccatacagtgcgaacattgtggaggtggccatggtg

SEQ ID NO: 12763 - DNA, 2300 bp, Homo sapien
ctcaatgaccagcactggctctgggacagtacttgaattctcctctaggttcttacctcctgggcggatgacccacagggaggagactcctgtgacttttactgagcccctcaaatgtgggcttggacccttggtctactgatgggaatacatcactctcatcgcttaggcccatccagattctcaggcctttcttgaagggagcagggatagagtgcacttaccttggcttatcttagcacatatctcctggctctaggaagacaaagagtgaagccatggtttgagtactgactctacttactagctagggccgttaactcccactacctcatcagactccagaccctggccagaggagagaggaagcaagatgggtcctaagtatagattgctggcaagaagcgtgagctgggtagagtggggtacctgagaccagccaggtggcctgcacagagcactgagcatctgggcactgaatagtgaaggtcaccaatgacacgtgtccttgccctgtgacctgctgcacctggctgcaggtccacgggaccccaagctggaagtttagtcacgtcttgttccttcagccccaatcactttgtgttcttgcttggagacctcttggaccctaggacaccagcttttccaggctgccttatagccttgctctcctgctccagcccagagatttgtgaggaaatgggaaatagaataggggttaccacaaactcctgagtccttggaagagggagaacagctagatgatttcctggggcatggctaggagtaggaaagaaaagttctgctgaggcactcagttctgattcagggccagaaggagaaattttaaagaccaggactcgccactccatgtctagcacagggctgggcatggagccccagctgttcataaccaggggctcaagaacacccaccttctacccatggaactaaaggaggtggactaaaaggtcccagagacctcaccacccaacccctttgctgcacaactgaggaaacagggccagagaggcgtggacagacagaggagataggctcggagacccctgagggaataatgagagagaaataaaggtgaaaacgggcttgctctcccaaacctgggccaccagcactgggctggggcttgaggaactttctgcttgaaagagaaaagtttagttgtaattggcaggtggccaattgcacaccctgagtggggagcatggattctattatctgaacttctattgaaaaaattaaacagtacttccgttaaaaaaaaaaaaaaaaggccgggcgcagtggttcacgcctgtaatccccagcactttgggaggccgaggtgggcggatcatgaggtcaggagatcgagaccatcctgtctaacacggtgaaaccccgtctctactcaaaatacaaaaaatcagcctggcgtggtggcgggcgcctgtagtcccagctactcgggaggctgaggcaggagaatggcgtgaacccgggaggcggagcttgcagtgagccgagatcacgctattgcactccagcctgggcgacagagtgagactccgtctcaaacaaacaaacaaaaagatgaaaaatcatggaagtggggaaggcccagggagggaagaggtgaaaaattaaaattaaaattaaaattaaatcatggaacggtagaatgttagagctgaactccctcaagattccaccctggccaagcagagctgggattagaactggatctcacggctttctaaagatggagtctcaaaaaaacccaggcctggctgggaatggctgtggtcttggccctgtccctacggctgaaagccctggtggcccccaacgtgtgctggtgccctagtcagaccgagaactaggcccctaggccgcctccccaggcctgacctgcaggccaggtgggtggcaaactcaaatgcctctggcaatgcgtgagttgaggggcctgtggagagggggcgcatgcagcgcctacctgaggcgaccaaattcaacacagtgccctcggggctcgggaggagaaactgaggcccagagagcctccgcgatgtcagttacgttctgcaggccgggcctttcccaggccaccatagcggctggcggagggagcgcgcgccttgctggcctggagggggcgggggccgtggcggctttaaagcgcccagcccaggcgtcgcggggtggggcggctctggcggctgcggggcgcagggcgcagcggccaagcggggtccccggaagcacagctggggtgtctccacctacgactggccgcg

SEQ ID NO: 12764 - DNA, 2300 bp, Homo sapien
ttgcacactctagcatgtggtgcagcttaagtcgtcttgataagatagaatcctgcccactgctcagccctggcctgagtcagtcagttgatctgaggggctactagtcctgtgactggaatttgtctaggctaattcctgagatgtgactcgatgcctgctgatctgcttctaactggcctgggtgaaggcgctctgaagcacacctatcaggctctcagggctttatgacagagcaagagctagagccagatcttcctttctttggtcagacagctagctacctgcaggctgtgcctctgctgcagctaagagaacagagggcatcttccactcaccttccgagcctgtcatctctgctgacagtcctgtgccacaggtatctctgtgactcctcagcaaatcccacctggcttagcctatcccagctcagctgctcctaggcctttgtagagaaatgggcagctgctcacctaaatccacctcctcttattgctgtgtaggctagaaacgtggcgtatacaaccactttctacatcctgctccttagtgggataaattacgacaccattgggcagagtctgtttctatacttttataatggatattgattgattcagcaggccaaacgtgagtgttctatcacagtgaggagttacgagggaagaccagttttacttccgtcatgtggtcatgaaccaagtctttgaacattcctagtctgttattccattgtgacttctgagttaagatggttgcatttcatcgaagtgattaaggattttgtgggagctttatagactagggtctttgtgttcttgaaggctataaatgcccctccccaccaaatgcatatgaaataaaacctccctccctattgacttagttgatttgtcatcttgctaattaatgcttttaagagaccctaacaggcagcatggaaatgggtgtctctgcggttgagttctctgattctcttgagagccagtgatttgcactggcaaatttatctttcctgaccttgatcaatttatagtgtgttggtatctcactgtttgggacagaaatttgcaaggatccattctgtgttgctatgattactgccagctccttttccatgtcatcacctttctagatcctgattggtcttgattttgagatgatacagaagtagtcctttaatcatttcatcattattcacctcacatttagcaagtttattgccagagacaagatactcgctggcaagattgtcagggtttatttgattttgaggagagttgggcaagtggtcatttgtatggaattactttttagaaggctgttattactactaaagtcttactatttagcttcccagcttaagctccagtgggggcttcagtgcctcatcgggtaaaggccacattccagcctggaatatgcagtctggccacactcgttcatagcctcatctgttcccactctcccccaccccacccacccttacagtatgaaacccatttgctattcatcgaaggagtttttcttcttctttttttttggagacagagtcttgctctgtcacccaggctggaatgcagtggcgcaatctcggcttactgcaacctccgcctcccgggttcaagcgattctcctgcctcagcctctcgagtagctgggactacaggcgtgcaccaccacgcccggctattatttgtatttttagtagagatggggtttcaccatgttggccaggcttgtctcgaattcctggcctcaggtgttctgcccgcctcggtctcccaaagggctaggattacaggcgtgagccactgtgcccggccagaagttttcttctttcacacttctagtgcctttctcctgcttgttcacctgacaaaattctccctttcccttaagagtcttttcgagcattatctctgggacacccttctctaataccctgaagcaatttaggggtctttcctctttggtctcagagtacctggttagtacctctagcagataccacatggtactataactgtttaccagtaggcccttgattaatactagcctggtgagtgattttggatatcaatgcttgtttctttttggcagatcccctagacccttccttcccagtggagtttgtaagacatggagacattattcgactagaacacaaagagtaagtcaatttgcagtttggataaataaatggtacgggcaccaaggggagggagttattttaagaagtaaacagaagttagattttgatgaggctctggtcaatggagcaaggccacagtgcgaga

SEQ ID NO: 12765 - DNA, 2300 bp, Homo sapien
aggactccctttttgatggtggaaatgaggatgacaccttgtctcagggctggtctgagggagcgaatgacatgatcctctcttgggttgagggcctagaggcagtgtgagttactgcttcttgtcattgggctttgatgtctcccagagctgtggccttctacctccctgatgactcagtgttgactctagtcctgactgcacaagtgcttacactcaattaagtggcaagagggactgtttcctactactggggtgcttggttttcagggggcccttctcttacctcgctttttcaccagcgagctcatgtttttcagacacgggatgcctcactctgtcccagtacatcctccttgaccccatcctgatgttcttcatcatggctgccatgctgagcatggtcaagtacaactcttgcgccgacaggtcagaaactccatccccgggaggggagggttggaagctgtggcaactccaaaatttctgtaatggccagggccagggcgggtgcccagagacttgtcttgaagctgattttaaggcaagcatactttttgtttgtttttttaacttagattgtccattttagatcataaaaatagattttaaaaagttttctacaggtgattttatttttgccatattcaagaccgagaaaatgtcagttgtctttttcaagcgtattattattatcatgtttacaatggagtacaattgggtaggggttttgggatatcatggggggtcctaatactttccccacccacctcttgtaaccagtgctggttaggaaatcccgggacagggctgtccttcacatactctgtcctagaagggagggcaccagggtagatgctgcctggaaactatctccctttcgtcagtggttgcatccagtcctgacctaatgatgggaatagcatatgtaaaggttggcttgaatggtccataccagccaagaggatccttccaggtcctggtcagttctaaagctgacttggagggtccggtctacttgcagaatagtcttttccagatcatccttctacttctgagaaagtagaataagtcattcattctattcaaaccagaagagttggcccctcgtaggcttttctggaagttaactttgcacagccaggctcattaagctccattgtgctaatcaaacctgatcagtgactctcagcccactctggctttggttgttgtgcttatgccacatccacttccatctaccatttcttgagtacatactgtgtaccaggtactatgcggggagctggaggtactgagctctgttgggcttggctgttaaggaatattcactctggcagaggaggcagccagagagccagagaatcatagtgtagagtactaggtgctatacgaatagcaaaatggttaagagcactaacattgacccaattgcctgggttaaaactgtgccccactgcctgctagctgtattactccacctctctgtatcttgatttcctcctgtgcaaaaagaggacctagtgacaggatcctctgtgtgctgtagtgacggctagaagagttaatatatgcatcgtacttggaatgatgcgtgacgcatacatagtaagcactcggtaaatgctgccttcgacaagggcagaggtgacacaaaggagagggctgcctgagtccaggggcacctaaggattctccttttactcctgcctgactggtcacttgtgaagaaggagcccccacttaccctgagccctgtacttagccaggagcactatggacactctcccctgaagaataccctgcgccctcagacagtgcttttcctgccgttccaggggtttcacaggccgcctcctccatggagccacgccatggtcccttgaggctaagagcccccaagacagggcacagcacagccgctccaagtctgagaactgccctgtcccctgctgcgcttgcgtttggctttggttccagctgccaaattgaactccgtcttgttgattttcaggcccttctctgccccctggtggttctggctcagcctgactggcgttagtcttgctggtgctttaggggtcaagtttgttggcctctttatcatccttcaagtggggctgaacaccattgcagacctttggtacctgttcggagacctcagtctttcattggtgagcacccaagggtttgctgtggaaatgtttttgctccctgatgttgctgagtaggagctggtggccttctctgtctctactgcaggtggcagagtggctgtgttctgggtcccaggtgggctg

SEQ ID NO: 12766 - DNA, 2300 bp, Homo sapien
ttttcagttgagacggagtttcaccatgttggccaggttggtctcgaactcctgacctcaggtgatctgcccgcctcggcctcccaaactgccgggattacaggtgtgagccactgcgcccagcctggtaattactttcttaaaaaaatttttacaagggtagtgggctattgtaattactggtaatgacaccaaagatcagagatcaatctgaacccctgtgcacaggtcacagtggttaatagactggtcttagactgcagcccagatgtctgaaataagattcctcggtgcccccaggacttattcacaagtggctgaatccaggaccctggagggcatggttgaggtaaatactgtaagctggccttattctgctgcttagagtcccattgacaacaaccttaattaaatgctgtaagggacaaactgaaaagatgtgagtagccaggggagttgtatattcatgtgaaaatctgctagaagccaagaccatagaatcgaggagtgagagaggctgtcagattgctcgtgcctctacacatcattctgggtataccaagaatgcaaggccctgactgcatctcacctgggccatttctcatggttgtgtttgcagcaagcaactttgagagaagaggcagtgtctccctccaggacaaagaggaggtctgcgtactgccttctataaaacagcagattttccaagcttgtcgttccttcacttggatgcaacccactgcctgtgcagtcatccatttaaacccatagcgtcaccctgtgggacttggatggcaagggaaactgcttctaacatgcatcctatttcctgtaataaagtcctttgtctctaacccaggagtctcatcttctgccagcagtcacgacacaataacaagctaatttattaatttctaaataaagcaaccctgacagtctgttttcttgcctgctttttgcttaaagaattccatttctgacacccagtatctggatagtacaagctaaaacctttaagaaaataaatctcttctcacaagaagagttctgcctcataaaatcctttggtcaccatacctgaacacccaaactgtccttgccctataggataaaggtacacagttaggtattttctcctctgttgatgcctgaaaatcctgcagacataggaactcaggccttagaaaattctgtacccaaaaatttgcaattctctttggaaagttgaaagcacctttaaaagccacaatttgcaagccaggtgatgcactgtagcataacctggaagacatgagggctgcttcctcagatactaagaatcccactgccccaccaccagagcaaaacgatccccctcccagagaatgcacctcgccagaggccaacccacccgatacctcaagttcccctccaccgtggccctcctcctatagatcccgccccctccgtaccctcgggccaatcagagggcggcgtcccgtcgcggttgccatggtgcccgccgagtccctcccatcactcaccagatgtgcggcggctcgtccaagcggtggaagcgggtggcgaaggacagcagcgtcaccaaggccagcagggcccaccagccgaccgcctcgaagcgccgtgagccccaagcaggccgtttggggcttcgcgccacagcctcagcggccacgtcccggcctgcggccctagcagcctgggggccacagcggcccctccggggacgcagctcggactctgccaggcctccgcccgtggccggcggcatcttccccctcctctgggtcgccctccggcccggaggcacactttgtctgaccagccgccccgccaaggagtcacaagagggcagctcggggtaccccgggaaatgcaacgcccttcactgcagcggagcgcggggccccgggctcggggcggggcgggcagcgtggtcgcggcccgggccgctaggaggcggcaggaggcgcagagcatgtcgggaccgggagggccggccggcccggggcgggggggactgggcaggaggggtcgggctcagggaactgcaactcccagcagcccccaggtacggggcgtggcgggagagctgggcgagccagaggcgaccggaaggatctttctagtccagcccctcgctttacccggacgaaagacacgggcctgattcgtcgagtctcactgagccttagtcgtcggcaggtcccaggcgcgaagtttctcggcctggaggagggggtcgcgcgaagtgccagatgcaggcggggaaggtctgtgacgcgcacccgggtggaggg

SEQ ID NO: 12767 - DNA, 2300 bp, Homo sapien
tccctatggataggggagaacttgaaagaacttctcagatgccctgtttactacccctctgactatagacatttcaccaaagctccctctcccctctgccacccctagcatattaagctgctctctgaacttgctattgccatccctgtactaccaactcagtctgctagatggcaagggtgtaagtgggaacctaggcccttccaagatggttcccaagcccagcagtcccagcctgtcctgaaggtaccttttgtggagaaagtaaagatggtcctggcacagaaagcaggtgatgggcagaaagtgtctttcgaagaggaggaattgggtggccacaactggatcttccttatttggagatgcaactccctttccttacctagccaggctacagggactcctggtgccaagggacagggactgctggtgaccactagagtgtggcagacattaattagcttagaatccctgaagaaatgccttacctaatggctaaatgcctttggattacacctttggatctgtactacgagtgaccagaagcatggtaaatgctgctgccctccgtcacgacccacaagcaggaaacctgaaatctcttaggcaatttctgccttctcttaccagtgataactatgtaaaccatgccccgttcctttctgcacttgtagaactaaactttaagcccaagtatccatctcatcagcactcctagaagacctgtgtttccaattcaaatatgcattctgattactttagcagattttatttttaaaccatgtcttacacatgatttgagaaaaagactcctaaaatcccatttggaagagggaggactatacattattaacgtgacgcaaagtcccatctaacgtgccaccttccttagtgccacaaaagtggttctcaaacttcatggcacgttaagaaccatctagaccgcttataaaaacatgcagattctcgagcccgttccaccagagatgaacagagtggctctggagcaggccccgggaagaacatgtgaaagccgtgaagctccccaggtgattgtcatgactgcctctcctcgctcggggccttttttttttttttttgagccggagtcccgctctttcgcccaggctggagtgcagtggcgcgatctcggctcactgcaagctccgcctcctgggttcacgctattctcctgcctcagcctcccgagtagctgggactacaggcgcccgctaccacgcctggctaatttttttgtattttaatagagacagggtttcatcgtgttagccaggatggtctctatctcctgaccttgtgatccgcccgcctcggcctcccaaagtgctgggattacaggcgtgagccaccgcgcccggcccggggactcttaaaatacaaacattactggaaggtcacctcctgctagggccaagagaagagcatgaagggctgcgagaaattgggaggcttggggcgacgtttggaagccttagtggagggaggggtctgttatggggagcagggagggcggagcagaagtgaagcgcgaccggacagcgactccaccctgctacgcactccctaccaggaccgcctcctctggcccaaccctcccggaacttcgagccccagcgggcagcgcgcagcacgcaggcgcagagcgtgcccggcgcaaagcactgcatgccgggagtcgttgtcggcctgggcgggcggtgcagctcacttctgaccccgccccccagggtctccaggtgtctaaccagcttccctccacccgggtgcgcgtcacagaccttccccgcctgcatctggcacttcgcgcgaccccctcctccaggccgagaaacttcgcgcctgggacctgccgacgactaaggctcagtgagactcgacgaatcaggcccgtgtctttcgtccgggtaaagcgaggggctggactagaaagatccttccggtcgcctctggctcgcccagctctcccgccacgccccgtacctgggggctgctgggagttgcagttccctgagcccgacccctcctgcccagtcccccccgccccgggccggccggccctcccggtcccgacatgctctgcgcctcctgccgcctcctagcggcccgggccgcgaccacgctgcccgccccgccccgagcccggggccccgcgctccgctgcagtgaagggcgttgcatttcccggggtaccccgagctgccctcttgtgactccttggcggggcggctggtcagacaaagtgtgcctccgggccggagggcgacccagaggagggggaa

SEQ ID NO: 12768 - DNA, 2300 bp, Homo sapien
tccaacagaacaagagtgccatctgtctgtgtgtgctgtgtgtggccacctgagctccttcccttggcccttagttgccttcttgagggagtaattgcatgtcttcaaccaagacactggtcaccactgtttaaggccctgggggggcagagttaaacacaacacagccttgctgaactccaggagcccacagagtgccagggcatacacctttatcaccatccagggggcatgagggccccattgggggggtccagatcttgaggtctctaagagttcaggggtgagtgaggcagagcatcgtgcatctggggtagggagcacgtggtgacaaggaaagctgagagaaggggatagtgccacggtgagccttgaccacccagaagtgttagagaagcctccccctctttggccttaatgtcaccttagaagggctctttcctttaagagtacggcgagaggctgttctttgactccgctatgtgcggtctctcctagctctggccttgaaaggcatcgactacgagacggtgcccatcaatctcataaaggatgggggccaacaggtaagaaggctgtgcccagaccacaatgtgggaattggaggccttgaacaggcaccaggcaggggaaaaaggggaggctctgccccagagaagtgaacctgtgtcttgtggactatcactgcaggaggctgctggctctcccttgtgggacaaggtggcaaggtgtgcagtagcaggaggcctgggaagggcccaggtccagactgtgtaccctagcctgggctctccagtgcctgaccctgggagggtgggtggctagtgggtccccaccccatactgggccctctggatggctgactagggtaggagctgccttggtggccacggtgtgagatgcagggaaagcccatagccaggctgttaggatgaagcctatggctcagcagcagctgggctttgggagactgcatggatcccccagggattaccctgggcctaggatttagggccttcccagggaagggagatgggggtgggtggcaggcctggggttctcctgcttgcttggctttcctctggccaactcaggccaggccacccagcccaccagggccttgtctccacagttttctaaggacttccaggcactgaatcctatgaagcaggtgccaaccctgaagattgatggaatcaccattcaccagtcagtgagtgcagggcctgggggagggccctcatgagagcagtgccctgaatgagagcgcctgacatctcttcctcgcctgtgtacagtcaaggtgcctagcacataggagaggctcaatacaagactcgtggggagggtgcgaggttatttaggaaaataagggaagattcaagcacatggagaaccaagttctgcatgataaggtccaaaaaggcttatagggcttgagctgagcagaagcaggggggaagaggtgtagtgatggtgctggaagaggagaaggaggagtttgctggccctgtcccctctggtccaggggtcctgggccctctccctgcctcactgctcccctctggacagctggccatcattgagtatctagaggagatgcgtcccactccgcgacttctgcctcaggacccaaagaagagggccagcgtgcgtatgatttctgacctcatcgctggtggcatccagcccctgcaggtgtggcacttgtacacttgcacccttgcacacctgacacactcttacactcacacattggctgtgagctgcccagtgtgggggcgggggtgtcaagggagggagggggattctcagggcctctgacctggaccatgtgaaagaagggggtgaagatcgcaatctcagaattcagccccccagcgggtcccccgctgcgttccgagaagctctagtttccaaggacgcatgtacaggtgcttggggtggggaaagggccagaatggcaggggagagactgagcaggccccagtccaggcctcctgcctttaaccagagcagcttccgtttcatctgtgctatctcagtcatatactgggatacttgtaggattttattttttaagtgtcactgttaaaacagacaactaagtattaaaaacagttcatctgtgccagcttctactctgaatgaggaaatagccccagaaaggtggagtgacttaggagtcccacaggtaggtcataacaaagtggggactaagtcagaatccctgcatgcctatgccctctacccgcatgtcgctttaacaaaggatgttggagcagacagacatctccatt

SEQ ID NO: 12769 - DNA, 2300 bp, Homo sapien
gaagtgaatgcaggaatgaattagatgtcagggggaaaaaaaaacacactcatctatctaaaacgcgtgggtacgtttgccataaacacatgagaacctaaaggggaagtaaaaacatgcttaatttgtaaatactggcgcatgcaagggacaagtgttataagacttacctttctgtgtttacttgcttagtcttttagacattatgcttagaatttctactgctatgttaaatatatgccaacgatttttaatttaatacaaagcagagttcgtaagaaaaaaaggcaaaatttgtcaggtgttttaaagtaaaagaatataaaatcatgggaaagagctgggtgagttgtgtgtgtgtttgaataaggcagcattatgagagggaagatacttgggatcagagtagaagacagaaaaaggcaccatgttggaagccatacatccaagaacacctctggcggcacaggaagttcaactgaacaaaaagagaccttactgtcacaatggttgagacgagtatagtgtgtaccatggactataccccaaatgccttagacaaagcagctcaagtaatcctcacaataatcctatgaggcagatatttttagtaatcacattttacagatgaggaaactgacgtttcagactccaatccaggcaccctggctccacagtagtgcctcaaccattatactttatggtgtctattttaatttcagacctagaaaattaatttatatttgctacttaaataagacaagttctctcccctctaccctttcgtatttcaaaagagcatcctttcagttgcatcgtgtgtggtgttcaggaggctgaaagaagaaagtgtgatggatggactcttttgtctttggacactgaaataatacacacggaggaactcgcgttagtagaaatggagacgtcgtcctggacaagaagaggatgagggtcttgagaatgagggaggtaggccaaatttttaattcctgctcttgctttggctactgtgttcaagcaaaagaccccagacactacctatttcaactctgcttttcatttttcccactctaagcgatggagaggatggcagcaaggccagggggcctatgtgcaggaaggctagggcgcagtgggcttctggcagaggaaggcaaggctgccaacccgggtgggggccgagaggcgcgtggtaaggctggggcaggggactgagatggggatagggtggggagccagaagcagggggcggcgaggccagtagggttcgggtcggcagtctagatgtgattagcagacggaggtgggacccgaaccccggctgaagctgaaactgaagctgaagaggcgccaggggcagagccaccctgtcactaccatttgggcagatctcagaaaggaagcggggcaggaatcaaggcatttcgaaacaggagtgagtagaaaataacctcgagcccagggcccgggtggtggcagcggcggggaaggggccccgcgcgcgaaggggctgccgaggtgggtccgctccgcggggaagcccaggacagagcgcggcggaggctcgcgccgtggtgcggggccctgaggccgggcggcacccacccgccagcgccccggccttgcgtacctgaggcggccgcctggctcccctccactccctggcagtccccgacgccgccagccgaccctgggcgggctgtggggctccaggagcccggcccctcagccgcctgcaggtcagacatctgcagcccgcgcacggagctctccgctgccagccgcgagtggctccggaaacagccgaaggccgagcgagcgccgagcacagccgagcgcagcctgcaggccggaagaagcggcgcggcggccgcttgaaaagctagctgacccaggggcggccacaggagctctggcccgctgaggctggcgatgaggccgcagggagggttactgcgtgcttgtgacagacgatttttaaagtcagggcttgaaagaacaaacaaaacctggggaagagtcaggaagacactgccggaaatcgtggtatccatagagacgctatcggaagttggggttgctaggaagccgcggcgcgtctgctaagctgcaaatggctgaagtcccggaggattatgattccggcccagatgaagatggagagctggagcctgagaggcctgaactgcctggacttcataaattgtatgaaaatgccgaaccagacaccatggcaaaggcagactcgaagctaccagcagagatttaccaagagccacagccagagaccgaggaag

SEQ ID NO: 12770 - DNA, 2300 bp, Homo sapien
agaggtaagagctcaggccaagttagaaggaataagaagtagacggatgacagcatgtgatttcaaaacatcttatttttgtataccttgtattgagggaagcctagctggctaatccactctgcaacttcctctggatcccaattaagatgctcaaattgtaactcagtccctttttctggctgggtttcgtcatcttcagagacccgttccttcaactcttgggacaaatctacaacttccttttcatgaacgaactcacttaattctgtctgagactctgagggatctgagtatgagcattcttcactgacattaagcaatttttggagtggttgcaaaaactcataatgtgtaccaattgattcttcactttctctgagagatcctaatgcgtaatattcttttctaaatttgtcacttagtgacaactttcctcttttaggctcacggtgctctagctcatcgtttcctacagaatacttagactttattggttctggcctgtcttccttggaaaattctacatgtgtctcccttggtttggtttcatctggtaactctagaattttctcagttggctttgtttgtgttttctcttcaacttgtgggttgatctcctgtggtagcactggaccagtctcctctggtggctgtggattttttttctcatttgactttcttatctcttctggactttctggtttcatcatttctgattgttctagaattgtttcctcatttgtttttcttgattcttcctcaggaaactctaatttgatctcttctagtggctcaggaacgttctcatcagtagactttcttggcttgtggtctggaaagtctggtttagtccgctcaggtagttctgtccctttctcctcagttgcctttctttgcatctcctctggaacctctggttgagtctcttctggaggctctagacctgcctcctcactagactttcttggttccttctccagaaattccagtctagcctgctcgggtggctctgtccttttcttctcagttgactctctttgtgtctcctctggagtctctggtttggtcatctttggtggctgaagatctgtctcttcaagtgattctcctagtttctcacttggaaaatcttgtttggtctgctctggaggctctagacctgtctcttcatgttgcactctaagtgattcctctggaacccccggttcagtctcctcctctagtaattctaaatttctctctctgactgtggcccccgaaacctcagacatggtttccgttggtggcactggatctggatctgtttccatagctgactctaggaacacatcctctgtaacatttggtttagcctcctctggtggctctaggtctgactctttatgcgtttcatccataggggcctccaaatctttgaaaaactctcccatctctctggatgtttccgactttacctcttggtgtatccctggttcagtttcgcttggtacgtctctcttggactccttggcaattccttcctgggacgtcccgccaggtttcagctgcacgttcttagcactgtctggctccccctctttgaagtcctcttcctcggtctctggctgtggctcttggtaaatctctgctggtagcttcgagtctgcctttgccatggtgtctggttcggcattttcatacaatttatgaagtccaggcagttcaggcctctcaggctccagctctccatcttcatctgggccggaatcataatcctccgggacttcagccatttgcagcttagcagacgcgccgcggcttcctagcaaccccaacttccgatagcgtctctatggataccacgatttccggcagtgtcttcctgactcttccccaggttttgtttgttctttcaagccctgactttaaaaatcgtctgtcacaagcacgcagtaaccctccctgcggcctcatcgccagcctcagcgggccagagctcctgtggccgcccctgggtcagctagcttttcaagcggccgccgcgccgcttcttccggcctgcaggctgcgctcggctgtgctcggcgctcgctcggccttcggctgtttccggagccactcgcggctggcagcggagagctccgtgcgcgggctgcagatgtctgacctgcaggcggctgaggggccgggctcctggagccccacagcccgcccagggtcggctggcggcgtcggggactgccagggagtggaggggagccaggcggccgcctcaggtacgcaaggccggggcgctggcgggtgggtgccgcccggcc

SEQ ID NO: 12771 - DNA, 2300 bp, Homo sapien
agcagggacaagctagaaaccatgagaagggactgggacccatgtcagttctcacagcctcaaaccttgatgaggtgggtgtcccgctgctggaaaagctagtggcctttgtcatggaaatgaaaaacacctggcccaggagtgagcaactgaagaaggaaccagggaagatgtagcagttacaggcccaactgttgcccctcaccaacaaggtactcagcagataaacaacaacatgtgtgaactacaaaagtacttcccctgattatgcacactgaaacacagactggttactgttcatttccaccctcctgatcttgcatagaaatatctctggtggtccaccttaactggaaacatacagggaaggacattctggaaattgcagttcagcctagccaaggtgacataatacaaaatataacaactgatccccacttttgagaatgcataagtaaaggataggcctagaattcatgtctgtacaacttgtatgctgcattggtcatgctaatctaggttttgagcttctttttccttcggagcaggaagcattacttggcaacattaggatgacctactgactgttttggtgtaagaaaatgtttcttaggtttgatgagaacgtccatgcccctcatttcaagtgcagagactttgcttttactttattttattttttatttttttgagatggagtctccctctgccgcccaggctggagtacaatggcgcaatctcagctcactgcaaccaacgtccatctcccaggttcaagcaattctcctgcctcagcctcctgagtagctgagattacagacgtgccaccacacccagctaataagtagctgccaccatgcccagctttttagtagagatggggtttcaccgtgttagtcaggctggtcaaactcctgacctcaagcgatccgcctgcctcggcctcccaaagtgctgcgattacaggcgtgagccaccacgccagggtgagactttgcttttaaagagatggtgtcgtcatataacagccttcctataaaagggattagagaagccagacacaaaaggtcacatattgtatgattccatttatataaaatatctggaataggtaaatccattcagacagaaagcagattggtggttccagaggctgagggtggggagggatagggagtaactgcttaatgggtgtaggcgttccttttgggaatatgaaagtattttgcaacaagatagaggtggtggcacaacattctgaatgtactgatgaattgttcactttaaaatggctaattttatgttatgtggatttcacctgaaaaaattttattggtttcttgaacacaaaaagaaggagttgtaaactaactcaagtagtgctaagatctgtaagatattctagtctgcaaaaaaaacccctagaaatccagaatcttctgttgggaaaaggagggtctcatactgctctagtgtagtactcctagaaatagtggaaggaactcatgtcctgatacgcagctcaggaaaacctctaagtggggctggcctctttaagacttagagactgtaatctggtagttaaggagtcataatcacaagtttcttggtaattctccttagaaatgtagttcttaccttccaggatcagaagtactgaggagcagagccaatcttctctgtttggtgatagatatatgtagatgggtttatatgactttgagtttagtttgtaaaatctagatgtccctgccctagacaggggacaatgatatttagtttgggttattttgtaccctgtggagaacagagtttagtgaaagggaagcatttctttgaaatgtggttctatgtgttcagtcctatttccaaaacgcaggagggaatggaagggaaaacgtcctggcccaagaatacctgtaaaactcaattgctgttgtaaattcatctgccgaaaacagtgcctgtaacctgtgtggagaaacaatactttgggtttctgtacaggtttttcatgagtccaggattcatgggcagccagtgattaggaatcctcaaacactcacactctagagtgtgaattcaagagaggtgaattccaaattcagaatctgggagtagagaggtgctgaagcccatcatcatgagtgcttgtgacctgggcacacacaccatcatacacacacctcctacatagacccctcttctaccgggacagggagccaaattgattagtgtctatcactgcaggaaatagtggcttggaaatggacatgctccaggaccttgagtccctgcag

SEQ ID NO: 12772 - DNA, 2300 bp, Homo sapien
taagtctgggaggtcatgtctgggtgaaagaatgagaccttgtctcaaagaatttctcagcactgtcgatggcaggattgcttttttagttattgtacaacacatttgtgatatccatacagacattcagttggcacattaaatattgttaacctttgaacagcataattatatatataatactgaaaatgcttttcagaaacatggtttttttttttcgagacaggctggagtacagtggtgcgtgatcatatagtttactgcagactctcaattcctggctcaagccttaggctcccaagtagctgggactacaggtgcacacgaccacacctgactaatttttaaaaatctttttgtagagacgggggtctcactttgtttgccaggctggtcttgaactcctagcctcaagctatcctcccaccttggcctcccaaagttctgggattacagatgtgaaccacctcacctggctcagtaacatgttttctgaaaggaacttgtacttaatattcaaagcatgagagaatctgaaaaatccattttcttaatcaactaaaaatgattggcagcctgtagtaatcatttgaaaagctgtttgtttatatttttaaatctctgtaagttcaaaactataaggatttttcttcttacagcattcttataaagttttttgttttgattttcattagtgagaataaatgtgttttgggtaactcatttttatctaaaactttattttctttatactcattatgttcgaattgaagatgatttatcatgcatgttgttgtatatagattttgagtttttcaaccttgtaaactttggaagtggcaaagctgatagtacacttttagtgtatgcccacagaatatgaaggtttcccatgtagaacttttcttgaaagacctaaggatgaaatggaattgaataacaaaaaattaactatagctcttaaaggttactttctttaatattaggaatgattgtataccaactattttatatgaactattttacgaagattggattatgatatgtaatttctgttattctgtcttatgttatttacatttttacatttacatttttatatacatttacatttttgtatacatctgttggctcaatctgagaatatttatgaacagtgagtcagaatgacatgccctatttatattactgatgttaattgttagatatttacatgatcatactaccattgatcatgtacatggtcaaggatgccaaaaataacactgaaataggtatttagctcttggacttttcaaaatctaaagctgaagcaaaatattcatttttggttaaatactgaggctaaagtgaaacttaaaggtaaagcttggtactctatctactcagtgcttcattataggtcagcactggccaatagaactttctacaatgatagaaatattccatatttgggccgggcgtggtggctcacgcctgtaatcccagcacactgggagaccaagttgggcaggtcacctgaggtctggagttcgagaccagcctggccatcatagtgaaaccctgcctctactaaaagtacaaaaattagccaggcatggtggtgggcacctgtaatcccagctacttgggaggctgaggcaggagaatcgcttgaacctgggaggcagaggttgcaatgagctgagattgtgccattgcactccagcctgggcaacaagagtgagacttcgtctcaaaaaaaaaaaaaaaaaaattttccatatttgtgttgtccaatatagtagctcctagtcacatgtagctgttgagttctttaaaagtggttagtgttaactaaggaggtgaatttttacattaattaatttaaatttaaagaaacagttgtagctagtggctattgtatcgtacagtgcagttatagataaacctactaatgatacttagtcactctttgcctatccccccacccgcctccaataaccatctatacccagaaatgaagaatttgtttttttaaagcatgggaagttcagttaatcagctatctccctcatctaaggagacaaaatacctcaaagcctttttctgctttttgtagctatctcattatcgagagcatttgaacattcaggaccctgacaaacgaaaagaatttcttaaaacctgtgttgggtaagtatgggggaaaaatgattttaagtataaatacctttacccagaaggaatgaagaaaattaaaaagggtggaatggataggcaggaaggggagggctaacaatgaatcataccagcatcat

SEQ ID NO: 12773 - DNA, 2300 bp, Homo sapien
ggcaaccttgagttcaaatcctggtttctcttaattctgagcaaagtggataaatgactttacttctaagccttggagaaaattatatcctatctcacagggttgcagggaacatctataaaagtgtctagcagaaagtaaatactaaatgttatttccttttaatatggaatatcatactgacatttttctgtcttggttttcccgtctgttaaatgggcataacagatgacctaccttagaaatggttctgaggagtaaaccagttaatacatgtaaagtgcttagtgcctgacccaaaattaacactcaatagtaacttttattattaatacatcatcctggtaccttgggaaaagctaaaaaagaaaatattttttagcaatcctaaagattaaaaaaaatacaaaaattctgagtagccacaaatgctgaagatgtgtatagaacatataaatgtctctggcacacatgtcagttcataaatcactctgtcattcgtttgatcctcagaacaatcttgtaaggtaggcctgggagattccatttccatgttactcatggggaaagtgaggcacaaaagagttcagtatcaaagccactttgttaaatgctcctatttcaaattacaatccaggctttctggctcctagaccatttctagtgtcttgcatggtccttctacctatttttcactttccagaaaactagagatcattccttcactatagtaattatctacagatagacatagaatgtgtctaacaaacacaataatctaccagaggatttctggaatctttttaaccatgcaatggcagtagacaactgccatcaatttgtatttataacgccaaatgagaagctaggtttacttggcaagtatagataatgatctagtggctctagagttataaagtaatcaggtacgattgtcactcttaagagtgacaggtgcttcaacatgatttaaaatacttcagaggtttgtctttatcgtctcttgtttactgacagcccacaaggcagggtgagagacctcaggggagaacaggaactttacaaaggaaaacagaagaatcagcaagaaaaccacaacatgctccctgcctcagaaaactccaaaaaccacctactgagaagtcagacttggtttcaattatcttccgagccaggaagatacaggtgaggcttgtgaactgagaccagggaacaagagttaagctaggatgactctacgggtgaacgtccaggaagccatggatctaccgcagtcgtcagagcccagcggatccctggcagagttaaatgctcgttctgaaccaaatgtccgcttccgaaccaatcgctggtgctcactcgcagccccagtcccaagcgtactccagcgcccaagggtcgccctgactgaaagaagagaatcaggcctgtagtcatagggtgtagggatgcctcctagaagaggggaaaagatcaagatgcggagaggctggatccagccagatacgcgacccaaggggcttgggacaccctcacctcttccgcacagagccctccctctcaggacagcgccagcctccgccgccgctggaccagcccttctattcaggctgtgcagcttagagaagggggcggaagggaataatcgtagggcggagagaaaacacgaataacgagaccgcagggcatgctggaagtcgtagtttcttctgcctctgctgtcaggcgctgtcccgacgaaccacaaggcttcttgactacagcccccagaaaccccaagcaccgtgctaggtcatttcctctcctttccgcgagaccttccgcggttatccagcgagtcacgtagcaagactacaattcccatgaggctcagcaagggcgatttagggtccagggaagcaatgagacgtgttctttgttttcctatgggtgaggaatggttgtatgagcagttgggtttcgggacgctttttggggagaacccgatggagtctgaaggatctctaaatcaggcggaacccacggtgcggcgagttgggacggaagtaaccggtgggagtggggaggagccggaagttaaggaggggagggggtggagggaaaagcaagccaggaggtgcttgcggccgcttctagtagtttccaggcgctgccgggcggctggcactaagcggtcctgaggctgtggctacggctgctccggagctggtggcgccgcgataggagagccgatggccaagtggggtgagggagacccacgctggatcgtggaggagcgggcggacgccaccaacgtcaac

SEQ ID NO: 12774 - DNA, 2300 bp, Homo sapien
acttgccttcttcattttgaacctgcactgccaggaacagtgttttcagcttatccgtggaccaatttgaagcatctctctccgtcctgcaaagcagaaacagagctatgaaccagcagtcaaacggaggatacgctgctctatgcaagagaatacgaggttaaaggaggcctgacaaatagtttgaaaagaacacaaaaactcccagtcgcactccagtatgtccacaaacatgtcattcttttttaggaagacaaggggttgcacactgtcaacaaagacagctgctgtagaaaatggtataaactcaatggaaaattatgctctcctttctcggcatgatggtgcgggggaatacttgatactttaacatggcgcccccatttgaccaagtggaaaactgcacatattgctgagatcaggaacacagactggaccatgaaagaatagtacttagctaaaaggcccagaaaggattaaaccaataaccctgacctcattggcacggtgttctgacctatcagattcgcacttgcattataaacttcctacacattcactgtcccctagatggccacaaaaacgttaagtccagggcttcaaaacaaacaacaaaaattaggtcaagtactctgcatgttaagaagagagaatacaaagtgagatatggaaaagaaacatcactatctgccttcctacttatcaactattagagaaaacaacagcaaaaaaggctgcaacaaagtaacggtacaatacaaacattacgaaaaaagttcagtggaattcaaaaataaggaaactaatattactttgggaagatttcatgaaggagggcagttattttaagaacggtcaggttataaaaccacggctgctcggcaacctggagttccaacacacccgacctgatagttccgggtgagaggccgcagctatctgagctctgagcacctgcacaacacgttctcaatctcccgcgggaccgctgcagcggtcccctatgaatgacttttaattttaccgcaggccgcaaaataggaattacagacccctggccttaggcctttcacagctatctcccaacacaatcaaaggaggttccagtctcagtgactcctctggccacgtgtaataagcacctccctgctcgggctggatgcagcagccagggcgttatctcctagtctctctgacaaccctcctctggggcgcagccctccacgtccatctccctcccctcaaacactgagaaggtgaccgcggagtggagaggcctggggctacggacccctgccacaggaaggacccacccccatctccggacagggctacctcagccccagctctgtccgggccgaggttctaggaaccctgaaaccctggcccggccgcaggtctcccaaggccggcctgcttttctggccctcaccagtgccagttgttgacgttggtggcgtccgcccgctcctccacgatccagcgtgggtctccctcaccccacttggccatcggctctcctatcgcggcgccaccagctccggagcagccgtagccacagcctcaggaccgcttagtgccagccgcccggcagcgcctggaaactactagaagcggccgcaagcacctcctggcttgcttttccctccaccccctcccctccttaacttccggctcctccccactcccaccggttacttccgtcccaactcgccgcaccgtgggttccgcctgatttagagatccttcagactccatcgggttctccccaaaaagcgtcccgaaacccaactgctcatacaaccattcctcacccataggaaaacaaagaacacgtctcattgcttccctggaccctaaatcgcccttgctgagcctcatgggaattgtagtcttgctacgtgactcgctggataaccgcggaaggtctcgcggaaaggagaggaaatgacctagcacggtgcttggggtttctgggggctgtagtcaagaagccttgtggttcgtcgggacagcgcctgacagcagaggcagaagaaactacgacttccagcatgccctgcggtctcgttattcgtgttttctctccgccctacgattattcccttccgcccccttctctaagctgcacagcctgaatagaagggctggtccagcggcggcggaggctggcgctgtcctgagagggagggctctgtgcggaagaggtgagggtgtcccaagccccttgggtcgcgtatctggctggatccagcctctccgcatcttgatcttttcccctcttctaggaggcatcccta

SEQ ID NO: 12775 - DNA, 2300 bp, Homo sapien
tcttctgcctctgctgtcaggcgctgtcccgacgaaccacaaggcttcttgactacagcccccagaaaccccaagcaccgtgctaggtcatttcctctcctttccgcgagaccttccgcggttatccagcgagtcacgtagcaagactacaattcccatgaggctcagcaagggcgatttagggtccagggaagcaatgagacgtgttctttgttttcctatgggtgaggaatggttgtatgagcagttgggtttcgggacgctttttggggagaacccgatggagtctgaaggatctctaaatcaggcggaacccacggtgcggcgagttgggacggaagtaaccggtgggagtggggaggagccggaagttaaggaggggagggggtggagggaaaagcaagccaggaggtgcttgcggccgcttctagtagtttccaggcgctgccgggcggctggcactaagcggtcctgaggctgtggctacggctgctccggagctggtggcgccgcgataggagagccgatggccaagtggggtgagggagacccacgctggatcgtggaggagcgggcggacgccaccaacgtcaacaactggcactggtgagggccagaaaagcaggccggccttgggagacctgcggccgggccagggtttcagggttcctagaacctcggcccggacagagctggggctgaggtagccctgtccggagatgggggtgggtccttcctgtggcaggggtccgtagccccaggcctctccactccgcggtcaccttctcagtgtttgaggggagggagatggacgtggagggctgcgccccagaggagggttgtcagagagactaggagataacgccctggctgctgcatccagcccgagcagggaggtgcttattacacgtggccagaggagtcactgagactggaacctcctttgattgtgttgggagatagctgtgaaaggcctaaggccaggggtctgtaattcctattttgcggcctgcggtaaaattaaaagtcattcataggggaccgctgcagcggtcccgcgggagattgagaacgtgttgtgcaggtgctcagagctcagatagctgcggcctctcacccggaactatcaggtcgggtgtgttggaactccaggttgccgagcagccgtggttttataacctgaccgttcttaaaataactgccctccttcatgaaatcttcccaaagtaatattagtttccttatttttgaattccactgaacttttttcgtaatgtttgtattgtaccgttactttgttgcagccttttttgctgttgttttctctaatagttgataagtaggaaggcagatagtgatgtttcttttccatatctcactttgtattctctcttcttaacatgcagagtacttgacctaatttttgttgtttgttttgaagccctggacttaacgtttttgtggccatctaggggacagtgaatgtgtaggaagtttataatgcaagtgcgaatctgataggtcagaacaccgtgccaatgaggtcagggttattggtttaatcctttctgggccttttagctaagtactattctttcatggtccagtctgtgttcctgatctcagcaatatgtgcagttttccacttggtcaaatgggggcgccatgttaaagtatcaagtattcccccgcaccatcatgccgagaaaggagagcataattttccattgagtttataccattttctacagcagctgtctttgttgacagtgtgcaaccccttgtcttcctaaaaaagaatgacatgtttgtggacatactggagtgcgactgggagtttttgtgttcttttcaaactatttgtcaggcctcctttaacctcgtattctcttgcatagagcagcgtatcctccgtttgactgctggttcatagctctgtttctgctttgcaggacggagagagatgcttcaaattggtccacggataagctgaaaacactgttcctggcagtgcaggttcaaaatgaagaaggcaagtgtgaggtgacggaagtgagtaagcttgatggagaggcatccattaacaatcgcaaagggaaacttatcttcttttatgaatggagcgtcaaactaaactggacaggtaagtctaagctgggctgtcagagagattaactgtgttttgtttaacctgttaagtagctggagagaacagttttgaggagttacagaccttgaagggagaaggcagatgttgctgctttggagtcctatgtaaagcagtatcgagtcctggaatt

SEQ ID NO: 12776 - DNA, 2300 bp, Homo sapien
ccaaagtgctaggattacaggcgtgagccaccgtgcctggcctagagcatgctttcttaactacagcactattcacatgtgggttggatgattcttgtgggatggccttgtgcactgcaggctatgtggcagcattcctggcctgtgcctactagatactagtagaaacctcctctagctgtgacaatcacaaatttctccaggcagtgccacatgtccccagatgagaaccactgcataaccactgtaccacctgcccaggcaggcccagccaccaccaggctagggtatcccaatcagccaaaaggctgcacagccctgaacacctgctgctccgagactgcctgtctctatgccccagagactgcagacagtggagatgctgagcaaagtcacaggcacagttagggctttggtggaattgtgggtgggagctgctaggaagccagcacttagggatgctccaggcctccctcattggtcagtgaaggggctgagttgttccattactcacccttccaccttccactcatccaccctgctgtctagactagagggctttgactcagcaagagactccaggctggggccgagatgggcccacggctgccctgggaccaggcgtttagtgcaggagccctggagccaggtgtttggacaccgcagaaggggaggtcaaagagggagagacagaagattctgaatctgtttccaaactttcaagaaaaaaaagtaagagtgagaaactaggctgattaagcccctgatttttgaaggggatacaatactatcactttatagcttgcaggttaagagaatgggctctaggcccagactgcctggtttaaatcctggctttatcgctaaatgtctgtgcaacctcaggcaggttacttgccctctctgtgccttagtttccactgtaagacaggcatgacaatgaggatgtaagacagggaggatgaaatgagtgatgaagtgtttagaatagtgcctggtgtgcagtaaatgctgtggaaatgtttgataaataaaattctcacagtccttgcagggaagaatgattatcttcattctgcagacgaggatattgtcaagttgaagaagttagtaagaggcagagatgggatttgaacccaagcttatctgactctcacaaccagtgtttgtcagccataccatactgcccaggtatgagacgggaggggtggcaagggtgtggcctgagtgaagcagggtccacaggtggcaggtcccggagactcataaggcagctctgggaggtgctccttttgccctggcatagagacctgggcagtggctatagcctggaggcaggtggcagccactgagcccctagtgccccactgtctgggcagatgaatgctgaacaggagtcagagatgacatggatctgcttttcacttaccatctgatctgaagcaaggactgtcccggtgaggacaccatggccagtggctgttggcagggatgaactggctgagtcagccatgccagcagcctggaatagaaaaaggagccaggccccaggcaggcaggcggaggaacacagccctcatgtggatggcctgggtggggcctagcggacaggagcaggctgaggggaaaggccaaggcctgctgcccactccctgataggaccaggtgcatccctgggggcctttctcctctggcctgtgagggccttggggagtgggaggcacattgtctgcaaaggacaccactctctgaaacaactctctccccttcttgggctgtggtttcttcatctgtgaaatgaccctccttttcatgccttacactggcatcctctgtgaaagcactttgtggatacagtccactgtctgaccagctacaccctcacttacccgttgagggccttaaagcaggcagtgtggagattttacactacagatacacactccagagagatgtaagtcacagggtgagtttatgacccggtcagaccccagggctcctggatctgcctggccagccttttccggatccccgtggggtgagccctgacctgttaccttaccttccttctctctccctcaggtctcagcctccccagatcctaggcctctgaaggaagaggaggaggcaccactgctccccagaacccacctgcaggcagagccacaccaacatggatgctggactgtcactgagccagcagccatgaccccaggcaacgccacccctcccaggaccccagaggttactccgttgcggctggagctgcagaagctgccgggattggccaacacaacctt

SEQ ID NO: 12777 - DNA, 2300 bp, Homo sapien
ctttcatctggtggaaggtgcaggagtgtggtaaaaagacaaaataataggcaggatgtaaaaatatttataccaaaaaaaaaaaaaattcctgaaaaagaacaaggtggccttgcctttagtctagtaaatgcaatatggtctagcaggtgctcataaacagggtttctttaggctaacatttgagtgtttaccatgtaccaggcaccctattaggttgcaccatatgaaattgccaatattcgaccttttgaacaaaacatggcaacttcatatagttcattctaatacaaattctcaacatggaaacctggcttctcatttactcacatttacttctcatttactcacatttacttcacatttacttctcatttactcacacttctcacacttggtgcccaggtgagaggggtaacctctcctgctcccgggcccccacacttttacagatgacaagagcacgaagacgtcaaataatttgtccaataatatcacctacttggtaaatggtgaaagattccagtccccatggccgaatccagacccaggttgtcatccctgtgatgcaccattcaaaaccctgcagctgtgcccctgggaataggagtagttccagaaaagcacacagtccccccacagtcttactctaacttgacccagacccagcagtttacaccagtagctgggcttgctcttcatcctctctaccacccctggggatccaccaaccctgccctgaaacttgagtcatcctttgtgcgccctgctatgacccctgggtgggcatgtccccagtgccttgtgactgctcctcaccgacctgtcccaacccctccccctacctggtgtcactgcgttcacattcccaagctgccccatccagattggcactgcctctcaagagttcctgatctttgccacaagctaaggttttgtgtcggttgctcagaggcaggccatcttggtgaccctcgtggcctacgtgaggatccctgcaccaagggtcccactggatgaagtgggcagtttcactgtttcacccaggatacaactaggcgacgaccagactcccggctgtccttctgggactttatcctcacatctgagtctcaactttctcctgttttgttttctgagacagggtcgcactctgtcgcctaggttggagtgcaatagtgcaatctcggctcactgcagcctctgcctcccaggtgcaagcgattctcccacctgtgtgtgggccaggtgcgccggacctcggggctcccacccgctgggactacgggtgcgcgctgccacgcccggctaatttttgtatttttagtagagacggggtttcaccttgttggccaggctggtctcaactcctgacctcaagtgatcttcctgcctcggcctcccaaactgctgggattacaggcgtgagccaccggccgactctccggtttttaaaagtgctctgagaacattccgaggacactgggtgcagaatggcaggtgctggcttgtgcctctgctctggtctccacctccggcagtagactgggaagagccctgggggagttacttctaggcttcctccccagcaaaccttcctcgaggcataaccaaacatctgcccggcatccgaagactcgcgccactctcccgtcgggctgcgcctccctcgcccgcgcggcaccgccggtccaggtcgcagttggagcgcggtcggggagggcagaggtggcgtcggaccctcagggccccgcaggagtcgcagcgcagggccggagcgcgccgggccgcagcttcccgcgaacaggaattcgctgggggctgcgacggcgacagcggcggggactgagggcggggaggcggccagatcaaagagagccgcccacagggtcaagacgggtcggggagcgccgaggggcccctcggaggagggtgggggacgtccaggtgcgcggaccctagagctgtgcgggcgcccacgcgaggagccggggccagagaggctgtgcgagctgcgcgcccccgccccgcgcggccccgtgccccgcgcgcccctcaggatcgccgggtcccgcccccggaggaggcgaggcggggcgcgactgggttcgcggccgcgtgcagaggtgcaggcagagcagcctcggaaccgagacgatgcgtgcgctccgcgaccgagccgggctcctcctctgcgtgctgctgctggcggcgctgctggaggcggcgctagggctccccgtgaagaagccgcggctccgcggaccacggcctgggagcctcacgaggctcgcagaggt

SEQ ID NO: 12778 - DNA, 2300 bp, Homo sapien
ttgcatatgaacactgtaaaatgatgattaagcggcttatgtttctggaaggagttgttttcctgtttacatggagtctggggtgtttcctactgcctactgcagcatcatttttgtgatttagcaatggcatgtgaagtaatcagatcatctgtatatcactgatgctcacagaagcctgtaaggtaagtagtacaggtacacactttgtaagatgagtgaggaaaccagggctgagtttgcattacttgtccaagactatacatagtgagtaagtggcggaacaagacaaggggccagccccctgaggagggatcggctaacaggactcctcaaatctagccagactcctttactcctcttagcctgcaggtgaggctttgatctttctagactcgacacccgagtttctgaaggtttcctcagaacaccctccccatccttctcagttccagctctccaagtcccgctcatcttccaagatctgtctcattgcacatcttcctcgcaagccttctccagagtcattcagctcactccctaagcttcagttaaatcccttagccctgcttccatccagattcctgccctgaaaactttctacctggttagactcatcactgccattcagcttccctcatcagaactcctgttgcctaatctctccagccttaggttggtctttaactattgttttctttctatgtgtatatcttgtctctcactgaaatgtaagctccatgaagcacagccacatgtttcctttttagccttatacatacagatgtatattcactttgggatcaatagtgtttgtcaactcaaataggatgtgtgggatgaatgatcccaccttctgttagattattcagctcctaagtcatgcaaaaccaataccttgtggacctcctttctaaagctcctgcagggtggggaaagaatgcacggattctcataggtgcatttagcaattactagtaaccaacacttaatgaatgcttactaattgctaggtcctgtacaaaatacattacatacataaacttattcaatcttcacgacaactattattgtccccactgaacagatgaagacacatagaggtcactcagctagtaagtggcgcagctaggatttaaaacccagaccgactccagagtccatactctcaattatgatactaaattctttatggataacagaaagtctctaattgtaatgtagatcaatttccttgctttctaaccccatgggaagatggaactaaaagggtgagaaaataatatttattatactcctactataagcctagtattataagaggtgcataatgggttaatgatataattcttgctgtaagtctatgaagcaggaagtattaactccattttaaagaatttggcttctaaagtggttaaacacagtgctcaagttttagcttccagttattggcagagttggaattagaccaggttttctaactttgaaggaaagacttaatttaaaggagactgtatagaaaaccctgccaagggcaaatgtgaagggcacgtgaaaaggcatctgaattattacttataataattcagaaatagtgaatgtgtggcgcatattgaagaatgatgagagattgtcaaaaaatctattctataaacactcacagaggaatcagctaattaaataagcgagctgcctgtcttgggctaggacataaactccaaaacttcccacgaggcaagggcaaagagggcgccacctgtcctggagaacctgggaacccgctctagagacttcggctcagccccttttatttcctcacactctaattggctacttttccctgggctccgcctcctcctcggtctggaccattaaacaggcaagccctaccccggacctggatgcggcctccaatcaggtgccaggccctggagtccctctagagaagccccctctccaccggcgaggcgctttgctctcgtccgtgattggccaggcagcagcatggggtccgcctccttctcttccagattggtcagcggtcctcaggaccacatccctctcggcaggtccccgccgctttttcccttcgctgcgtggccttggccgagaccggtcctctgcggagagggccccgccctctgtgaaggcccgcccgggaattggcggcggcgctgcagccatttccggtttcggggaggtgggtggggtgcggagcgggacttggagcagccgccgccgctgccaccgcctacagagcctgccttgcgcctggtgctgccaggaagatgcggccggag

SEQ ID NO: 12779 - DNA, 2300 bp, Homo sapien
ttgcagtgagccaagatcacgccactgcacttcagcctgggtgacacagtgagacgctgtctcagtaaaaaaaagtatatatattatatatacacacacatatatacacacacacatatatatatatatgaaacattctctttgaaagagaatgatcttttatcttatcaacttctccaagtgtggagattcctggacaaaataccaaaagtttgctgatgtataaccagtctctataataaaagggctatatgaaaccctctgacagtactatcagctgagttttccaggtacctaggcactggtaaaacacttttaagcattttgtcatgatttctttaataggccatacttaatactgcactataattcaacacactctcagaggtgatgttagtggacctattctatcatatgctaaactgaacgacaccactgagcttttataaaaggttttctctttcctcccttgccagactgttaaccaccactttccccaccagtctcatcagctggcttgtaatagtaacttctcttaattactactttaatctgctttgagctgaggaactaaacacccaagctttcatgtactcaacacatactgtacttagtactgttttaggtcctgtactagacacataatggctcattccctgatggctgacattctaaaaagcatgtacatattatggtaaaatgtaggtaaaaggagctgaatgagagtctgaagcgctctggagagaaaaagtatattattattggggtgtggactttctgtattttgacaactctaagaccactttttttccctaacaaatgaaggtgctgaaaagctgagctcaagtatgcaatcattaacacttaatactgtagcatcccaattttatcagagctgttaggaagcttggaaagaatgcctcatctagacatctgtggacaacaccaagagcaaattaagggactgcatatcctcaacgttaaagtggattgtaaagaaagaaaatataaattggactacagttttggttccccgttttccctcttgcctgttatgttcccttaaaaaaataatttttaaaaaatctatttacttgagaacaggttatgagactggctaattttttgtatttttggcggaaacgggggtcttgccatgccccaggctggtctcgaacccctgggttcaagcgatccacccgcctcggcctccgaagtgcgggattacaggcttgagccaccgctcccggactgtgttccccttcttaatctccatggggaaaagctgagagagagaacggtgcctgtattccatatatacttgtttgccatttattttcaacacggagggattctcagaatccttcaatgacctccttctaaaagagccagaggagaagacagggactagttttacgcacagtggcttaacaaacagcgccgcatccctgtcagttctgggattcctcgggagtggttttttttaagctgcagaagtctaccctaccgtctacaaagacgttctatggggttttacaaaaacccaaacagaaatgtgaggagacagttacagtaagaaataaacacggattcccaggctcttttgactgagcgcccccgccaggaatggccgcctaaagaaacaggcatctcaacgctttattgctaagtgtgacggttagtggggagttcgactctgcagccaaaggaggtcaggaatcgttcaataacaatcggtctggaggtgaaaagaggcgaagaagacacgtaagtccctccaagacgcggggcaaagcgatggagagacgcgcgccactcctctctctgtaccttttgggcaccaggacccttgccacgggctgcgtgggccgccgagaagtcgatgaccccttccaggtctgcggtcccgggccggctctgacggtagaagcggaaaagtttccgaaaggcgtcctccccgggctcagtcgccagagtcgccacagagcccacggccgctgccatcttccccatctcgcggcctataccctctgatccggaagcagattctctcgtgttccggatccggaaattttttccggggccgcgacctcggctcgagaaggtgctttagtctgaagatggcggcctcagcagcgagaggtgctgcggcgctgcgtagaagtatcaatcagccggttgcttttgtgagaagaattccttggactgcggcgtcgagtgagtgatggagatgtgggagtagtggaatttttaggtccaagtgatcctcaaagcttctgctttttgcagggtacttaagt

SEQ ID NO: 12780 - DNA, 2300 bp, Homo sapien
tacacgatctgtttctcttctgaactacagtgcttgtacttcactgatttactttttataatatctatttagttctcctagttcaccaaaacctcactggttcaacaattgcctatatttgttctaagtctcttcatccccaccactaattgtaagctccctcagcatataaaccactatgtttacagtgaccaataaacagcagggcctcaatattggctaaatgaataagtaaaagtccactaatccttccaacaatccacagagactaaattttgaagggctctaatggttaagtcaaaccaactggcaagatcaaggtctcacagaatatgatactggagaacaaaataatgttaaacatatgttttataccagataattaaagtcctagaagacactgatttcaaaacaaaccagctctggaaggtaaccctcttcctaaattgcctaaaatggtgaaggaaaaacagctgcaagcaccaagaacaatgcctaccacagaatagatactcaaataaatatttgctgaatcaatggaacaacaaagagaaactgtttcgaagctgtacataatgctgactctttttaagggttttaaactagccctttattgtctggaaacttgcatccgcaagatgctaatgaaactcctcagcctttccataaagtttcacagggactacgggagactttactgggcttggtcttcaccaaccacatgtttaaaacacggggcacaaaccaacctatttcccattctactactcacatctgagccactaaaaacttagaagaaactaaatcttgctccattttgtttccaggggttgacctgaaacatgaatatctacaaaaagagtgaccacgaatgtttacatgttggtaagcaaatataaaaacctcatctcaaaactgcagctgacaaaaattgaaggtggtgaaagatttcagaactaattattccaacctttatctgtagactaggcctctcccgtaagtttcaattttagttaccgtgaaaataactatcatttgctgagtacttacactgtatctaacacaagtctaagaagtttgcatataaactcaatcctctcaacaatcctatgagttgggtattattgactccattttatcgatgagtaaactgaggcccagttgtgagcccttttcccatactaacttcagttattcaagtgataacaacgattaaatggccaagttggaattctaaccccaacggtctagcttcggagtccacttctcagccacaatgatatacaacctttgtccaattgcctgacggaaacctcacaagtttctcaaagtcaacacattcaaactttactcatcttctcttggcctgctcctaacttctaaacaaacaattcaccaatgctaaaaacccagaaatcatttctccctttcctttattccgtacacttctcccacttaagccatcacgaaacggcatctaatttgcttttaaaacattaatgcatctgaccaccatccttctaccatcgccctaattcaggtcctcacgttttaagtaaattaatgaaattgccttttagctcctctgcacgcctacaatcttgccaccttgaatccatcctccacactacagtcaaaattatcccttctaaattgtaaatcttggttaccaagtaataaatctttacaccaaatcactcctaaaggcaagagccggtgcattcgtgaccccaaaagctcaagggacatccctaaacggttaactgcaaacaaaatttctttctgctcacttgcatgctcaggagcagtctcctaattcagccaccacgctgacttaagtaccctgcaaaaagcagaagctttgaggatcacttggacctaaaaattccactactcccacatctccatcactcactcgacgccgcagtccaaggaattcttctcacaaaagcaaccggctgattgatacttctacgcagcgccgcagcacctctcgctgctgaggccgccatcttcagactaaagcaccttctcgagccgaggtcgcggccccggaaaaaatttccggatccggaacacgagagaatctgcttccggatcagagggtataggccgcgagatggggaagatggcagcggccgtgggctctgtggcgactctggcgactgagcccggggaggacgcctttcggaaacttttccgcttctaccgtcagagccggcccgggaccgcagacctggaaggggtcatcgacttctcggcggcccacgcagcccgtggcaagggtcctggtgcccaaa

SEQ ID NO: 12781 - DNA, 2300 bp, Homo sapien
ctctgtctgcaagactaagctgtctttctccatttatagtctcatgcctagcatagtgcttgtacccaaataataaatatttttgaataattaataagctctgctacttaggtatgcttactatccaagaatcacaaaggaactaaggttattttctccatattcatccatcaggatccttttgtaatactttggagtatcactgtaatactttaatacttaaaagttgttaagaaccatttagtagaaaggttaccttgactaaagaataagctgcatcttcagggcttctgctttgattctttggcctctaagggtttttttgttgttgtttgtttgtttgagatggagttttgctgttgttgcctaggctggagtgcaatggtgcaatcttggctcactgtaccctccacctaccggattcaagtgattctcctgcctcagcctcccgagtgggattacaggcgcacaccagcacgcctggctaattttgtatttttagtagagacagggtttcaccatgttgatcaggccggtcttgatctcctgacctcaagtgatccacccacctcggcctcccaaagtgctgggattacaggtgtgagccaccatggctggcctggcctctaagttttaaatttcattgtagatacccttgacacttaaatatgcaacttgtgtttattttatccacctcttttttacattcagttttaatcctagttcttttgtatttacactgaagtagtttaaagtaaggagcataatggtaaaaatgttaaaaacaaggagtagccaggcgtggtggctcatgccagtaatcccagtactttgggagatggaggctgatggatcacttgaggtcaggagttcgagaccagcctgaccaacatgggccaacatggcaaaaaccagtctctactaaaaatacaaaaaatagggatgtggtggcatgcacctgtaatcccagctactcgggaggctgaggcatgagaatcacacgaatccaggcgacagaggtttcagtgagccgaggttgcaccactgcactcaaggctgggcgacagaacgagactctgtctcaaaaaaaaaaaggagtataagaatagcaagtatatactggacagtttatccctgaagtattaggaatgtttacttgtttgttataagaaatatggaaacaggctgggcgtggtggttcacacctgtaatcctagcactttgggaggccggggcgggcacatcacctgcggtcgggagttcgagaccagcctggccaacatggcgaaaccctgtctctactaaaaatacaaaaattaggtgggcgtggtgctgcacatctgtaatcccagctacttgggagggtgaggcaggaaaatcacttgaacccaggaggtggaggctgcagtgagctgagatggtgccactgcactctagcctaggtgacacagagagactctgtctcaaaaaaaaaaaaggaaagaaatatggaaatacggaagcatggccaggtgtggtggcacacgtctgtaattccagcactttgggaggccaaggtcagcggatcacttgaggtcaagttcaagaccagcctggccaacatggtgaaaccccatctctactaaaattgcaaaaattagcctggtgtggtggcgcatgcttgtaatcccagctacttgggaggctgagggaggaaaatcacttgaacccaggaggcagaggttgcagtgagtggagatgacaccactgtactccagcctgggcaacagagtgagactctttctcaaaaaaaaaaggaaatatggaagcataaacgcttaagagtttgtctgttatgtgaaatatctgttaattttttattctggacatcatttgctgttgtcctagtcagatgtttttactgtgtatctttgagtacttctgtcttccacatattataaaatggctagtattgagtactaccataaatcattgaaaaatctgctctttttctgaaaagtaaaagcatcgtaggaaaaattgtctctgtggccaagttgcagtggtcaaattaaacataagagttttttaaatttctgacttttattatctttgcttatagctttttacctgcacctactcagctatctcaggaccagcttgaggctgaagaaaaggcaagatcccagagatcacggcagacctcactggtctcctcccgaagagaacctcccccgtacggataccggaaaggctggatacctcggttattagaggtacatatagatcttaagtttagatttgttaaattgtgctgaaat

SEQ ID NO: 12782 - DNA, 2300 bp, Homo sapien
gccccagatctttcaacagcttgcatctcagcactcttgtctctgctcagttacctctctctagagctgttttctgaccaccttacccaaaatagccacttcaccccaaactctgagtcactctctaacccggtctttattttattcctagcatgtattacgtgaaattgcattatgattttactcactctgtcccattagaatgtaagctaattagaattctgtcccactagaattccaattctgtcccattagagtgtaagctccatgtggatagagtataaaattaaaacaaactcagtttctcctattatttcactcaacaatcaacaacacacaacacttctgataccagatgtgtgatggtttttccccacatatcaagcaagctatcaactgtgtctactggacaccagtcaagtgtcctctaattcaattcaattttgatgttatctacctggagatactgtcagatgttacaggttgaaggctcagtcccacaagactgcccttacttcagatgccaacagtaggtccaaggccactggccaactaactacaaaccagggttcccatgacctcatcttcaggttcaactaatttgctagggcagctcacagaactcagggaaatgtgtttactgatttaaaggatattacaaagaatactgaggaacaccagatggtaggtatggaaagctctggagtcctcaagactggccatttaaagatcgcattctgccactgcaattttaagcacgcaatacccatgacaggccagatgatgtggtggctcacgccagtaatgccagcactgtgggaggctgagatgggtagatcagatcagttaagcccagttcaagaccaggctgggcaacatggcaaaaccccatctctactaaaaaaaacaaaaattaactgggcatcatggcaagcgtctagagtcccagctactctagggcgctgaggcaggaggatcacctgagccttgggaggttgaggctgcagtgggctgtgattgggccactgcactccagcctgggcaagagtgagaccctatatcaaaaaataaaataaataaaaaatacccatgacatctctagaaatttttcctgtgtgtccatttcaaattccaccttttccacaaagtctcccctcataactttactagtctatgacacagtgtctcacacctggggagcactcaaatgtttgctgcctgtaacatttactaaacaaactcttggctgggcatggtagctcatgcctgcaatcccagcactttgggaggcctaggtgagaagattgatggaggccaagagttggagaccactctggccaacgcagtaacaccctatttctagtttttttttaaaaaaatttcagatgccgggcatggtggctcatgcctgtaatcctagcactttcggaggccgagacaggaggactgcttgaggccaagaattcaagaccaacctggccaacacagcgagaccgcatctcaaaaaataaagttaaaaaaaaaagcaaaaaaattttagaaacgagggtggggagaaaactctccagcccacataacttattccattcaattctttttgcactaaggttagtattacacaaatgcacattttgtgttctgtaattgttttatgtctgtataccttgcacccctatcttccctgttgccaaagacagattttcttctgtgtacacaacccccaggacagagcaaggcaccaacagtaattcccaaaataattttttgattaaaacttttggagtcatactgtcatcagccagaaaaaaaaacatgcgtgaggagaatgaagggtgttaaaagagctcaagctgatgtcctgaaaggattactttatctataaccttcctgaacactagccttttcctgttgagttcgcatggaaagtttttccacttaaaatggggcagcaaggctgggaactagtaggagtagcgtaacttctcggactctcccactgaaaagcatctttttcttaaaggcggagagcactttacagacggttactaaggtaaccggaaacagcaaaactgaggtggttctatctacggaagaaattctaagctccaaagttaaaatgcggagcagtggcgcatatcagcagacggcggtcactactgtggctcatttaaatctgtgttcagctccgggcctcttttttcaggaatccttgtttcgggacacccagtggacagcgaaaggagagagaccaccacaggcaaacggccggaaagccgcgcagtcgcagcccgcgcgcttca

SEQ ID NO: 12783 - DNA, 2300 bp, Homo sapien
acattacctcatttaaggctcatactctgctgtattgtatataattattttacatttatataaatataggtaaagcagataacatgatcagcattttaagttcaataaaactggggcccaaataaattaaatgacttgccctataagaatttattggtgctgaagctacatcttttttttttttttttttttttctgagacagtttcactcttgttgctcaggctagagtgcaacgacgcacgatctcggctcaccacaacttccgcctcccgagttcaagcgattctcctgcctcggcctcccgagtagctgggattacaggcaagcaccaccacgcccggctaattttgtattttcagtagagacgcagtttctccatgttggtcaggctggtctcaaactcccgacctcaggtgatctgcccgcctcagcctcccaaagtgctgggattaaaggcacaagccaccacacccagccaaagctacatcttaaactctaatcttcgggctcccaggccatgcaggttatattacacaatgtgattaacaatcctgtatttaccaaaagattttttctttttgtttttttggtttacatgctgtggcaggcagaattctaggatatcccccaagatctcctcctcacccaacccccacagtacctgacctacataacccctggggccatgactatgaagattctgattctgttatgcggtgtggcagagttgattttttttttttttttgagacagaattttactttgtcacccacgctggagtgcaatggtgcaatctcggctcactgcaacctccacctcctgggttcaagcgattcttgtacctcagcctcccaagtagctgagaaaacaagagcacatcaccacacccagctattcttttatattatttatttatttatttatttatttatttttattttttgagacgcagtctcactctgtcgccaggctggagtgcagtggcgtgatcttggctcactgcaacctccgtctcctgattcacacgattctcctgcctcagcctccccagtagctaggactacaggagcgcgccacaacgcccagctaatttttgtatttttagtagagacagggtttcaccatgttgcccaggctttgtcgaactcctgagctcaggcaatccgcccgccccgacctcccaaagtgctaggattacaagtgtgagctactgcgcccggccaagagttgatcttaaaatagggagattatccaggtgctcctgatctaatcacatgagccctttaaaagcagggcatttttctccaacagtggcagaagaggagtcagaaagatgtgcctcagaaagcaaatatccatgttgtgaactaccaataaatagggctcatgtgggaaggactcgagagtgacccctaggagctgagggtggccaccactaacagcacaaaacaaaacagggaactcgatcccacaaccgccaggaactgatttttgccaacaagaatgagttaggagatggatttttctccagagcctcctatgagatttcagccttgtcataccctgggcagagaacccagacactcggtaaattaccaaggattacgaaatatctccccaagagagtgttttggcgggtgagaggatatggtttaaagaaaagttttgagtgtgaatgttttcagagagtccaaggactctccattagctagtctcattattacctgtcgttttaaacgccctatcactcttacttaaagtagctgtccccgggaagcttttgtattttgtaccccttctcggggaacgggactgagtaaggaacgtaataaagcggcctaaaaggcatctccctgtatctttgatattttgcctagggaacgccctatcatgtcgcatataagcgatcgagttatgcatttgttgctagctgaagagattattccttgataaccgcttggtctggtcagaatacaaacggtactcctgttcaaagaactacaaatcccagaaggccttttcggccagagcgcctgcgcatcgcgcactccttcctttccgctcctcatcatctggaaagacccgcccagcggtgctgtcgctcgcgctggaagaagcggaagaagatggcgctcaccaggtgggttgttgattggggtcctcgatacggaagggtctgggagtaccagtcttcttcatttctcttcccataccctccgggcggtgacctgacccggggcacagaatgacgtgggccaagactacggctacgccctcccgctggccgccgctacgact

SEQ ID NO: 12784 - DNA, 2300 bp, Homo sapien
gcacagaaattcgagaccagcctgggcaatatagtgagaccacaccccccagcttttcttgagaaaaaatttaaaaaatttagccaggcgtggcagtatgtgcttgtagtcccagctactccacagactgaggcaggagggtaccttgaggacaggaagttgaggctacagtgatggagcctctacactccagcttgggcaacacagccagaccctgtctcaaaaaaaaaaagagaaatgtttttgatacatgtcttcaaagtgcatcttataagtcaacatttgataatggagatcagtgaatgaatgaataagggccaaagataactaagattagctagcatattatatttatttatttatttattttgagacgagtcttgctctgttgcccaggctggagtgcagtggcccaatctcagctcactgcaacctccacctcctgggttcaagcaattctcccacctcagcctcccgagtagttgggataacaggtgcccgccactatgctgggctaatttttctttttcttttttttctttttggagacagagtctcactctgttgcctaggctggagtgcagtggcgtgatctcagctcactgcaacctccgcctcccgggttcaagcgattctcctgcctcagcttcctgagtagctgaaattccagacgtgcaccaccacaccaggctaatttttgtatttttagcagagacagatttcactatgttggccaggctggtctcaaattcccggcctcaagtggtccgcccaccttggcctcccaaggtgctgggattacaggaatgagccaccgcacccggcttaatttttctatttttagtagaaatggggtttcactatgtcggcctggctggtctccaacccctagcctcaggtgatctgcccgcctcagcctcccaaagtgctgggattacaggtgtgagctactgcgtcctgcccagccagcattattattattatttttgagacggagtttcgctgttgttgcctaggctggagtgcaatggcgtgacctcggctcaccgcaacttctgcctcccgggtttctagtgcctcagcctcctgagtagctgggattacaggcatgcaccactaggcctggctaatttttgctattattagtagggacggggtttctccatgttggtcaggttggtctcaaactcccgacctcaggtgatctgctagccttggcctgctgggattacaggcgtgagccaccgccccgccagcatacatcaattgtcagtaaatttcttcttcgcctactagttccaatatcttatttaaaatctatggcccggtgaggtggctcaggcttgtaatcccagcactttgggaagtcaaggcgggtggattgcctgagttcaggagttcaagaccagcctgggcaaaatggcgaaaccccgtcactcctaaaaatacaaaaaattagcagggcgtggtagcacactcctgtaatcccagctactcaggaggctgaggcaggagaatcacttgaacccgggaggcggaggttgcagtgaggcgagatgggccactgcactccagcttgggcgacagagtgagactctgtctcaaaatgaatgaatgaatgaatgaatgaatgaataaaatctacgaggtcgggcgcagtggctcactcttgtaatcccagcactttgggcgggcggatcatttgaggtcaggagtttgagaccggcttggccaacatggtgaaaccccatctctaaaaaaaatacaaaaattagctgtactgcttgggcgacagagcgagactcagtctcaaaaaaaaaaaatctacaaatccacttcatctttcattaaacacgaacctgggacgtagttagaatgtcttgaagaaaatatttcagtaatattccaagtccgtcgccctggcaaagcaacaaggccacctgacggagtaagcccgagacccctgtgcctccacagtactgcccgcgggatcgcggcgtggggaaccaggaactacaagtcccggcaggccgcgcgcgcctcggcttcactaagcgcagtcaggtggctgtccccgcacggttcccagctaattccccgctaccgggttgcggccggaagccgggcgccgcggctctgcttccctcggggtgagtaggggcagctcgccggaggccggcgcagagctcgggccgaccagcctggcagggccgcaccgcgcctggagcgcgagggaaccggcatggacacgccgggagtcggcctctgctccggttgtgcagccgccctgggcgccggga

SEQ ID NO: 12785 - DNA, 2300 bp, Homo sapien
cctggctaacacggtgaaaccctgtctctactaaaaatacaaaaaattagccaggcgtggtggcaggcacctgtagtcccagctactcgggaggctgaggcaggagaatggcatgaacctgggaggcggagcttgcagtgagccgagatcgggccactgcattccagcctgggcgacagagtgagactctgtctcaaaaaaaaaaaaaaaaaaaaaagaaaaaaaagttaagctactgcatgaaaaacaaactgtggtgtgcgtcttatagtgtgtaaagtgctttctcatatgtgatcctattttgacattgaatctcaaggttgctctgtgagcaagtagagcaggtggggttagtcccacgtagccgctaagggaacttggacccagactgagaagagaggtgccttatccccagatctcccatgcccagagtgacagaaccatgccattggcagggactccccctcctgtctctgtctatgctggtgaaatctggttaaaacaaacattaggaacagtcccaaatggaaagatagagttggaggcaggtggattgggggtgttgagatggagcgggccactctggtggctcttctcatgtggatatgagcagcaattggcagcccccacccttcccaaccccaccagcagcagctcactcctcagaggcaagggctcccaatcctgagcccccagacccttaggggccatctttcaatgtagtaatagggggcccagagcgattagcaatatttcagaaagcttaagggagatcatacatctccccatgacaggcctgcccagactaaatgaaatgtcatttctctcattttttggctggaattctgtcagctcagtctggctgcactgcttatcttgggctgatcaggagccctgattggaccttatatgtgtccttgacaaataaaaatgaatgattacttaataaatgcaattggtttggcagatacagcctttcaaagcatggctccatgaagctccaaagagcctcacagaagaggttattggtggcatcgagatggggactgacttgctggcccacccaggaccagccctggctgggggccccctctccagggaagcagacagtggtggccctggggcatctggcatctcagcctgagtctgagaacttgacctggggcaaagtcctgctcctaaggccaacagacactgagtgcagggatgtctgtttcaccccaggaaaatggcaggagctggagggctggcgtggtagcgggcatagtgtcttacatctcttcacctcttataaacatacaatgaaagctagtctgctcaccttccaggggtgttatgaggaatcgggggcgcttatgagagtcaccagggcacagcaccgtggcattctcgtttaccttcccagtgacccctgagagtgggactattattatttccattttactgaagctgatggcataaggaacttgtttaaggtcacagcgctcaattgaaaagtgcagaagtgggtgcaagccagcgtagaatagcagttactagaaggctgcggggtcagctggtgtgaatcttggctcgacccttttctagccatgagttagttaaaccttgatgaatcagtttcacatctgcaaatgaggatcataattgtccctacctttgggaggctaataaggatgtcagctggttgttactaaattagggtcattcttgatgatttaatttggggcaaattataattgattgggattcagaggagatgaatggggttagaataaacatcgaggcaggaaccacagcatcttaggaaaacagagagatgagggtctcacgttgaacgcagagtcgtagtcacgtgtttgccactgttacaagcaagtggatacataatagagccagtctgtggtccataaattatacctcaacaaagctgtttaataaagcagagcgagtccctcctatcttgggagtttatgatagtgggatagatggtcattaatcaaataatcacacaaatagtgagctagtgccctgaaagaaaaggcctttgagaacgtatggcaagggaacctcattttgcctgggaggccagggagggcttcttcagagaggtgatgctgatctgggatgggaaggaagagagagggtaagccaggtgaaggggagatggcaagaatgctcctggcagcaggaatagcatgtgcaaaggccctgaggccagaaagcacacggattgctggggaagagaaagagtgaatatggctggaatgtcagtgtggtgtgagatgagaccaggcagg

SEQ ID NO: 12786 - DNA, 2300 bp, Homo sapien
ggatcatggtggctcctttacatggttcttccctcaggagctcctgacatctagagcaatcccatgcactgtgccttctgaacttcccttccacattctgtggacaaatttggtacagagacttctaggaaggccaggtaaggaggatatggaactggtggccagggcagttcaggtctagagtaaataggtgggaggtcagatgtcatataaaattaatccatgaaggcatgttcgtttgtgttcctaaaactactggataccgtggaggtgttgaaggctggagacccgaagacacataagaaaatgagattgtgatctgaaaggcaaaatagactgaaaagtaggctagtaatgatggaagtgcatatgtccgtctagtcccagcccagatgccactttagtccaccaagcttgccttgatatcccccacctccaaatcacaattaatcacttgcttatcgacaatcccatagagcttcctttacattgctctcatgattattttccctttgctttatagaaacacatttctgtcctcctccaatgcttagtggagtccttggggttcagaccttgatagattcattttgtttctcatgagcatgatgccgggtacatgtgctattaaagtttgctgggtcaggaaagtgctaggatgctgcaagaacatccagtaaagggcagaaatataagaactaccatccttggctggaggcaatagagtactgtggctaacaggcaggctctggagtgggatagacttgagttcaaattcattcttagcagcttccagctgtgtaaccttgggcaccctctctaaagcttcaacttttaagactgtggaatggatctcaactgtcaaatagcacaaacctcactggactgaatgagatgacccacgtagtggcatatggtaagtgctcaacagctattagtggattggtgctggtccaagggaggacatgccagtgcagcccttaaaaagggagctggagaagaaaggagtttggggctgcattttcacataaggtgccagggcctgatgctgagcaaaacctttgtattgggtgccaccgactgtcatctcttgtttaggtttgactggggaaacgtttccacagacatgaactagtttgtcaaggctggcaagggattttcaagggtttaggggtgcagtctaggctcagagctcagagtgcaagccacaaaagagagccatcttcctgagtcaccaaaacacttgattcgggcctctgacccttagctggcagccccttaggataggatgggctgtgcctgggtctgtctttgctgctaggggctctgagagaggaagccccatttgtcactttcatttctatgtccccagccccttgcagtatgcttcatcctaagcaggcattcaaagtgcttgttgaaggaatagatttgtgtcctagttacagccctgacttccactagatgctcaaagattgccctgattttgcaaggaagagcaactactcagggaaactgaggcacacttgtaggttagagtccctcagtctgcaaggagacacacacatcctcagcagtggggaagtggtttggttactgaagctgtaaataagaattttgtctttatattaattcctactctgattctagggaagaactctcctctcaggctggagtaaggggagaactgagctcagacactgcctcttagttgtgggggctgcaaactgcccctccctcatgatatcttctcagctgtttgcaaaacagtcagggaggaggtgaagccctgagccaggcggcctgtctgtctctttaaatgctggggtctgtgtgggagagggaggggccggctctggagtgcgtgaaattcctgggctcctccagcagtctcaggctcagcgctcagccctacacatcgcctcttgcatgcaactcacagagagggagaggcaacctgtcctcccctctctcagcctcggcatctccagccaccaaggacctgcttttcgcacctccaacaacccctcccttctaccctgccactccctcccagagagaaaggaaaaggagagagaaagattctggaatttgaacctacccaaagaggaaacatacccagcaaactcagttgattaaacatcaaacagacatacagacagatcccaaatcttctgttcaactggaaaggtaaggtttgcggggaaaggaaggcagtcagggcatgaaacaactcaaggttcttgtccgttctgggaagaggttgctcctgagagggtagaagttttcagttgggagca

SEQ ID NO: 12787 - DNA, 2300 bp, Homo sapien
aaacattcaattcataaatcaaaggcagatattatgctcctttgcttgaacaaatagccagtctctggcaatggaccattttctaacttgtataaagctggctggcccacataaggattcaatctataactcatacttaacttcttgatctaaccagctaaactattcattatagttaaaaaggcaatacacaatagaggaacatactcactagtttctaagttttaataatttttaatgccttgactagatcaaactagtaagatacagagcctgcattcgattccaggtttgctgaattccaatgttgtacagctttaaaaagggaattattgcatgctttaaaatggtgtttctgtctcactgcatgtggtgagtgatgaatcactgaatggatgattaactgttctgaatggtgcggtttattacacattgtacattgtgtgctatgcaccactaacctgcataggatctatgtgtgttcttctgaatattgaaaaaatgaggaaaatggtactttctatctgcccttgaggatgttatgtgtgttaataaactagcatctttgaagaaaagatccacatgcaacgaccttttcacttgatagcaagaagtctgaattagtgaaaagtcagaataagtgattacttggaattttaaaaaatcaccttcaagaacattcagtagtgaaaacaaagatttactaagtggattgatgggtcttttattgaatatataataattcttaggaaattcctatttatatgaattataagtgagtaggtgctgcccaagtgcttaaaagccgtttgttcttttaagaatctttaccattccttctaagactttggagcgtttggtgatgtccttaacaagccattgtatatagcagaggagtaaagtggaatcacacataaatggtcacatatttcaaatatgaagatgtaaacagtttagggtctactctgagcacctacttagtgtagtagagctgagcagttgaagtcatttgttctgaaatcacataggtctaatcctgaaatcccctcttaaccatgtgactttggacaggttacctagtatctctaacatcacctgtgctcatttctaaaatggagagaatactgattagacatatcttatacgatttgggggctactaaataagataatgcatgaaaagtactatgaatcatatttacaacataataaagatcagctgcttctattattaatattaacactattaaggagtaattttacaaatgatgctctctccctgtgagaggttatgggtaacaactgagtctatatttgttggcatcataagaagacaactccatatatagtattctgcccccggatttctgcttcttgtttgaggtgggagcaaagaaatgacaggttcaatccaaaatatctttgagttgttcagctaaccgtgggattgggtgaaggatttaggaaggctatgttttggatctgaaataaggggatttcaagactcctgtatttactacagaatattccaaacttttgcagctaccttgaaactatgaatcagccaataggaagaaggggccccaggtaactgctgtagaaacactgccggctttcgccctgacttcttttctgctcactgcagtagcaacttagcttcaaaatgtcctctttagtcatgcattctgatcaaagtagttatttaaagattgtggctaatagtagagtagatacccctggtatttcccagagcagagctcgcattctgggaatcttaggtccatgtgacttcctgagtcagtgattcacactgagaaaagagataggtttggcatgacacaatctgcagattcaaataaatcccctgggagaggatgaggctgctgagagtcctctttgctggctgaagctcccagtgtatgcacaaaacaccctgtcccgggccccagatgtgtgcaggtttctaattgccggtgctgcactaagatttgaagggtgagagagttgcaaaatcacgaacaccgagggcggtgttaggaaggcagcttcctgcacactgttgtaggtgttagtgagattatcaattgctccgggagagacacaggactggagggcttgaggaatgtggtggtccctctcttcgttgtttctgccccctgaggttgtgctttctcagggatatgcactctgcacttccattcctgcagtgaaattaactcgagcttggcaggtaagtctttcggctcacctttaaaaagaaaagatatgtgagctgcggtgggggtgggctgttccccattt

SEQ ID NO: 12788 - DNA, 2300 bp, Homo sapien
taatctatgtttttcaactggaagtatttggtactaatttgattattattctcttgcatatgtcactgcctgcctagcattttttagaaaaatgtgtatctataggaaatctacatacacacagcagataggtaaacatacagataatttaagctttctgaggatagtattcattttggtaatgccaagatcagctatagtatacttgagaaatgcttgagtaaggaaggaagcaaaacaggtttatttcaggttggtaggggactgctactaagtacctttcctcagcctatccatgaaataccaatggaatctcttcatcaaagatgttttgcacctagagctgctacggttgctattttctccaaagaagaaacttgtaaattcacaagacccaacataactcacacctagcagtcaatagaactcccaaagcctcaggtgttttttatctgtaaaataatacctctttaaaaagacattacaaaagtcaagtgtgctcactcatttattgactaaacaactattaattggatacctaacatgtactgaatagcaagtaagggtatcaagagagaatcaacaacaactcagtctctgtcctgatagaaccaacagcctatgagggaagaatggcatccattaaaggcatgcgctagactgggctcagtggctcacacctgtaatcccaccactttgggaggccaaggtgggagaattgcttgaggctaggagtttgaaaacagtctgggcgacatagcaagaccccatttctaaaaaaaaaaaaaaaaaaatacaaaaactagccaggcatggtggtgcacacccatagtcccagctacttggaagtctgaggtgggagaatttagcccgggggtgacagtgagctatgatcgtgccacttcactttagcctgggcattccatgagagtaaatggaagagcatagagcctcttgacatctaggcttggaactggcacaatgtaactttgctgccttttactagacaacataagtccaaagtcaggtattttaaataagtagagaaatatattccacctcttgatgggaaaacctccaaaagcatattataaaaaggtgtggatacagggcaacacagtgagactctgtctcaaaaaaaaaaaaaaagtgtatactgaaatggtggttatcgagttcacagtgcattaaaatcagtaggacaacttggtaaaactcagattgctgggccccacccacctccagagtttctggttcagtaggtctagagtggagtgggaaaatttctacttctaacaggttgccaggtgatactgatgccactggtgtggcagtcgcactttgaaaaccactgcactactaaatataaaattacaattttgttaattgcaattgaaaggtggaactaactgaagagtgggatttgatgtagttagagaagttagggactgcttccaagagcaaattaccttgaaactgagatctgcatttgtgtttgagaaaatatgtgaagaagacatatcctaggcattgagaagagaatgtgcaaagcctgtgtggtagaaagaaacaggggaaatattaaggactgaaagaaggcctgtgtggctgggagtgaggagaacggtgtggggtggggagtacccaggactggggctgaacaaagaaacggaggccaactggtacagagccttgtaaccccaccatagtgttaaaataattaactgggagaccattaggctgagtcagctccagtgtggtgggttcctacctaagcaaaccaaaacccaactcagagtagagtcatagcctagaaaagcaaaactcgagcttaacaatccgaaactaacgcctaacctcgaactacaaacttccattttaaccaatcaaacattttctttcctgtgcttctgtaaacaccttataaggtttcccctcacacccttgtcatggagctctgaacagcccaagtctcatgttgcctgattcatgaattgctgaatgctcaaataaactccttaaaatttgaatgtgccccagtttatcttttagcagttcctacatattattctttgagccttgggaagccaagaaaaggtggtaagtgaagaaggtgacaagactagatctcattctctgaaaagcgttttctggcttcttctattgactagaccatatatgaggccacttcctagagtctattgcaccatcgatgctgaatttctctgatttggacctcagctctgccaatttcaacctgggtaagttacccactgctctaagcttccatttcctcttct

SEQ ID NO: 12789 - DNA, 2300 bp, Homo sapien
acttcccacgatcaaagcagaaagacctggggaactagagagtagggaggaatggggcatctggcaggagatggagctgaagcattagagttaagcagagtcatctaggccgccttaaggccaaaagtgcagtggaaatccacctggggactaaatcaaggagtggttgaattgagtggaaattatcatggatatttaggatattaagaattttttctggcttttctagcaataatagcataagaccctaaccatgtacttaacctgttcttcacctttttagagcttcagcttatttttctagtggacaaagaatattgccactgtttgtcaggtgctctaccagatactgtatattttctcattttaaacccccaacaacctcgagagggaggcatattcctcattttacagaggaggaaactgaggtttcaatggaatgtccataaaccaccccttccccttgctgtggtgtccctgagagcatgctgctggtttaagacactgcgtgggggcacacccaaaagtatgcaagaccttgtcagagggccatttcctggggggctgtggatcctggaccacccttacaaatgagagccagggcagttagggtgactgtgtgcatcatttactacgggcagcttgaagcttttggaggacaccaatttcagaaccagaataccagttcactgccataaattctgaaatggacttgatgtatgaccttgaaggcaaatcacctgtaggtttggtctttttgttagagagacataatgctgtttcctcaacacctccttggggtgtctcaaggatgaatagggctgtcttaatccctgttctttatcctcagggggtttgaaatgagagtggagtatataataggtgctataagctccttttaaaaaagcctcctaaatacaacatatatatgttttaaccagcaagtattgttcactcacctccccttcctccctgcaaatgtaatgggctttttacccaaggtgaatggtaggagggagtcaaagctagcaagacctgtgtggacaacaacctggcctgagagggcagcctgttgggtttgtccttcctgcgcatgagacatactggaggggtggatgccgcctagtccacagtgttaccgtgtcctggcagagccttgggtcagtcccctcctggagtcacagatggccacgacagaggacaggtgctgccattctggctctcccctgcgtgttcagtcgtgaggtaaacaccgtgctgtctttgatgcccagcgcccaggggacttcacccacctggggcagcccttctgcagccagttccggacaggcgccagtcacttctctttgagccagccgacttggccctctccccttctgaagttttttgatcaggactacaggcgcggacgataacctctggattttgaatcccaacagtgtcctatccaccaccgggggtggcagccaccttctggaaggactgccaatcacggagcccttcaccctttggagtccccaggccaccgctccaccttcacttttgggagtccggactcagattcccatcattcgccctgcgggaggggccctgggcattttaaccccgggagacacacgcgcctggagagtggtcgcccaagccaccgccaggcagggaggagcgcgcgtgcggcaccaccgcgtgcagcagctccagcgctcgcgctgcctcaaggggtttatttttatttctatttggagctacttcggccttagccgccgcccttacttttcctccgaaattgtgagaaggtgccttcatggctggagtttggtttcacgcgcctgggagaagagcagggcacgggtgataaagaaggcgcagtgtcggtctgtcggtgtcacacacgcgcgcacacacggcggggcgggagccgcgcgagcgagaggagggcgggcggcgtgtgctggaggctcgcgcgggtgtatacgagcctgtgcttgaatgggaagggccgggattccgggtcgctctggcccctccttcctccggagccagccagtccctcggcagagcgctggggctgcactgatttgctctcgggagtgcgctatttgcatatgacttgcccatttgtgaatttggctccccaactcctcgcttcacttcacctgtgcctccctggtccgcgcacttcgcaggcgcccgcccgcctctcggccacctctgcagcctgccaggcacctcctcttgcgctctcgctgatttcgcccacccacctccctccaccccgtgccacgttggtttgggtggctgct

SEQ ID NO: 12790 - DNA, 2300 bp, Homo sapien
tatatgtatataagtaaaattcttccaataagtttttttttttttactttataggcaaaaggcaattgtccttccaaaaagtaagagtttaatatactgagatcaaatcactgatatttccatggtatctgctaacacgtataaaatatgatgttgaagagggaacttcctaattaataatatgtctgatatacttgtgtactcctccacctgcctccaaattgccttccactaaaacaaaccattaaaaacttcccattcaatgtatacttttgtggaaatgaaataatcaattcaatatctacttttctagatctcccgtcctcactgacatgcacaatataaatgagtttttactgttagaactttgagcaccaattcatattctcataaaagaatttccatctactaataagagctcttactattcacatttttaacaacaataaacacaaaccctctttgggttactatcaataataaagacgtgcattgtggtaaaatttccctagttcacaacagatattttcttcttgaacatctgattttcagaagaacaatcctgtcctgaattctttgtaattttacaagttacttcttctcttttcttggcgcatggttttagttttctagtgtttatttatggaggatgcattcccttgcgtctctattatttcgagttccccgtctctggttctaaggtgctgcctgcctaaaacacaccacttcactgaacacctggcttctatattcctctaaaatacagatgtacagttgctttttctggcatcttgggcaaggtcccacaacacttttagggaaaccaagattgtctattttgataactacttttgccaaaatagttcattcttctcaagcctggttgagggggtggaggggacctttagaagtcatatgggcatagcaggtgggggaaaactgacaaaagaccagggcgaaaatcatcctctgtgcccctgaagatcttagttgaaaatgctctactaacatctctcaccagcaaaaagcctggaacacagtatttttcacttagaaactaagatcactacctctgattttgagagagcagcccctgggcactacctgagcaggtaagggagaccactgctctaatgctcataacagctctgagatttaatgaatcacagacccatcatctctttctagggcaacgtattttatttttgagaaacaaagtaaaggaggcttcccttacaaatgctggatttctgacagctagttttcagacttttctttcgcaagttgatatctagtaactcaggatcactgcctgaaaatcgcttccaaagggttcaaatttgaatcaatgtagaggaggtggcacacagctgcttgctttcattaactcttacctctaccagaaaccaagcagctatgatgcccaatcacaatttctatgaccactttcttatcttgtcaactctctgagagttctgagtagcatttctcatttcttgcttttcagtacccacccctcgaacatacttcctcagtgtacctcagcctcccatcaagcaaaaaatcaaaattccagtttatggcaagagcagaataaatgcagcagtctcctcttctccatcattttctgacttttcccaagttatcgtaccagcacaatgccttctactcccaaatcacagcaagatattaataacccttagtagaaagattccttattaggtcacacagagtcattatggcttaatagctgtcaccctcccaagctaacctgtgcaacaggtgtggaaagtaaacttagaggctcacttggcaaccccacaaatagggcttcacagctctccccccaatgctcccaatggcctctggtccccagcatatgagcccctgcccctgtagacctagggagaagcccttctcagctcagctcacctgtttgtaggcatcgaggaggaagctcttccagacgcagcgcagtccctctgaggtcagcatgcgccgccactctccgcgagtggacttggagcggctcaacagcagcaccacgtgcttgagcagaatgaccgagtcatagagagccaggaagaggcagttggagaaaaaaactggcagaatttgcagtgtgatcagcaagtctacgctgaggatgcccatcttctctgcctcctgagtcagttcccttgtgcgctctggttccccttcaccctcttatttaaaaggggggtggtgataaagggggtgggggaggtaagggggaaggttgggggttgggggagaaggggaaaaaaaactaaattaaa

SEQ ID NO: 12791 - DNA, 2300 bp, Homo sapien
agcagtgaacaaagtggacaagaatccctgctctcacggaacctaaaggcattcttttttgattattgtttttttaaaggcaaaaaagcaacctgccaaccaaacaaaatgcattaatatgcagaattcagctaacaggacgacaaattaatgactcttgtctaggcttttaaattatttctgtgatcatgaaggttttagccacatggaaaaaatacgcaatacgctaaccacaagcttgcacctactgcttagcttatgcctaagctctggctacatagaaaactcagctatctattacccagtatctaaaactcagtatctatcactgagaaaactcagtgatctattaggtaacacaggatgaaaaagtagaataaagtgggggtcatgccattctgccaaagcattgtctgcctaaatacctgtcctaaagactcatgggagaggcaagccaatgaacaatggtcaatgtggcaccttgaaccaattcagtcggctcttaacttcccatacatttaattaaaatttttttcaaacaaaaaggaagattccttaaagtatcaggtctcttaggggttatgctaacagaagcaggtgaaacaccaaatttaaagagctttcattaataatttctcagccttatggcttcttaatgctattcaatggaaagttttaattttatctgcaaaatgaagctaaaagaatgtcgcctagctccttccctgtctggaggaacttggattttttttttttttttcattagaagcttgggtaaaactaaaaagaaacctgtattcaagtttctgcaagaagctttaaagaaatgctgggatggtactcaaatagtttacaagttttccacctacaactcattttgcattttcttaaataagataatgactcaaaaaaatttaaaggacctaggtcacagatcttacaaagggttggagtcatggtataaaggtataaagattgtatataaatgttcatattttccaagaaacagagcaaagaccgcctgtgataactcttccttttttctacctgccttccaggatcctttctttccaaaacccctcataaattaatgataatgataatcagaagagagagtgttggccatatcaatctgcacattatattaaattacttttcccaaagtttggaagcatttcctgaaggctgtcaagggtattagtttttttctctctttaaatcacaaagcaaaattccactgtctctccccaaccccttctaaaaaaaaaaagttgtcgagttttgcttttctattcactgcaatcctggccaaagtaaagccctctttctcaatgacgtcaagatctttaccaagattaggctttcacttctctattgcagcaattagccagggaatgtataaaaggcgtcagggagactcactgggctgcagagagaggcactttgcaccacagacagatagcaagaagggaaagacagagagtgagaaaaaagaggagtcagtcgctcctggggaagggagagagtgagactgggagaaagagaagcacagaaagtgtgtgtaaaacggagtaaagaaagaaaaaaaaaaaactacccttaaagcacatttaaaaaaaaaaaaaactctggcaattcaagaaagaaacaggctacgtttaaagagcatagagacaatgaaaggctaaagaaaattttaaaatctctgccacagtctcataggtgcttggaaatgaaagtagaactgcctgtctttaacggactctgacagaggtaactggattagggacgagtacgccagctttttttttttttttttttttttttttttaacatcttaaatcctgaaaaaaaaaaaaaaaaaaaaaaaaaggcagcagctccgaattgaatgaattgatgggcacactccaactgctgggctggagagactggacttagtcttgccatttctgcttctttgaaagaggagacaacttgggcttccttttaatttagttttttttccccttctcccccaacccccaaccttcccccttacctcccccaccccctttatcaccaccccccttttaaataagagggtgaaggggaaccagagcgcacaagggaactgactcaggaggcagagaagatgggcatcctcagcgtagacttgctgatcacactgcaaattctgccagtttttttctccaactgcctcttcctggctctctatgactcggtcattctgctcaagcacgtggtgctgctgttgagccgctccaagtccactcgcggagagtggcggcgcatgctga

SEQ ID NO: 12792 - DNA, 2300 bp, Homo sapien
tgctgaagtctccactgcaggggagcactggtttaattcaatcaaggtagaatgaaggtctgagaaggggagagattctaaggcctgggcaattgagtggaagcagcatttcctgagtctacacctccttctgccattgttggtgggaactatggcaatatagctttcacatctccaccagttaaaatactgtgctatcaactccctgcctttgttctttcttttttcccataaggacattgagtagtttgagaagatacatgcagtaaatgtacattgcatatattagtaatattattttgctaacattgtatgctagtcatagggaaggtgtaatttttctatgtggtttatattatttttctaagctttgaagtcttttaacaatttcgtccatgagatgcaaattcaaaactcattaggagccaaactaatgaaaaaaatgaaagaatttgtagggaatgctgagggttgtgtcacaagagagggcattgcacaaggccaccacgttttacaattccagggcacccccattcacatcatattgtatgtgaatggtgccccctagtgtagagcaatgcagaggccctctacatgccctgttcattcattcattcaggacgtcctcaatgagccaactgtgcgccaagcatggttctaggtgttggggaggtagcagtgaacaaagtggacaagaatccctgctctcacggaacctaaaggcattcttttttgattattgtttttttaaaggcaaaaaagcaacctgccaaccaaacaaaatgcattaatatgcagaattcagctaacaggacgacaaattaatgactcttgtctaggcttttaaattatttctgtgatcatgaaggttttagccacatggaaaaaatacgcaatacgctaaccacaagcttgcacctactgcttagcttatgcctaagctctggctacatagaaaactcagctatctattacccagtatctaaaactcagtatctatcactgagaaaactcagtgatctattaggtaacacaggatgaaaaagtagaataaagtgggggtcatgccattctgccaaagcattgtctgcctaaatacctgtcctaaagactcatgggagaggcaagccaatgaacaatggtcaatgtggcaccttgaaccaattcagtcggctcttaacttcccatacatttaattaaaatttttttcaaacaaaaaggaagattccttaaagtatcaggtctcttaggggttatgctaacagaagcaggtgaaacaccaaatttaaagagctttcattaataatttctcagccttatggcttcttaatgctattcaatggaaagttttaattttatctgcaaaatgaagctaaaagaatgtcgcctagctccttccctgtctggaggaacttggattttttttttttttttcattagaagcttgggtaaaactaaaaagaaacctgtattcaagtttctgcaagaagctttaaagaaatgctgggatggtactcaaatagtttacaagttttccacctacaactcattttgcattttcttaaataagataatgactcaaaaaaatttaaaggacctaggtcacagatcttacaaagggttggagtcatggtataaaggtataaagattgtatataaatgttcatattttccaagaaacagagcaaagaccgcctgtgataactcttccttttttctacctgccttccaggatcctttctttccaaaacccctcataaattaatgataatgataatcagaagagagagtgttggccatatcaatctgcacattatattaaattacttttcccaaagtttggaagcatttcctgaaggctgtcaagggtattagtttttttctctctttaaatcacaaagcaaaattccactgtctctccccaaccccttctaaaaaaaaaaagttgtcgagttttgcttttctattcactgcaatcctggccaaagtaaagccctctttctcaatgacgtcaagatctttaccaagattaggctttcacttctctattgcagcaattagccagggaatgtataaaaggcgtcagggagactcactgggctgcagagagaggcactttgcaccacagacagatagcaagaagggaaagacagagagtgagaaaaaagaggagtcagtcgctcctggggaagggagagagtgagactgggagaaagagaagcacagaaagtgtgtgtaaaacggagtaaagaaagaaaaaaaaaaaactacccttaaagcacatttaaaaaaaaaaaaaa

SEQ ID NO: 12793 - DNA, 2300 bp, Homo sapien
gaaaaataatacatctacccttaggctcatctatatttctcctaccttacattctttcggaagtgaactccttcatctgtgttccagagttccttctcctcagttatcccgtcttttcacagtagagacggggtcttgctatgttgcccaggctggtcttgaactcctgagccaaagctatcttcccgcctgagccttccaaatagctgggattatagggtgtgccactgggcctggctctttttacagttttgatcactaccttgcataaacacctccctgagaccctaatacctcctcgaacttaaattctactccaactttttgtttcccctttctcactaatcttcatcacagtcttatgaaatagctattattattttctctagtaagagaaatgatttccccgaggccatagaattgcccgtgattgaactgaaaatcaaattcacttctttctggtcagagctcaactgcttattcatctccttttgttagttctcatgttatctttgtgctctttctttctttcagttaaaactgagcaggattggggaaacttttttttggagtgattgactcattaaatttttgtcataaattgttttacactgaagtataaaatgtgaagtgtagaaatgtcttgcaaatatttgcattttaactcattatttgtaattctgaaatgagtcttaattggttcctttttttccctcctgtttcacggagattatctttggtgccagtgttgtatagaaaacaatcttggctcccttggctgcccattattttatttgcaatgattaggtggtgagaattagaggccagaagagttaacccttggcctctgtccttccatgtaaatcttagagaggctggcatagaatgatggacttctaggcccttgacttttctcttgagccctttcccaacctttcctgacttaatctcatttctttgtgggcttccaggctcccagttgcatattggtgagttttcgtcaccattgatattttaaaaataatggctgaatgtaccgtaaactttcttgtattgtatctgcatgcttccctatattattttccatctctgttttggggtttctcctttttaaaagtgtatcattggaatgtacatcagtattattttaggtaatagtgtattatttcaacctgtagtaagttttctttataatgagagtctttgctttccccatttgtttgctcaattttatcttacatttaaataattatttgtgaccatggattgaaataagttttggtgatgaaaatttgaaatacatatttcagtgtgttgctatttcaggacaattatatattcccccccacctttctggcctaaaagtatttttattaaaaaatgggaaaaatacaaaaattatttgatgaattttttttttccttgtgggttaaacattgttttgctgactggcagagtctatggtgaattttacagtaacttttatttttttcttttgcttcatgttcttaacctgatagattttaaaagaaaaggatgaattgaaaacccagctgtatgcagcattacaacaaatagagaatcttcgaaaggaattgaatgatgtcctaacaaagcgtgcccttcaggaggaggagcttcactccaaggaggagaaattacgtgatattaagtctcatcaagctgaccttgaattggaagttaagaattccctggataccatccatagactggagagcgaattgaaaaagcagagtaagatccaaagccagatgaaagttgagaaagctcacttggaggaagaaattgcagagctcaagaagagccaggcccaggacaaagctaaacttcttgagatgcaagagtccatcaaggacctgagtgccatccgagcagatcttgctaataaattggctgaggaagagagagccaagaaagcagtgcttaaggacctttctgacctcactgcacaggcaaaatccagggatgaagaaacagctacaatcatcacacagttaaagctggaacgagatgtgcaccagagggagctgaaagatctcacatcatcattgcagagtgtgaaaacaaaacacgaacagaatatccaggagcttatgaagcactttaagaaagaaaagagtgaggctgagaatcatatcaggactctgaaggtacctctgctaaattatcctgatgatactgaaggaatttttctggtggctcatgaagttaataaagcgtaaacttttagagatcattctgtattcccaagcactgaagggaagataaaaccaacaata

SEQ ID NO: 12794 - DNA, 2300 bp, Homo sapien
attgatatatgttcatagtgagatatttattcttttatattagctgtaaatgtcttctgaaaacttttccacttttctccttttaaactgtgcccataataatttagttatcttctgctccattgggcatttttctttatcctttgttgaaactctagcttgaacaggaattggagctatctcgaaggttattgaatcaatcagaaggcagccgagaaacacttttgcatcaggtaagtctatgcaagttattataatatacttttacattaaatcaggattgagtagctctatttaaatgtctttgtgaaaggaaaaaaaagaactaggtctagaaaaaatgttttcctaaggaatgtatattagcacacctaagcaaaggataaaattctttcagggaaattcagagaaagctagtacaaacaccagccagagtccccactgtgatggtgtatcttgctgattgctgctacaacttactacttatctgtcttagcatgagcagtgtaaaagtaagactgaatgtataagataaaattttcccaggagcttaattttattccaggaggcactgggaagtaaaggaagaagtaaactacatgcagcagacctttgcatgtttaggttactttgaataacgtcattgtctttaattcatgttttcaagatactacttgacccttttaaaccaaagataagggtaattttattttattttttttgagacgcagtctcgctctgttgccaggctggagtgcagtggcgcaatcttggctcaccacaacctcagcctcccgggttcaagcgattctcctgcctcagcctcccagtagctgggattacaggcatgcgccaccacacctggctaatgttttgtttttttaggaaagatggggtttcaccatgttggccaggatgttctcgatctcctgacttcgtgattccccacctcggcctcccaaagtgctgggattataggtgtgagccaccacgcccggccgataaggcttaattttaaagtataacgttttgcattccatcagcccataatgggagtttggcgcttctgatgtttaaagttcagtaactttaaataaccatcttacatacattggataagggcatatgggtttctaactgcctgtctgtgtttaatacaaactgcaattatactttcttctgttttgaagtgtatgttatataacacaccttcagaatatgctaagggtaagcaaagatgtcaagcattatagatgttcagaaggagtattacattctgacaattggtgctgaaaatacaagatagcacctgttttacaaaacctttgaaaatattcgctgactttgttctgcagccagtggtcacatggaattaattttggcagagttcaaactttcctttttggaagtttatatttgtatttaattccgttctgatttgtttggaactctaacttataatctccagtttcagttatggaagcaagagatttctttgtttagattgtcattgtgattttagctgaatctttttgccactgttaacttgtttaatgttcatttggaagtacctgctatgtgctaggtaatttggcagtctaaggatagaaagataaacaaatcagtttctgacttcaaggagtttagagtttattcaacagcatctattacatacttattttgagcatgattttagtatcaaaatatgctaaatcatgatcatttatcttgaatttaacaaccaatagaccatgttcacatgaaagcaaatgggtgaaaattgaaaaatataagaagtataatacttaattgaagttgatttgggttaatagtaatggagtagactgaggacaaaataagtgatgaaaaaaaaaatctagtcacattccattctttgcctcagtggacacagagaaggaaaagccattcatttattctttgtggaagagatgagaggaatgaggaaatggagcaggaaaccgttccactatgcttggaaggagattaacctggattcaacttgtgtttacaatagcccatttgaagtaggtctttctctgattgtgaaaaccgatgtttgatttttgaccatgtgttaggtagaagaactgcgtacacaacttacgaaagcagaaggtgatcgaaagggtttacagcatcaagtatctcagatttccaagcaacagtcaaactatcaggatgaacaaggggaggactggagatttaggagaggtaaaagtagatttgtacctaataatgtgataatgtgtgtgggggctttttggtttttcttagaaaat

SEQ ID NO: 12795 - DNA, 2300 bp, Homo sapien
ggctgaatttaggaaaccttgtcttctcaactaatcattttgttttgacattctacttaaagagttatagatgacttgttccatggatccatgcattatgtttaaaattattactttctattcatccttgaataagatatctagacccgaagtttcccagcaattcagggtgtatggattttcttcagctttaattttttttcccttgggtcttagtcgaatcctcttctcaggcctatagttgtgtacagctctggacattattctcagtatttagcatgtttttatttaatgtagctctttaagtctaaaggtatgtttttatatgttccctgttggctgactccttaataaactgaataaagcatttggacaactgtagttcttagtgtgtactggcagtctgatatctgacccaatcattttctgggatttgaagtctttgaatgactgaaagaggtactctgataaagttggacagtgtacattgtttcagtagcagctgtcactgtgacagctgtttagtttcctatttgttgtagacctggagtttctgaaggaatatttagaagggaggaaagctttctgtcttctttcagttgtgttgaccttgttatgtttcttcgcatgagtggtgcaccaattagacatttcaatttggttttgtaagcccttacacagtagacatctcttccacatctggcaataaaaaatggaataggtagtgacagatgccttttaaaaccagattttagcattggttcttaaaatatttgtatttactatttttatattttaaacataacttagtttaaaattttctgatacctttttttggggggaacccagatatttcagaaatagctttgaaaatctgtggtctatttgtatttggaagttgtttaagaagaataacgcttcattcattatattctttaaattagttaaaagaaagcttggaacaatcaatcgaccaactccggagtcaacgtttattgagaaactcaggagggagaagtatttctgttacaagtttgagtgcaagtgaccttgatggtggcactgggtcaggtaaacacttcaaatgttctgaaaaacattaaaaatatttttgaagtagatattgaatacatttaatttttggagaaatatgacccacacataacttcatgcagattggatgatagtacatgtagttgtcaaggattttatagtacatgctttgaaatatattgaagggtctttgttgttatattgtttttttttttttctcaaactctgtagaccacattagagctttacctgacaaaaacttagatttaattgtctgctgccaaagaatcaaaacaaatacataaattcgctatgtgatacactttaggttaggtatcctgtcctagcgtaatagattttcacatgttttatgaaataccctgtgatgcttgttaagaccaggtgaattttagtcttggcatgcaggtagatatgaatggctagcttaaagcttatgacagtttgtcttaattaatcttacttacacttttgtatagcactgagattcatgtttgaatcgaaaagcctgcagtgaaggaaggtgatttagataattgaacattggtaccttacatcgttaatattactgttgattatggtaacaatgattaaaaattgggcactattttttcatgtagttagtttttatttttatatgctgttcagattgtagactatgtagtttgaaaagttgttttttttagtattaagttatattaaggggtcatatgagttttttatttagaaatttattatttttgtatgagaaaatatgttgcttcttggagagtataacaaattgaaacttttgagtgttctatttccaggttatttctgttgttcattttatctgctttaagagcatgattaatgctaatttggtggaactttatggccatagcaagatacttgggaaatagtctgggttagggacatgaatatatgtatatccatgtctgccatgtttgtactgagtaaaattttagattgtctcttctcatgcagtattttaataccttcccttttctttcacttgtgaagagctccatcattttccacctacctcacctctcaaggactatggggatccacagggtattaaacgaatgagatcaagaactggtgtccggtttgttcaagagactgatgatatgactcaggtactttgtaccattctgtaatttgtgtgcagtatttccttatgcttctattgtatataaatgactaatgcttgaactttaaggcta

SEQ ID NO: 12796 - DNA, 2300 bp, Homo sapien
gccgggtggggcctaggcgatgatccggcattaaggagctgggatcatcctccgtctcaggtacctgcccccacctcccccttgccctttttcgaccacttccccgtcttactgtagacgttttagtcccacttcccctcgtcccaggggtggggacctcagagcggcgcgggatctggggtggggccgtggatgggtggagtgtgtgcagaggtgaggggagacggcgcgcctgtcatcccgaggcctccctccctcggcaggggtgtccgcggtcaggtcctggccaggttacccagcgaatctggactacattgtccttcctttgggagcagcttgctctaccgctagcatctgtgaagctttaagggacaggagattggactcattcggtaggtcctccagaggaccgtctgacatttgcttgcctgtcctgcaagcaaatttgattttttttttaatacctgttttgtagtcacagaaagcgtgctactctcgggaacgctttattagtgacctctctttcccgtgccatcataggatttgctccagccttagctgttagcagtcccttaattgaattatttcgtaaaaatacctgacattgaatcccagctgcatcttttattggtttgatggagccaatctgttatgtaggcgtctggtaaaactttaccattaattgcagcattgatttgagtattatgtaaagtatctagcacagtgcctggcaccctgcaagtgctcagcatttgttgtttattttttattaattatgcagattagtgttgtctaatacaaatacagtgtgagccactcaggtgaatttaaattttgtagtacccacattaaaaaagtaaaaagaaactggtgaaattaaataatagtttatttagcgcaatatagaaaaatgttttcaatggagtaaatataaaacttattgagatttttacttttttttttttgaggagtctggctctgtcgcccaggctggactgcagtggcgcggtctgggctcactgcaacctccacctcttgggttcaagcgattctcctgtctcagcctccggagtagctgggattacaggcactcgccaccatgcctggctgtacattaaaaaaaaaaatattttaagtcatcaaaatctcttgtgtattttacatgtatagcacatgtcagtttgacctggcaagagctagagctcagtagccatgtgtctagtgactgctgtactggacagcactagagataaggttaaaactttggcagtttcacattggcacacataaatttggttgtgcctatgactcatttcatgggtgatggtggctgttttgttagaagagtgaagtgtgcactgtgcctatgttctctcagcgtatcttgtctgccattgcataacctgggtctctttgaactgtttcttgacagtttattttgattaactttttcagaataccttttttttttcttgaaatggtttatagatgtattcccagatctaccttttatgtagacaactcccagttctctggatcacttcctgtggattcttacagattgctttgaaagcagtcacaattaattgaaaatatttctgtccacagctcttttctacaaccaaaggcattttattcttatttatttaattgtagcactgagtatgggaagaactgggcatcttataaaatatttcctttaggagtgttagactggcttggaagtataattgggtcaccacattcagcagtaacatgttaactgtattacctgacttagttaccaacttttagacatgctcatacatagtactttttggctagacttgggctgcggttcacactggagcatgaactctctggcaagccccagggatgcccaggcatggatggaagtcaccagtgacaatatgtgggctgggcacttggatgtgaagaattgtagtgaggtctcttgggcttttgaatcattctaggagcattttctctattctgtgttatgccatagtctgtacatagggacttaattttcatatttcattatttaaaaatgtttaaagttgtaggtatgtcttacccccttgttttgtttatttgtaggtggtttggggaaagtgtaggggcaaccaaagatcatcggcttgactaggccctttgccctgaacctcatgaagaaatgataggaggcagacatatgtgcctaaaaagagcgttgagctcagagaagagcaactcggagttttgggggtgtgctttgtaagtatgctttctccctgagtttctgagataacacatttttt

SEQ ID NO: 12797 - DNA, 2300 bp, Homo sapien
tcctgacctcacgtgatccacccacctcagcctcccaaagtgctgggattacaggcttgagtcagcacccctggcctgacttcactacatttttttgggatgccacgtctgttgactgagagcacaccaaagctgacaaacagctgctatgaatttagtaacatatttaagcatttcttgatcaaaatgaacgaaaatatctgatttttaaccctttggtcccagttgtgtcctgtaatgtttgatttatttggttaatatcactttgaaaaataaggcctatagaatagaatccaattctctaaatatggttgaaccagggaggaaaagctgtggacaatcagtttttattaatgtagctcgtgattacattagctcttttggtagacatttctcctgcagttgatctgattatcacttcttcagaaagtttctcttttatgtctttccatacaaacctatgcagtattctattacacagagatttgtaatcatttattgtctttttctctcacatggctctgagcaatttgaaagcaaagtctatgttgtttattttcactgcaacttcagtgtctaaaacaatgtctggatactagaaatatacagcatacatttgctgaattacataaatgaatagaattgttttgaaagttaaaatgtttacaaataaacagttattattatgcttctgcatgtatatggggcaattttatggctgttctgaattatcttaaactctgtctggtggagtgtattcttgaggaacaatttcaagtaagcagcttgaagatagttgcaaatgcataggaggtctttggaagaattattttatgttcaaaccaatatgagatagttttatgtctcagtgttggccagaaaaaaaatttgaataatacgactatatcaaatttatgtgctaattatttatgactctgcctgttgggagggaggaggggtaaggagggatggaaggagagaaagggggagagagagaaagaaagagagagagggatatgaacggagaagggcaagtgaggaaagggtgagaagaaagataaaaatgtacaaaaaaggttaggtccctttgaagggctaatagaggggaccaactgggaaatggattatagagcacagaattattagattaaggaacccttgttattaaacatgatctagctcttcttcacgtagccaggaaagctttcacagatcaggtaatatttgagtttagcctcaaagaaggaaggggaagtggtctttttggcagagaagaagggcaattcatatgactaatttaattgttactttttagctttccaaagttcagttttttattgaggttttcattctcttcgtgactgaaaccaactcccctgagtggaaaacatttcttttatgttctagagtgaggagatgacacctagactgaagtagcagcagtaatgagctgacagcctcacatctacttttggtgtgccgtgaataagccatatgatcttaggcaagtcccttactctttccaggccaaacaggttggcctacataatcttctctgttcccgtccgcttctaagaatttgtgagtctttggaacaatatactggaccctggtattaaggggatttttacatttcagtgctagaaattgtctttccctgtcctcccaccgctcccttgccctttttctacttccccatcttaccgtagtcctgggggactccttttgtcccccaaggagtaaaattacagtcaaggccaaggaagcatttttattcactttctaactggagtttgcctcctacaaaggaggctggtcctttaacaaaaaaaaaaaatagagcagggcaagagggcgcggccaagggatcaggcttttatccgggaaagttacccgaaggccagctatatggcatcctgggatttgcagttccttttcgggactctctcccttggtaattccttgatcatgaggccgagatggactacaactcccagacggccaagcggcggcagcggggtcctgtactcttgctgtggctgggcggctagttcaagttgccatagctgcgagtctggggagagcacagtcggttgagtcgctgcgtttggtcagttgcaccttctgggtcactggtagccgcgggagccgggtggggcctaggcgatgatccggcattaaggagctgggatcatcctccgtctcaggtacctgcccccacctcccccttgccctttttcgaccacttccccgtcttactgtagacgttttagtcccacttcccctcgtcccaggggtgg

SEQ ID NO: 12798 - DNA, 2300 bp, Homo sapien
atcccagcactttgggaggctggggcgggcggatcacgagatcaggagttccagaccagcctggccaacatggtgaaaccccgtctccactaaagacacaaaaaattaaccgggcgtggtggcgggcgcctgtaatcccagctactctggaggctgaggcaggagaatcccttgagcccgggaggcggaggttgcagtgagccaagatcgtgccattgcactccagcctgggcgacagggcgagactccgtctcaaacaaacaaacaaaaaaaggataaatacatcatgatcaagtgagatttatccctgcaattcaaggtgggtttaacattcgaaaatcgatcactatgattcaccacattaataaactaccatggaaccatcaccacgaacaagatttaaaacagttttattacccacaaaattctctggtgttcatttgtagtcagccctaccctaggcctttgcaaccgctgatctttttcctgtccctatggttttgcctttttgagaaagctatataaatgaatcattaatatgaataattacatataaatacgtaatattttgagtttggcttttttcacttaacattatgcattcaagatttgttccataacaataccatggtaatttttaaaaaaacaacaacaaaagcccgggtgcggtggctcaagcctgtaatcccagcactttgggaggccgaggcgggcggatcacgaggtcaggagatcgagaccagcctgactaacacagtgaaaccccgtctctactaaaattacgaaaaaattagccgggcgtggtggcgggcgcctgtagtcccagctactcgggaggctgaggcagcagaattgcttgaacctcggaggcaaaggttgcagtgagccgagatcgcgccattgcactccagcctgggcgacggagcaagactccgtttcaaaagaaaaaaaaaaagaaaagaaaatttgtgcatgttgtatcagcagttcattcatttttattgcagaatagtattccaatgtggaggtatcagagtttgtttatccattatctagtcgcgagacacttggttcgtttagtggttatgaataaagcttctgtaaaatttggaatacacatattttaaatgtacggtttaatgaattttgataaatgtatacatccacttaacctccagcctaattacgatatggaaaccctgtgtgttccctcctgtctttttctagtcaatctttcctaacctttattctgattcccataaccacaactttttccttcctgtcctagccaagttcatataaaaggaattatgcagtatagaaggaattgacattccttttatcccaagaggaataagtgattgaagacttttaagaaggaaataggcacaatctgatttatgtttgtaatgatctttttggctactgtgcgaagaatggtgagtatgccacttaagtattatttttcttcccatcttccagggggaatatgactcaatgaaattcttgggtcgaccagaatttccatactggacccattattaagggaacctggaattatttctgccattcccgattcttcccagcagatggccccaaagttcagttcctgaattgcctcgcggagccgcgggctgcaacgtgaggcggccgctgccagtcgactcaaccaccggagtggcccctgcagttggatagcaacgagaatcctccaggggtgcagggcgacggcttcggccgcaccgcgggctagccagggctgcgtgcccgcctctgaccctcagcagaggtgtctctggccaggaggagctgaagttctgcaggacattggtccgcccgcggacagtccactccgcggggactttctctggataaggagtgcgtgcgagtggctcccaggcagacagggtgtctagaaggctacacgctagggaaggtggctccttggatttaaagaggaggaaaggagggggcatctaaactaggctttggagagaactaatgggaggggcgcccggggtgggggggcgggctggaaaacagaggggacagccaggactggtgttgggtgtcagggaacagacggagcggactgcgtgggtccagccaaggaaagtgaagcaagcagacttgtttgggtcaaggttgcctagggaagcggagcacttaagtgcctctttttccccttctccagcctcctccacagtggtgaggtcacagccccttggagccctccctcttcccacccctcccgctcccgggtctcctttggcctggggtaacccgaggtgcagagctga

SEQ ID NO: 12799 - DNA, 2300 bp, Homo sapien
aattttattgtccattaatatgttcatcccaagtgaataaatcaaaccccttcagctttcaggtcagaattcttcaaagctcttgaacaccacatctccaccttctacctgctccactgaaacttcttacactcaactcctactggttcttcaggaggtagctcaaagccttcgctgaacctcagtttaagtaaatatccctcacccctacaaagagcatactcaagcacacttatacaattataactctgtgtttatgtaattatttgattaatatgcagctcccacactagactgtaagatccctgcagacagggacgtgttggtggtgttctccattaagtccagagtgtgacacagtgtctgggatatagttagtccttagtaaagatttgcagaatgaaggaagtaatgagcaatgtagagggcatatggcccctcttcagtggggaatcccctgttgtgtggaatattagaaggacccagttctgcgtctcctatttcagacgccaaaagtgggcgggtgaccacctttctcttcctacctccagcagctatggcttgccagccaatcaaatgctcccatacaggatactactcccaggtaggatatttaaagagacagggacagttgggaaattattgatggcagcacatagacagtctggcagctacaagaccgcagatgtccagtggctgtggtttctatattgcccatggaattgtcctaaacagatgattcactgtggctccagttccttgcccacagtaggccttggcctattttcaaagcctggtcctacagtaattctgtaaattacatgttctttcaaaatattttttttcttccttaacctaaacagagttggttttctgttacttatcatcagaaaccttgactgatttaaatacacacatatatatctgtctaaatatatatacacataggtatacagatatattccctctctctatatattctctctcatatatatatgatggacacattttattgttcattattatgttcattccaagtgaataaatcaaatccctttaactttcaggtcagaattcttcactcctcttagaacagtgtttcatatgtatgggagaggagagagagaatggaaaagaataattcacagagcctggatatatgaaatgaagtcacctttatatgtgtggggctgtgtttggggagcacgtgggtgttgaagcagggggcttctctttagcttggaaacaattgttattcagattacaaccactgattgtgactaaaaccattgtgaaatatacaaaacatccacatttctttaagtgtggaacaaagatgacttggaggtacgtgagattattttaggtggagtgcccacctggcattaaataaccgtgaatcacacagtgagaaagtaattcctttctctattgtctttccatcctttcgatactaccaaggacaccgtgccagattgttatctctttaatacttattaacacttactttgcttcctttttaacaaagagaaggcagctgtaggctcagtgtattcacagacaatagtctgtagctagaatttaattatatttttgttttttctgtctttagttttctggttacctcttatttgtacgaagtcatgctaattttccacttgtaacctttctaaataaatttcagttagagaagcgagtcaacttaaaaatactgagtaaataacagcacagatggaacacagggtacaaatgccaaagatgatgaatgattgtcttcagtttagtaaacagtaggagagtccatcaattagagccacagatgcagaatgcaaatgagtaaaaacagaacctgaaaacaacagctccttcagaaacatatctgaaggcacacaggtgtccaaaccacttacttcgtcgaaacccaagaccacagatggcagtggggttggagaaggcagatgtagcagttactgtcataatgaaactgaaagcagggttaaaacaacacagtaaggcgtgccagcactttctggaggaagaatccacacaaatacatagagtggtgcagaatggttgtcaaatcctttctacctccttattcagagaaggaaggatcttctcatgcacagaggcaacaaatggcaactttctgagtaagagagggtgatgggtcaatcttgttatccttggttttgagatatatgatctataattatatgccaacatttaaatttttaattttattctcttgcttcatttaagtttccttaaatcagtaattttcaatggaagagagtgat

SEQ ID NO: 12800 - DNA, 2300 bp, Homo sapien
aagtctcaaaaagcagagctaggatcaataaatggaagttggagaagcagatttccgtaagggtaaactctgaaagattttacaagagagctgttccaaaaaggaataacttaatttgaaattctttgctcactgtttctaatcgtatttaagcagacactgcacaaccatttgccaggaatatgtcatgaagaatgtttgcactgggaggttaggccatggaattttaggaatgagatctcagaaaatatctgtacctggccgggtgcagtggctcacgcctgtaatcccagcactttgggaggccgaggtgggggatcacctgaggtcaagagttcaagaccagcctggccagcctggtgaaacccatctctacaaaaatacaaaaattagctgggcgtgatggtgagtgcctgtaatcccagctactcaggaggctgaggcaggagaatcacttgaacctgggagggggaggttgcagtgagccaagatcgtgccattgcactccagcctggataacagagtgagactctgtctcaaagaaaaaaaagaaaaagaaaatatctatacctgttgagcatttctgcattattatatgaaacagactgatttagtaaaagcgtactggaccaagacttgaaaatcatgattgtcacttagtagcagtatacacttggtcaaaccattgaaccctatccaatctgtcatttcttcttctgaaaatgaaagcctgaactagttgatttttttttttttttaggtacctttagatcatagaatagggagaaccagggggccttctttgcagaagatgtggaacttgaacattaaataattagtgtgacttactgggaaaaggaagaaaggtcacttcagttcattaagttttacaactcctctcccccaccaaatccatggaattacaaacaactacggactataagtgaaggcaaagatgggagtgcccagagcctgcccttcagctctttttgtttaactgtggatgtacatagtttttgaaatctggtgtaagtgactggatgattagcatcctttagatgtatttttaaaatactgctatgtataaggttccatggtagttaggtcttgagaactctataaggagttttattttggtagaagaaatgagtccataattgtattacttacaaataatgtaagaaatgtcaatgaaaataccattgggaatttaacagtggaaaagaatagttttagctggtaagatttgggaaagctttgtggaggatagtctttttgaggtagaccttgaaaatatatatgcaaacctggtagagagataagacattttgtaaagaaatattttttaactactttaatgaacacaagtactaaaagctataaaatagtactaattacagataaatttgtttttagacccacctagtgagttttgtgtgtggtttttttgttgttgttgttctttttggtgaaattaaactttattaagaaaccaatttttaggccaggtgctgtgactcacgcttgtaatcccaacactttgggaggctgagatagaaggatcacgtgaggccaggagctcgagcccagcctgcacaacataggagacccttcttctacaaaaacaaaccaatttgcaaatacaatactgtaaatactgttttgtgggggggtgtgtgtgtacgtgtgtgtgtgtatgggttttttgttacttgttttctctgttttctgattgtatctctcaatttttaaaatgttgtttttgtttagatacacagaagtaaaaacaaatggaaatttcatctcaaggatggcattatgaatcttaatggaagagattatatattttccaaagccattggagatgcagaatggtgaagagttgctttttttcttttataaataaaagaaacttaaaaaaaatgtaaagcggacagtttgaaacttggggcatatgccaaccaaaacttcgtttctgcatgtcagaaaagtgcagtagaagcaaagctactggaacaaagatagaccttgacaacatagacactacttactggcaagccatggaactgtagcacctagggtttttgggtgggagggttggggttttgtgtaggaaaaccataattgttgattttaaatacaggtacctgccaccggtaattagcatgtaaagctttgtctatattccttcctccaacttgggttcaatcagaagatacttgttggaatgaactgaagaaacttcccttttgatagattgaactgaaactgcttattgtatgtggttatatttggtaaaa

SEQ ID NO: 12801 - DNA, 2300 bp, Homo sapien
tttgttttaaataattaattttgaaaattgtaaacaaaaagggacagcgattcggatatattccccctagcaaacaaagaaggcaaatcctagctgctgctgggaacaaaaccaaaacttggggctctgaaagcagcccgcgacgggtgcgaaatcacagggtgaaaaaaggacctagaaataaactgagctctgcacacgcctggctcttgcctcgggagcacgcacctcccagccccgctctcagcagctctcactatttaaagccggatctggtgtttaaatggagaggcggtgacgtaggcctgaaaagcaccttcccatcctggcagagtctatattagagagcggcaatggctctatataaacagggcagccaaagggaggaggaccacaaggctcagggactgaaaagcagggtaagcggccgcagccatgatggttagacccgagtcgccaacggtacggtgtcgggcggccgcgggctggtctgcggcatttgggaccgggcaaaaaacgtgttttattgtcatcataaaaataagagttgggtggactagtgatcacactgcgttggtgactgaaaaggttatttatgtgactgctttttgcaaacctacgtgatcgcaagtaacaaaaagggaccaacgggaagaagtaggtaaatttcaaggcgaaagcggggacacttggaccactgcaggctttttttgtttgttttggtgcttctgctaggcgaagatacgatgggggtcttccccttcgccattttacccattcggaaggaactgagataagtgcttttcaaccaaccttcgtcctttttttaaacataaaatggcctcagagaaggttcccaaagcacagccgccaaaaacaacctaagaaacccccaaagtaaccattaatcttccactgcattaaagtggatcacgatgggtctcgggggttcgcccgattccccacacacagtttttgttctgtagccactcggggagccctcgtcaagccagcgcggacgggcccctcggggggaagcggcggctcccctcccgccctccctcccggcggccgggttctggggccggggctgcgcgcccgaccgggcccaaccgcctccgcggcccggcccggcccgcggcggccccaggccccaccggcgcccccgccctccccgcgccgcgagccctcggcgcccccccgcgcccgccgcccggcgctccggcccgatccgcccgaggcgggaagcggcggcggcggcggccgcgcgggcggctgaagagtcgaggccgggagtcgccgccgtccccgcccccgcccggtccggccgttgctgcagcctgaacgaagcccccgccggccaccgaaccacgtccttaccacggtgtttgtatttgccgagttcgccatttccacacacaacacaaacaagagggggcaaccccaagaaaacaagataaaaacaaaaccaaaaaaaaaaaaactataacacccggagggtgacccaaatcaccgcaagattggggaaaaaattttaaacaaaatcaatcctgaaggagtaggggagagcggagagaggaggaggaggggggcactcctcccgcagctgaaaacctcgagaatcgccttaaaaaaaaaaaaaaagccacgacccttcaggggtccggggggcgttgcccgctccccaccccgcgccaaggagggaaaccaccaccggtcaccgctccctgcgccgccgctgccgccaccggctgcagctccagccgtccggtccgcccgcttctctcctttatatagcgagccaacaagctgcgcgagccaccaccgccgccgccgccgccgccgagagacagggtgaagggggagggaggggcggaaagggcgggggcagaggtgggcggggctgagcgcgagacaccgcgagagccgcgtgcgcaggcgcgccggggcggaggccgccggcgagccgcgttgtcacgcgccgtggcgggtactggactggcggagcccggggagtgaagtagtgaaatcggacctacgcctctccaacgctcgcgtgatcacgtggttggcacccaggcggaagtctgcggcagttctttgcggtgaagaacttgcaaagcgttgctggaaaagacgggagttctactgacactccagtccaaagctaggtgggaccgcctcctgtcgcacgtttccgcctggtcccgcgctttaggagctaggaaatgtgacagaggcggtgcctactgcctcgctaggaatggccgcggaggaggactggtcacgtggcgtggctt

SEQ ID NO: 12802 - DNA, 2300 bp, Homo sapien
tataacagaaaatatttctttccgaaactaaactggatggcacacatatgttgcaatgaaggcatataacagctattgagggactggaaaaccaatatattggaatggaatccatgatggctagatgccagacacacaagcaatctaagttcctgggtaaatattaaccaagtgcttaggtcttgttgcaatctaggtgtaaagagagaagccaactcagagcctccagggagtctgatggtcttaaggaggccaagactaggttttctgccattttaatccagtaactacaatccattatttcacagattaattctgtgaagagcaaacctcgtagcttttcttccctgtcctgtctgcagtggttttaactttaattgatggcgaaactactcaaccttttagtcaagaatatcaatagtaggggggaaaactaggtggaaggtgagggattccatgtgcaaagcgtttgggagtatgtaatagggaggtaacaagaagtcctctcaatatgtagtaaaacttaacaggaatggtattgtttagtgtaaattttcgggctgtcacctgaatattaaatgaattacaaatgttgatagaatcataactttatataatataccaagaacactgatttcctgtgatttttttctttaagtgtcccagaccatgcagctgtgcaggaaactgggaagcaactgttaacaggggaatggacttggcgtgaaaagaaatgtcaaggttcatagatatcctctacacccattcacaatctcccattttctgagtattcaaggcctctggtttctctaatccctttcttcaagtcttggcaagatgcattttttttcctctttggtaagacgcctttgatattcttcaaatctggtttcaccagcacagaactttgacgtttcgttttgctttgtctctggaagacaaactccctcactcatccacgcgacatttcaagtccctcaaaattcccagggacaagaaaactaggtactatgaattctgccttccaaacagcattctctgttctgcttgcaaggtcgatataaaggcaggatttgcttgggcagaacaagtcaaaagcttattgaattgcacttattgaattgaacatggaacacagccggcttgctctcttatagcgagaggccatgcgagttggtgggtcaagggcatgcatttcaaagtgatcagtcactatacgttggccacatggagtcgcagtattttggcaatatttttaaaaaccagggaaagttactgtgctgttacaatccaaaggctggtggggttttcttccaccccgcatttccactagcgtgataaattatttaaagtacgtggcctagtagaggactaacctctgggtaacataagcctagtcttcgcagcgtacccactgtggaaacaaacgaatcagacgttactaattgtggaatgttaaaagtaggccccgatcggcttttactccctttggaaaatcctacacaattctgcgcgcgaaagacccaccctcggtgaggcggtgaggcgcgaacgccgcgaagctcacagtcaaagcctcgctgacaaatcaagagatgactccgcatttaaaaccttcccgaataggaacgcgccagaggccggaagccacgccacgtgaccagtcctcctccgcggccattcctagcgaggcagtaggcaccgcctctgtcacatttcctagctcctaaagcgcgggaccaggcggaaacgtgcgacaggaggcggtcccacctagctttggactggagtgtcagtagaactcccgtcttttccagcaacgctttgcaagttcttcaccgcaaagaactgccgcagacttccgcctgggtgccaaccacgtgatcacgcgagcgttggagaggcgtaggtccgatttcactacttcactccccgggctccgccagtccagtacccgccacggcgcgtgacaacgcggctcgccggcggcctccgccccggcgcgcctgcgcacgcggctctcgcggtgtctcgcgctcagccccgcccacctctgcccccgccctttccgcccctccctcccccttcaccctgtctctcggcggcggcggcggcggcggtggtggctcgcgcagcttgttggctcgctatataaaggagagaagcgggcggaccggacggctggagctgcagccggtggcggcagcggcggcgcagggagcggtgaccggtggtggtttccctccttggcgcggggtggggagcgggcaacgccccccggacccctgaagggtcgtggc

SEQ ID NO: 12803 - DNA, 2300 bp, Homo sapien
aaaatttatacatcgattttttttcccttttcttctcttgttttacagttatctagtgtttaggctgcatattaaaagaaagacgcaacattttaactcccagtataaatcattttgaagttaaaaaaaacacataaacattcatcacaaggagagtactattatgtatctatctaagtacatagctgctacaaagtgtaagatcacaaacagcaaatcctgtataaatgttttatatagtagaaagagctgttaaagttagaaacgtcattcaagctgtaggagaccaagaataaaaagttcagatagaaacaatttaaatatgatgctaaatgtaatcttacttgggagaagttttctctcacaaattttgttttgtgaattaaagggctgcagcttccaagtattcagtcctacaattttggtataacagaaaatatttctttccgaaactaaactggatggcacacatatgttgcaatgaaggcatataacagctattgagggactggaaaaccaatatattggaatggaatccatgatggctagatgccagacacacaagcaatctaagttcctgggtaaatattaaccaagtgcttaggtcttgttgcaatctaggtgtaaagagagaagccaactcagagcctccagggagtctgatggtcttaaggaggccaagactaggttttctgccattttaatccagtaactacaatccattatttcacagattaattctgtgaagagcaaacctcgtagcttttcttccctgtcctgtctgcagtggttttaactttaattgatggcgaaactactcaaccttttagtcaagaatatcaatagtaggggggaaaactaggtggaaggtgagggattccatgtgcaaagcgtttgggagtatgtaatagggaggtaacaagaagtcctctcaatatgtagtaaaacttaacaggaatggtattgtttagtgtaaattttcgggctgtcacctgaatattaaatgaattacaaatgttgatagaatcataactttatataatataccaagaacactgatttcctgtgatttttttctttaagtgtcccagaccatgcagctgtgcaggaaactgggaagcaactgttaacaggggaatggacttggcgtgaaaagaaatgtcaaggttcatagatatcctctacacccattcacaatctcccattttctgagtattcaaggcctctggtttctctaatccctttcttcaagtcttggcaagatgcattttttttcctctttggtaagacgcctttgatattcttcaaatctggtttcaccagcacagaactttgacgtttcgttttgctttgtctctggaagacaaactccctcactcatccacgcgacatttcaagtccctcaaaattcccagggacaagaaaactaggtactatgaattctgccttccaaacagcattctctgttctgcttgcaaggtcgatataaaggcaggatttgcttgggcagaacaagtcaaaagcttattgaattgcacttattgaattgaacatggaacacagccggcttgctctcttatagcgagaggccatgcgagttggtgggtcaagggcatgcatttcaaagtgatcagtcactatacgttggccacatggagtcgcagtattttggcaatatttttaaaaaccagggaaagttactgtgctgttacaatccaaaggctggtggggttttcttccaccccgcatttccactagcgtgataaattatttaaagtacgtggcctagtagaggactaacctctgggtaacataagcctagtcttcgcagcgtacccactgtggaaacaaacgaatcagacgttactaattgtggaatgttaaaagtaggccccgatcggcttttactccctttggaaaatcctacacaattctgcgcgcgaaagacccaccctcggtgaggcggtgaggcgcgaacgccgcgaagctcacagtcaaagcctcgctgacaaatcaagagatgactccgcatttaaaaccttcccgaataggaacgcgccagaggccggaagccacgccacgtgaccagtcctcctccgcggccattcctagcgaggcagtaggcaccgcctctgtcacatttcctagctcctaaagcgcgggaccaggcggaaacgtgcgacaggaggcggtcccacctagctttggactggagtgtcagtagaactcccgtcttttccagcaacgctttgcaagttcttcaccgcaaagaactgccgcagacttccgcctgggtgcca

SEQ ID NO: 12804 - DNA, 2300 bp, Homo sapien
tattgtaggcttcaatttcttaacactcacccaattgttgaatatttaaaatatttttccctattataaataatgccaaaatggacatctctgttcttcaaacttggttcataatttagatttattttcttagggtagaattactaagtcattgtttattaacatgtgttaagatccttaatataaattgcccaatctcttttcagagcatctgttgcaacttagtttcactaagcatccacttagtgctcctattatggcacctttaccctcattgagcactaaaatctttcaaaatcttcactgattttttttttttcatttttcatttttgagacagagtctcgctctgttgcccaggctggagtgcagtggcacaatctccgctgacttctatctctgcctcctgggttcaagtgattctcctgcctcagcctcccaagccgctgggataacaggtgcctgccactacgcccagctaatttttttgtatttttagtagacattgggtttcaccacgttggccaggctggtgccgaattcctgacctcgtgatttgcccacctcggcctcccaaagtgctgggattacaggcatgagccactgtgcccggccatttttcttattactagtgagattcgatatttttcacatacttactagacattttttagtttctctttcatgagttgtctatgttctttactcagacttcttttggggtttttgtgtttttcttattcacatgtatgaacctactgaatattaagaaggttaactgtttgtctttaatatttattcattatgtttaggctaaaatccctccaagaatattatttataatcatattatcacttacagacgataacttggtttttttcagtgagatgagcttatatcattttatataggagatggctttcaatgtttaaaaattaagaacacattcctcaaagctaagtacagaacacatctattccagaagcttttataaaataaggaagagtatataaattgcaagagaccttggtactaccagtcaatacttctgtattgatatagccattgggttcttattgcacttaatgcgatagctcctctggggtgctcattacagaattgtgagatctatgcccagactaagcacttgaaacagataatgagctgctttggaatgtactggattccagttaaaattctagtaatccctcattcctatacttcagttttccttacctctagagcccctgaacagtagctcatatgttctccttttccttttagacaattcctcctcgcttcaagaagatgaagaagtagagatggaggccatcagctggcaggccagcagtccagccatgaatgggcaccctgcccctccagtgacctctgctcgttttcccagctgggtcacctttgatgacaatgaagtcagctgccctttaccaccagtcacctctcctctgaagccaaatacaccaccaagtgcatctgtgatcccagatgtaccttataattcaatgggatcatttaagaagagggaccgtcccaagagcactttgatgaacttctccaaagttcagaagctggatatttcctctttaaaccgcacgccttctgtaactgaggcttcaccttggagggcaaccaaccctttcctgaatgagactctgcaggatgtacagccctcccctatcaaccctttcagtgctttctttgaggagcaggagaggcgctcccaaaacagttccatttccagtaccacgggcaaaagccaaagagattccctcattgtcatctaccaggatgccatcagttttgatgattcaagcaaaacccagtcacactctgatgctgttgaaaaactcaaacaactccaaattgatgaccctgatcactttggcagtgcaactctacctgatgatgacccagtagcctggattgaactagatgctcacccgcctggatcagcacggtcccagcctcgtgacgggtggccaatgatgttgaggatccctgagaagaaaaacatcatgtcctccaggcactggggaccgatcttcgtcaaactgacagacactggttacctgcagctgtattatgagcagggcctagaaaaaccattccgtgagttcaagctggagatctgtcatgagatttcagaaccccggcttcaaaactatgatgagaatggcagaatccacagcttgcggatagaccgtgtcacctataaagagaagaagaaataccagcccaaacctgctgtggcccacacagcagagagggaacaggtgattaag

SEQ ID NO: 12805 - DNA, 2300 bp, Homo sapien
atctttaaaacctttcagtttaaaatttttaaatattttcctcttaccttcaccttcgtcccctgttctcttccctaccccacttatccatgacttttgctgggttcatcattgcaggattggcaggatgttttccccattgagtgatgacactgcatgtgtcagcatagggacttgtattgtgggtttttttttttttttttttgacgggtgctgtggggctggtttacatgctgctgtcgttgaaagaggaggaatctgactcttcaattttactgccttatcttggcccgcagccattaccacattgagtgacacacatttgacagggcttgagaaagtcgtcaaaggcagaagccagtgggaatcagctctttgtgcttgtggaccctgcactgctctctggtaagatctggtttgggagacctgctctctccaggctgtttgcctatgtctggccttgtggttggcaaggatcctaggagagggacttggagaagaggcttctgggcttcccatcctttatacagcttggggtgtgctggcaaactttcacatggggagtttcccggacatttcattacagttccattgtaattgatatttgtaaagtacttaagttgggtgatagtctatatgtactgtattctgttgtacttctttgcggctgtgacaccagggttagagtgttttggctgcagaagacctgggctcaagggttggatctatcacttagtgtggtgcttcaaacacacctgcttgttatggcttttacttgattattctttgggtgagatcttattatgaagaaaagtcagccactgtgctgagatttgtaaactcttccacttagcctggaggaagcattttaccaaaagggcctggaagcactaaaagtattaggtaagtcacttaatttttctcagcccaaatttctttatccatagaagaattagagtactatgagtcctactcatcaaaatggctactgaatcaagtgaagtatggtatgaaaatgtgtttctgaaaattataaattctatataaacattagttgtttttaggaagcatcatatgccaaaactgttttaaacaccaaaaaagcaaaagctgttcatgtttttaccgattttcccacctagagattatttactgcagatgataacctgtagtaaaatttcctaaacttttcattgtgcagcaattggaagactgtgagttaagttgttctagaaactatctgaatattgtgtatatttagttaataagaactgatattgttcaaggtatatagtagctcttctatggaagcacattaattttagataaattcagattttattaattcattataaatcattattagatcaagagctaggttcaggttgtaaaaagatattaataccatgaacaaaattatgtcaattaagaatctttctgtattcctagaacataattgcagtgtgagcaaaggctagaccattgtaactaatttaaataggcctagattgaaaatgttactctaactcacatttttcactaccacagatgttccctatcctcttactccaaatgaacaagatcacttcatttctatttttcttgattgataaaccatgcttggagataccatctggagattgttgggtttctgccagagatttaaatcaggtttataaagagttacctgcctaaggcaagaaactggactaatttaatagaaaagaacatgcttttattttgccagctagtaagagaaagtgaaagcattttgaaaagttttaatatttgtttagcaatgatagtattatagatgacaatatttctaaaatacaataattagggaaattagagaatctaattgctgaaatttgtgtaattatttgcaagtgtgatatgaaggcttatctagaaaccttgatgctaaagacagacatttcagtataaaaggtgagggcatgacaggaacagagtgaagtaaggcaagttggaaaccaccccaagccttcttgtgggcagcgctaaaagccctagacctatgtggattcagtgtaatgtgatggttatcctttttaattttttgtttgtttgtttgttaaacagatttctgcctggcagattaaccaacggcaagagaggctgatctgtctacattctgagtactgcccttggcaagacacctagaacagaccctggacccaagtctaccgtactaccatacccctactccagcccaccccagacagtattctggggttcacctgaggtcagcagtgtgaagatgaccagtgcctttttag

SEQ ID NO: 12806 - DNA, 2300 bp, Homo sapien
ctggactctgatttggccctcttaacatgttcattgtattaataggaaagcactttggagctaaggatgtcaaacgtctatataaataaaatctaatcctattataaactctgtcaaacttgcaggcagttggtcctactccacttgcagtctaacctggaaaggtcaaatgacttgttgaaagtcatgcagaaatcccctggtgcttctataataactgaccctgcttcccctgacatttggtggtgtctagcttaagtcacttcatatctccgtaaggatggtgacactaagaatgacattaagatgacactagggctcctgtcatttagataggatttctcctactcatattatgccccatgggggctctcagctgtgaccccaaagggtccttgttaattttaagcttggggtgagatcattgtacacttctctttcaggcttctccctggctttcattgaaagaaggtaccattttagtgctgtgtgtccatgcaaacacaccatctgaatgaaagggcattctcaagcatatttcatgccaaatgccgagaagtagagtgggaccatcagtggctttctatctacctgaactttgaagttagacactagaccattgccagcttgatagtccttccattggctgccctttgaagttagctaactggtttaaaaaaaccaaatgggatactttaaatgaaaacagattttatttgtttgccttagaaacggaaaacatttatcttaagtttttttggtttttgtttctgtttttttttgagacagagtatcattgtgtcacccaggctggagtgcagtggcaggatctcagttcactgcagcctctgcctcctgggttcaagcgattctcatgtctctccttccccagtagctgggactacaggtgtgtgccaccatgcctggctaatttttgtgttttcagtagagacggggtttcgccatgttggcctggctagtctcgaacttctggcctcaagcagcccacctgcctcagcctcccaaagttctgggattacaggcgtgagccaccatgcctggcccatttgtcttaagcttttaaaagagaataatgataatgccatggttaagtggataaggctggggtgatccatatttggtagacgtatccagttatacgttgtttaaatgtcgtctattatgtgaactcagagctgtcaaaaataatactttgtgtttttccccatccttgccaaacataaaatattcatttttttctaaatcattccgtgtccctacatttccctctacttcagactttgaacagttgaagggtggaaaacttttatcattgctgaaattatcaaaaacactatcaatagctatcatgcgttgagttttacgtccactgctgagtggttataccatgttattttacttaatttgcacctcaacgctgtaaggtcaggaggagtagcatctcatctaaggagtagcattacatgaggagtagcatttcatgagacagaggctggagctaagtactttgtcaaaggttgtaatggagctgggctttaaacctacctctcttaatcgcttagatctagaagctatgccctgagtcactgtggtatctggaagcaaaaggaaatgtgctctaaagagttaacaggggctatctgtgcactctggccacaccctgggagatgcctggtaggaggaaaactgcttttgtttttgcacggtcagttcacagtatcagcagggcagtcaaagcacacttttttctctctctctttttttttttcccatctcatccttattctttttgttatgatctctaaaaagttggtgagttagggagtgaggatctatttgagtaaatccagcatgtttctcagtcaccacccatcaacctaattggcataggcggggctgtgctgtctgcaacacagccagctcctccagctgtgccatccatcatactcaggcaccctggagcgcacatgctctgcttccggttgattttaagttcccgattcctgagcaggccttggggaggcagtcccaaggagtcagagttgtttgctgtcgcatatcagactccggtctgggtgacttggctggtcacagcacagtgctcctgggcccaggggctgtgatctcctgtcatttggttgccattttcctgtgaagagggtagagaatatgcacccagtcaggtcaggcactttgcagaggtgggtcctggctataagaaagccagataagagtgcaggttcatttatgcatgtatgtttctactcataggaaaacaa

SEQ ID NO: 12807 - DNA, 2300 bp, Homo sapien
ctggaattaatgatggatacaccaagatctaaattaagctgttttctactagatggcattatgatgtggaaatgggtgctatcaaattctggctggttaaatgttctcccagttcaatgatttgtacatcttgtttttcattgtaaattatattaatctgtatcagtgtgttagcttgtattagattcacatatttactcagtaagaattctttcattagagttttattcttcatatataagccttctctgatacttagctaaatcttaagtctattatctcgtgtgatttttttttttcttacagatggcattggagtcaagagagattataaacaggccttgaagtattttaatttagcttctcagggaggccatatcttggctttctataacctagctcagatgcatgccagtggcaccggcgtgatgcgatcatgtcacactgcagtggaggtaaggtctttcctaccagcttgtgtgtagggagttgatttgcccagcaggaaagtctgcgctttcaattctggtttttttgtatgttttcttctgtagttctagactcagcctacctagctttgatatactgagggaagaccgaggggtctgtgtgtaattaccatacttatttattcagtgtctccctattacaatcaactgtataaggggagatactggtgtctgcagtatctctagcacctaagacagtatctgataataatcagcatcaaaaaaatatataagctgagcacaatggcacgtgcctatagtcccagctacttaggaggttgaggtggatgaaggcttgagcccaggagtttgagaccaacctggacaacatagaaagaacctatctcttaaaaaaaaaaaaaaaagaaagaaagaaaaagaagttgaatgaatgttccaaaaaggaatgctaatatctcctaattggaaattgtctcttagctctctcttagacttggcactttagagtgacattgataaatgcttagcaaagtttctaaatctctgtgctttagtttactcacttgtcaaatggggcttttaacaggacttacctcctagggtggttcctcatgaatctcatgggaagattaagaatggtaatatacataaatcattacaacagtgcccgggcagagtaaatggtcatttttgtagtacaataattgtgtactgttttttttttttataaacctgttgacttctaaagagtaagtgaaaactttaaataagtatctcaaacttttatgtctgttcaagaaagctgccagaaattgaaggagcaagcttaatagtcatgtgtaaccaaagtgcataagtgattttctggtatatctttcttattttcttctactgatattttttttccccacctcacacagttgtttaagaatgtatgtgaacgaggccgttggtctgaaaggcttatgactgcctataacagctataaagatggcgattacaatgctgcagtgatccagtacctcctcctggctgaacagggctatgaagtggcacaaagcaatgcagcctttattcttgatcagagtaaggttcattttagtcctgccttaggtttagaatgtacgagttcacaccagtaaactgtttaatgtattcaaaaagaaaagctactaggaaacattctttattattgtaactggaactgaacacacaggcttaagttattaatattttactttagccatcaaagttagttttataacgagttgactgtagaaatggatttgacattcattttaaaattaagcactttgcataaatgtatttttcaaaatacagtggatacaaaaatgccattttcccaacactgtagaagagtgactcagtagtctcatgactggttctatagatacaacatgtttcacaaagtagtgccctcttgcatccagtgattgctttgaactcactattttagttcagtaattaatttcagtatttgttttaatttttatatcctaattcttgtttaacttatgcttcacctatccttcctactttgcaaatgaaaattaagtctagtgccttttcttaaatgcctgatttgtatttcatttcttttcctgtaggagaagcaagcattgtaggtgagaatgaaacttatcccagagctttgctacattggaacagggccgcctctcaaggtaagtgattaattctaagataagagtttcacccagggacctccctatgttgtttatctcccatgaacattaaatcatgaagccgagtactgtggctcacgcctgtaaccctagcactttcggaagc

SEQ ID NO: 12808 - DNA, 2300 bp, Homo sapien
atagattcttagagaaatgaagattaatgaggacagatctggttggagaagtgtgatccaagacgaaatgtgaatgaaattgggaaggatgccagagttatggctaagtgaaagaagcaagggcagttggagaaagggtagaggaacccttaggaagacatgattgtgttaatgtgaaatctggaaagtaaaacggaagtggctatttggtccatgcagcagcacccagaacaacccttaaatataagacgtactcagtaaagacaaaactgaaaaaagaagttggggcttaactaagcagcaaactttccccagttttaatcaaacagataatcactggctcttctgtagaaggcagaagtttcttccctggtacttccccaacagagtagaactgtcagcacagttcctattttgtgagtagaataagttctaattttttttattctgtgaaaagtgtagccattgaaaattttcaataggcatatgaaagcagtgtttaaggaaaattaatatggccatgatatgtgattcaggttaaagggagaatgatgtcagtgagtatggctggaactcaggtgcatcatccaggtgagagaaaatgaaagccattaggggagttttcagtgaggaagagaacagaggtacataataaaataaaacaatttaaaagttacatagtttaaactgatagaacttgattatcaataagatgaaaaagaaaggaaaatataccagattttactctatgatttataatcagaggaactcagagggaacattgttagtgacagaaatggtgatgtagctgaaaagacaagtttttggaggagataattctttccttcatctcctccgatgtgaatgagaaacagtggttggttttttaccatcttcctgaaaataaaaggctgtatctcaaaaaacaaaaaacaaaaaacaaaaaaaaaaaggaaggaagacaaatgcccagaagtgttaagacacatggccagcagagacttttccaaagtccttcacttggctggactaggttctaggccttagagctgactgtgggtggatgacagggaaagcagaatgacacggtttgagaaaagaaagggcaggcacaccaagtcactgctctgctactcagttggaacatgcctggatttcgtgcttattacatagagtatttccgtgcctgcgatgcaatcactatcacctctacctccacacacgtgaacctggtctcctgactttagttaggaaagaagagaacaatgcaactcacaagaggagaaggatgaggacaagtgtttaaaataatttttcaaagctgttggcacattttctttatgattattgtctggtgaacctagtgaaaataaatactgtattgagataatctgtgccgagcggatttatttccttttgttttgtcggagaaaggaggacaggtactgagttgcaccctggtttccgtacttcacggtactgttttatctaagttttaaaaaacacctcaaattcaactagctgtggcatttttctcagtgctcttatcactatgcccaatttaaattttttaaataaaacaggaaaagatgctaaacacattacaagttcttaaaattattccttaatatttattttgggtcaatttaaaaaggcttgtgaatccatagccttgagttaatatttagcccaggtgttagttaaattctaacttcaacagtcacccgcacttgtaaatcttgccctacgatggactacgtttcccaagagcaccccccgagttaatcacatgaagcgcattctgggaattgtagtctcggatgagcctctttctcccagtcttggactcacgcgctgattccggttgaacccaggggctaccaattagctggggccatgtccgtgagtcgtggtccaaccgagaaagctggtgtgggagcttcgtacaatgattggccaatgaatgacccccggggcggagcaatgggggtgggcggggagaccatggtgattggaccagaagcccgcgacggcgggcggggattggctgcgcgctgggtcagggaagcctgggaaggggcggaggaaggagactagagcaggaagagcagcggcgaggcggcggtggtggctgagtccgtggtggcagaggcgaaggcgacagctctaggggttggcaccggccccgagaggaggatgcgggtccggatagggctgacgctgctgctgtgtgcggtgctgctgagcttggcctcggcgtcctcgggtcagtatccgccccctcgggctgaaggcccaga

SEQ ID NO: 12809 - DNA, 2300 bp, Homo sapien
gctcagcctcacataccaggtacacgtcccagctctgtgcttagtgcctgggtgactgaagacaagtgaaacttttctggccttctgtttcttcatctgccaaatggtgtgatgatataataatacccattcatgggacgtaccataaaccctaaaggaggcattctgggaaaagtgaataacacgtggtttagcatggtaaagcttagttcccttttctagctgctcctcctcctttatctgcgtgtttaccaaacgagaatgagacacctaagagtctgtttcttttaaaagctggcattcaaatttttactcaataaatctgagtccctactgtgtaccaaacaccattataggttcagaggatggaaaagtttccaccctggtggaacaaccgtgtaatatgaagggatcttggaagaaaataatataaaatcagggcaaaaagacttcagtctgagatatcatggagaagaaacacctctcagaatggattttgaaaaaggaggagggggagataaacaaatactgaaattaaggaacacacctggtattctccttggagacagaacggacagccaccaggctgttgtctaattgagtcaccttgcaaaagagaggagatgagagccttactgcaggaagagggatgttcacatcccaaaatgagtatcctctgcccttgattaagccctccacatcgttttccccagcaacctctccctcaccattctagggctggggttccacttcagaatttcctccaagttagccacgctgccagatggaagaactaaaaatcaggacctacctttggctttccccctcctcctctcccatatcgctcctgtgagaggtgacagcgtgatggcggccctcgcagccctggctcgctctcggtgcccccttggcctcggcgcccattctggccgcacttgaggagcccttcagcccgccgctgcaccgtgggagaccttctctgggctggccgaggccggagctggctccctcggcttgtggggaggtgtggagggagaggcacgggcgggaaccggggctgcgcgtggcgcttgcgggccagctagagttccgggtgggcgtgggcttggcggccccgcactcggagcggccggccagccctgccgccccgggcagtgaggggcttagcatccaggccagcagctgcggagggtgcgcccggtcccccagcagtgctggcccaccggcgctgcgctcgatttctcgcccggccttagctgcctccccgctgggcagggcttgggacctgcagcccgccataactgagtctcccccgccccgccgtgggctcctgcgcggcctgagcctcccggaggagcaccgccgaccgcctaagggctgaggagtgcgggcgcacggcgggagactagcgggcagctccacctgtggcactgtgcaagatccactgggtgaggccagctgggctcctgagtctagtggggacttggaaaacctttgtgtctagctaagggattgtgagtgcaccaatcagcactctgtgtctagctcaaggtttgtaaacaccaatcagcaccctgtgtctagtttggggtttgtggatgcaccaatgggcactctgtatctagctaatctggtggggacttggagaatctttatgtctagctaagggattgtgaatgcaccaatgggcactctgtgtctagctcaaggtttgtaaatgcaacaatgagcgctttgtgtctagctaatctggtggggacttggagaatctttatgtctagctaaggggttgtgaatgcaccaattggcactctgcatctagctcaaggtttgtaaatgcaccaatcagcaccctgtgcctagctcagggtttgtaaatacaccaatggacactctgtatctagctaatctagtggggatgtggataacttttgtgtctagctcagggattgtgaacacaccaatcggcaccctgtcaaaatggaccaatcagctctctgtaaaacagaccaatcggctctctgtaaaatggaccaatcagcaggatgtgggtggggccagataagataataaaagcaggctgcgtgagccaacagtggcaacttgttcgggtatccttccccagtgtggaagctttagttcttttgctctttgcaatgaatcttgctgctgctcactctttgggtccacgctgcgtttacactgtgtttatgagctgtaacactcaccacaaaggtctgcagcttcactcctgaagccagcaaagaccacgaacccaccaggaagaaggaacaactcca

SEQ ID NO: 12810 - DNA, 2300 bp, Homo sapien
ttttaacatgaagttgtcatggactaagtagaaagaagctagaccagcacagtccaatagaactttctgtaatgaggaaaatgttcttatcagaaattgctatggtagcattagatggtatggtatcttatgaatcagtaattaatatggtagcaatagccatgtggctggctatttagcactgaaaatattgataatgtgactcagatactgaatttttaattggattttaattaatttaaatttaaatataaagagctacttgtggctggtggctagaacgtgggacagatcagacaaaactacaggaagtcctcagctaacgtccccgatgggttcttggaaactgccacattttaagtgaaatgacacataacaataccatttttttcatcaaccttataaagaaatgatgttgaagaaaatgatgttatttgaggacttgctgtacatcttttgcttaaagtcacaatttctaagattctctgggtgatgttaattgaggacttactgtacagaaaagggtcaagtcagatgcaccctgaaggcctagttattgtgttaaaataaatttgacagattattaaaagagctcatctgtttttagaatagcaatatacatgagctcatgagagcaaacatacttcgaaaggaatctgcttacatgtgacagagccttgacataggaagtggtaatatcctgtacttaatttttaattgacaaataaaacttaaatatattatcatgtacattttttgaaatatgtatacattgtaaaatggctaaatcaaggtaattaacatatacattatcttacactcttactgtttttttgtggtgagaacaattaaaatctactcctttagcaaatgtcaagaatgtagcatattgtcattaactgtagtcaccctgttatgcaataattattcttagtttcttctaagtatttctctattgtattaaaaatgagtgttgctgattaaaatctcgtgcttagaaggcagtgtgggttggattcccaccctatctcatcttgagtcctttctgattttgggttatcaaacagtgctgagtgaaggagaaggatggcaattttgtagaacagaatttagaaatttgtatcatgtgctgccccggtttttgacactgtgtaaaataaaaaaaaaaattattttgggttataataggtcatttaagggaatactggaaaagcagatggctttttagtaatttgggaaatcctataaaatatctcaatattttatttaatatttttatctatttaaaatacctaatatttaacagtttatttaagtgaaacctgaatacaaaatgcaggttttgtttttgttcaaaaactttcattcatttatcctgcaattgtttttaaaaactacaaagcaatcatttcacagtgtttcacatttcaccaagcacttctatgagcatatgtcatttggctctcaaaataaaatagtcctactgctcaggtgtcatagtggtcctggctttttgtctgtttgtttgtttgtttctaagataatgaaagtgagcttaagccaatttgagtgactccggtgggctcataattgagtgttagaatcagaacttcaaatcctgtgtctttgctgctaacctctcccactctctaccctacttatagtgctgattaggtggcttttctctcctagtatcaatatgccactgaaagggagattgctttcttgtcgaatgcttcttttgttagttacactttgccctggagaaattctccctttggaattttgcaagggataaaagcaagccctacataacgtgattaatggttctgaaaaccgttttccttttaaactgctttgtggatcatatatgctttagaattatttatttttatttttgtttgacttgttttgcttcctccttcctccaacacagattgcttagtgggggcctacagggtacagatttaattttaaaagtgtatttaaagatataatttaaatacagttgccagcacgggtctggctgagttgtccttctttcaatgtagaacctccaggaatgtccgttgtgcatgacatgagggcagtttcactgacagtttatgcaggcagggggaggtaagctcatataaccttgttccttacggaggtgtagaaaatctgtagcatgatgtaatggtaagcacttgatgttttcttcagatttttcctctcaaaaggaacagttcttactggaaaactgttccaaacagatgttcataactctagcgctggtgttgcttacccttagagtatgg

SEQ ID NO: 12811 - DNA, 2300 bp, Homo sapien
tttgctttttgtttttctttcacccacttctcttatggatcagtgagtttcctaataaaaataaagtaacctaattgttatagttttctaagtctgcaaaattattgctctttggagtccctgagccacatttcctattcgtttgcttcctctggccccatcatcacacatttctaaagctgactcataggtcatgtgcataagaaatttgttacaacgattctgcttgtactttggcgtgatattttttcttacttaattttccttgtcgtgattacaatagatgcaaccaatagcttttaataggtggcacatactcataacatggtttgctcatggtttagaaacaccaataatttaaagtatgaattctgtaaatctgcaaccaccccctcccccattttcaatctcattcattttctagcagcataaatcagaaagcaaaacctttgttgctttaaagatcctgctttgcctttttaaaatgtgttcttaaagatgaaataattatgctgctttcctggatcaagatttcaaaggaagaacctcctgcggatacttatgtacacttacatacgaaaatggatgtttaaatgcaggtagatgagtatttgtcctaaaatgtgatcttccttgttgatgctggagcttgaggagctatccctatgctctgctgccaccttggaaactcagaaggatttacaacggagttctgcacaggggaagctggaagcagcattcccacagcctcttctggggctggcaaggctcagagaggcatttgaaatggctattattgacacccatagacttgggtatgtttcagagagaaactataacatctatctcatgggaaaacacactttctctgtttttaaataactccgtttcagcaagatccatgtgtgtagcctctgaatactctataaaggctccgtatttctttctttctttccttagtccggaatggagacagaagaaagattcggttgaagatgtccctgtgtggatctcagtttgcgctctgagcgacgtcctggctcatttgggtgtgacggtgagagcagaggcgctctgctgacagttttttcttgtctaagcttccattccgcatccacaatatgactcgccttccactccagttaacttcttggaagtccagagcacttagtcaaagctgtttacaaaatgcaaagcatctgggcggccaaggcagaggctcctgtgttctctatgtaaccgcctccaaaaaagctgggaaatttcgcggatcaaaatgtaggcgcttaaagctgaccctctgctgtcaatgttgggacttagatacattttttgcatcgtcattcttgtgtgtgtttcccgtttattccattctaaggctcaggctcgcgctgtttctctcgcgcgcgctgtcccctctctccatttcccattcacacatcaaactccgtcctccgcacccctatcttcccgtgtcttcttagttatgtgaatgtgtgtcattaggcttactcggacactggatgggtgagtgggaggcagcttttcttgcggtttcatttacacttggcatgggtgggtgggtgccctccacaattcgtctcgcacacggaacacagttaaaatctgtagctagaacgagtgaaaagttccgaatctttaaagcgcagctaggacaggaaataatacagggttgggggatgtggacgggggcggagagcagagaagtaaaggaataaaaccaacttcgctggcaacttcaataaatccggtaactggaggcaaaaaatagactccgagggctgggtctggtccggatgaaacgctagggctccttcccttccttgaatcttgggcgctggaagccagccacgggcgtcttgccacgcgagtgcccctagacagcaacacacccactggaaacgcacgtgaacaaagctctcgcccccgggagccgctgcctgcggtttcctagtcgatcccagcttctctagggagtgtcaggcgcacacagggttaagttagttccctccctggtaggagggagaggaggaggaggggaaaagcagcatactgtctcaggctgggtaccttgtagttagttgtacgttcgaaacctgtcgccgtcacttgcgcgtttggcattatccattgtcaccgcggaggaacgagcgctcgagatatcatcagtgcccgcaaatctccgcgccaaggcgctgagctactcctttccgaggtgcgcctctggtcctccgtccctggtgcccagcagcggcgaggcggcatctccgctcccgccg

SEQ ID NO: 12812 - DNA, 2300 bp, Homo sapien
ccctgtcgcccgcagcgtcggggcgcgggggtgcggaggccggagcctcagagcggcgcgcgcctccccgcagcgggccggggccggggcgcccagctcgcctcgcttgctctcgcctacgtcccctacggagctgcggcatcgtcttcccccgtcctccgccaccaccgcctccagggttcgggcatgccactttctcttggcttcggccgccgcgacccccgccttctctcctcctccgcctccccctctccgcttcgccaagccaacgaaccccaaaagaagtacagcgagcggggaaggcggcagaaagctgccccgcggcgccggagctcctcggatttggaggatcccgggactcggcgggagagctaggcgggctctcctccgacgcgtgtgtgcggacagctcggagccgggcgtgcggcgctgcgcgggggcgggcgcagggctcgctccaagtgctgcgcccgcccggcgtgggtctggaggctgctcagaccacactactgcctcaatccgacgcggccgggctaatgtaggcgccgcggcccccacccctacccctcctgacacccccggatatgtttacagtaatgaattcgcgggatcgcctccgcagctcccgcgctcctcctctccctccgtccctcgcgctctggcgcgctccgctcctggagccctctttctctccctccctcattccctccctctctcccggagtccctcctacttttctggtttaaagaatgcttgggaggcgcggctgctacccagtgatttccaagaggcaaagtcagacttggcttttaaccctgtcctctctgaaaagagttgaagagcgcctggctaacccggcagatgccaccctgaccttctctctatctacccggcacatgccgttcctaccaccagtccttagggataatgtcaccatctgaaccctgaaaggagaattccccatacctgcttaatggtgtactgccaagagggaggatctattacttagacactgagaaatgatcgaaatgtgagattagagggtaaaatacagcaaacctctcaaccaaaatggcgttatttcaaatgcaggcaaccttggtgatgtgccccccactcctcaccccatcactagttccctcatcctggaccaccttaaatgactttaactgggggagtaatccaaaatttaataggattaatttaaacacccccactttcttccttcaacctggctgcttctggcaagagcgttgttaaatttccccatagattgcagcggacaaagaaagattcagcctaaagattaggaaacagtcttgacagctaagaagcctgatttctgtacaggcaacgtttccacttcgcagtctctttccaaaggttaaagggtaatgtaaaaaacaaacaaacaagtaaaaaaagctaggtgcacgtctctatttaggaaggaggagatgtttttggttttctcatcttatttcgtgctgctcttcctgcctccagtaagttgctgtcatgttgtaacaagtccggtgaggctgaatctgaacagaagagggagaacgagcccgcgccaagagctacgccgagacgcgccgtcggtggggccacgcgagatgcaaccggagagtttaaaactagcccaggaccaaccccccagggatccgctcaactctccccgcagaagagtttaagtggggcagtggccgccacaggctgaggatgatttccggacgcgccccaggcgcgaccgcactactcgtcctcagttcaaagcctgagtgacttggcaccacttccccaattgttttttatttccttcgcatccctgttgtgtctaccgctttcacgtatttgagagcctaaatcatgttaagacgacttggagaaacgcccgatttgcctcccaagccacgcaaggatccacccagacgcacgcccgcgcggagacgcacgctggcacacgcgctcacacacgcgagcacacacacgcgcacactacccggttcgtgcgcgcgggtcgctgttcctgttgcattatgcaaaggtggctgggaaagcgcgttgacttacatttacatagcccatcttctccccacagtatgtgactaatacgtatcccggggaggagggagcgcggctgggggtgctaatcggaagggaacagacagtgagtgccatcttgctgggaggttccagaagcaaagcgccaacgacgacagtagcggtggcctcagctccaccagtaactgccgctggcaggagcaccacacgctctaggagtttcccgggtatca

SEQ ID NO: 12813 - DNA, 2300 bp, Homo sapien
ctcagttaatttttgtatctggtgaaaggtagggatccagtttcaatcttctgcatactaaccagttatcccagcaccatttattgaatagagtgtcctttccttgttgcttgtttttgttggccttgttgaagattggatggttgtatagtcacagtttaccttgtatctgggatctcctaacctcctaaataattttttaaaaattttcatacattacggttaagtttttgtgctctagacttttatgggttttgataaatgcataatatcatctatccaccattgcagtatcatacagaatagtttcaccactctaggcaatctcttgtgcttcacctactcaaatctgtgtctgtgaacctctagaaaccactgatatctttattttctttattttttcatttttagagacagggtcttgcttcgtttcccagtctggagtgcagtggcaccatatatatggctcactgccacctttacttcctgggctcaaaggatcctcctgcctcagcctcccaagtagctgggactacaggtgtgcaccaccatgcccagctaatttttaattttttttgtagagccagggtcttgccatcttgcccaggctgctttcaaatgatatctttaccctctctataagtttgctttttccagaatgtaatataatcatgcagtatgcagcagtcctttcatgctggcttctttcatttagcaatacacatttaagaatcatctatgtccttgtacagcttgatagctcattctttcctatctctgaatagtatttcattgtatggatataccagagtttattcatttctgtgttgaagaacatcttgatagctttcagtttttggtgataattttataaaattctataaacattcatgtgaaagttttctgtagttaaaatttctcaaatcatctaggtaaatatctaagaacccagctgctggattacaaggtaaaaatatgtttagctttgttagaaactgctaagttatccatcagagtggttgtaccattctgcattttctccggtgatgaatgagagttcttgttgctcctcatcctaaccagtatttagtattagcatattttggtttttagccctcttaatacatgtacaatgttatctcattattattttaatttttatatacctaatgacaaccaatgttgagcatctttacatgtacttatttgccatatatatggtggtatctgtttagaacttttgcttactttttaattgagttgtattttattcttgagttttaagcatcactctgtatattttggatgtattatttttattttttctatcttttttttttttttaccagatatgtgtttcacaaatatttttttctcattctatggcttgtcctttaactctcttaatatttctcaaagagcagatgtttataattctaataaagtcttacttttttttcatgtattgtgcttttggtgctgtatttaaaaactcatcgacaaatctaagattccatagattttctcttttctttttcttttagatgttttatagtttttcattttaaagttaggtacttgatcaatttcaacttaatttttgtgaaagctgtagaatatgtgctaggttctttttgttttaatttgagtatccaattgtttcagcactatttgtttaaaatgtcaacatttgcttcatcgacttgactttgaatctttgggaaaaatggaaactaccattgcaaaattataactgagacagtgaaagatatttgacctaaccaactccattttcttctaacctccaagctgtccttgttcattcctcggtgtaggctgaactaactttgggaggaacttagtttatagtttaaaacaaaaacaataacagccctttccccagacaaacctccttcttgcctggggactagactgcctttgtaggactaacaaattagccacaagattagaaattatgggctgggtgcggtggctcatgcctgtaatcccagcactttgggaggccaggcgggtggatcatgaggtcaggagatcgagaccaccctggctaacatggtgaaaccccatctctactaaaaatacaaaaaaaaaaaaaaattagccgggtgtggcggcaggcacctgtagtcccagctactcgggaggctgagacaggagaatggtgtgaacccaggaggtggagcttgtggtgagccaagatcgtgccactgcactccagcctgggcgacagagtgagacttggtctcagaaaaaaaaaaaaaaaaaaaaacaaaaaaacc

SEQ ID NO: 12814 - DNA, 2300 bp, Homo sapien
gctgccccctagtggcaatttattggggaacagaatctctgggtctattgtctgttttgcggcagaaacatgtattggcaacaccaatgtggtacatagaagattatcccccacattaaggcattttatagacatcacaacaatgaccttgtattcataattgcataacacagtggtttgtctgttatcattgcaattaatggaactcaatctgggattgttcaaatgatggcaccacaagccatttggcaattggaagtcagtcatttcctgatatggcctagtaattagttactcgaattacttaaattctgagtctttttacacgcaaccaaggcatcatcatcatgtgaacacctgtgtttactcgaccttgagtagacataatagcaaaagagtctgtcccctatgaagtttaaaaatccaggccgcgtgtttcaattccttatttcctgtcccatctttgaactcttcccaggtttatcgattgtaggaaatgccattcccttcaggagaaacccaactcccaatcatactgttggggtattcgcctttggcctaaaggacacaatcacatcacaacacaataatccaagtttagtgtttgctcagtctagttccttttcatagtctctttagggttgaaataaagaacagccttcatcactttcctaagattcttccatcacagcttctcatttacaaacagctgctcaaaaacagctatatacaactccattagaaaagtctaaaatttaaaaacagaagaaaagtgttttaaatcaaacaaaggtactatttttcccaaacaggcatataaaatttgcacttattttatattgaaagatacatgcaacttcatttacccggcagaacaataatttgtatggcaaacatatctctgtgtctggaattggttggttcttggtctgacttcaagagtgaagccaccacccttgcggtgagtgttacagttcttaaagacggcgtgtccagagtttgttccttctgaagttcggatgtgttcggagtttcttccttctggtgggttcgtggtctccccggctcaggagtgaagctgcacaccttcccagtgtgtgttacaactcttaagacggcgcgtctggagttgttcctttctcccggtgggtttgtggtctcggtggcttcaggagtgaaactgcagaccttcgcagtgagtgttccagctcataaaggcagtgtggacccaaagaatgagcagcagcaagatttactgcagagtgagagaacaacgctcccacaatgcagaaggagaccccaacggttgccactgctaggtcaggcagcctgcttttattctcttatctggcctcatccacatcctgctgattggtccattttacagagagccgattggtctgttttacagagagctgattggtccgttttgacagggtgctgattggtgcatttacaatccctgagctagacacaaaagttctccacgtccccactagattagctagatacagagtgctgactggtgtatttacaaaccctcagctagacacaaagtgctgattggtgcatttacaaaccttgagctagatacagagtgccaattggtgtattcacaatcccttaactagacataaagattctcaagtccccacttgactcaggagcccagctggcttcacctggtggatctcccactggggccccaggtggaggtgcttaccagccccgcgccgtgcgcccgcactcctcagcccttgggcggttgatgggaccaggcgccttggagcaggaggcggcgttcgtccgggagactcaggccgcgcaggagcccacggcgtcgtcggggcggggagactcaggcatggcaggctacaggtcccaagccctgccccgcgggggagcagctaaggcccagcgagaaatcgagcgcagcgccggtgggccagcattgctgggggaaccggcgcaccctccacagctgctggccaggatgctaagcccctcactaccaggggccggcagggccggctggccgctccgagtgcgcggcccgccaagcccacgcccacccggaactctagctggcccgcaagcgcagcacgcagccccggttcccgcccgtgcctctccctccacacctccctgcaggctgagggagccggctccggtctcggccatcccaggaaggggctcccacagtgcagcggcgggctgaagggctcctcaagcgtggccagagtgggcgccaaggccgaggaggcgccaagagggagcgagggctgtgaggactgacagca

SEQ ID NO: 12815 - DNA, 2300 bp, Homo sapien
gattacctagaacccacagttacacaaacaagagaagctgaactttatccttacccaagacatacccacagctgcacagataaggggagctgcacagatagctttacaagtaagttacacaaacagctacagagatgagaggagtttcttataaaagcttttggattcaactgtaaaagtggcaaaatggcaaagaaagaaagctttcttctttcatataataaactttctcttcaacctcactctggtgtccacactccttaattctcttggttgtgagacaacaagcttggataacacctcagacaacgagaccactgaccactgacccgtttcacaatgacgtactacaggatggtgtatgctgggtattcatacatcgtcatgcaacttcctagttttatgtgtaaggtagtttcctctgtcatcaccttggtatttcccatctagtcacggtattaagtgggtcttatgcgcttgttaagagctggtaagagaagcttaacattcacttgatggaatggttactgtggcttgtatccacaggagctccagctcatgcttaaaatactgtgttagaacaaatggatcagagtgaattctgtaacagtaaatccacagaactgaaaattactgacttgcatcataaactggttgcagtggcaaggcagagagttcagattcgtgttgtactggggaaagaagaaaccaaagaaaataagtggttcatacacaggggactatttaactgatccaagccagaagactactgagggtgaaaggagcattatcagtaattatgtttagacaaaagttgtgactgtccttagtaaaccaggatagacgtagagtcaattcaaaaagaaagaaagaacaaacatatctaatgtacattaagaacccagggatatcgggttcttaatgtgcatatttattggattgcccagagctttgaccttcaagtataattgagttcttgaaacttagatttaggtttgtggttaaggggcaaaataatcagattccaaatagggttctgcagacaaatcccacaggtcctaaagtctctgggtcttttccttgccattgtggtatctcaggggcttgtgtaggcaatgataaccagttccatacttctgctaagagaaatttggggatcagaaaatctttctctgcagctcttcagagtctctttaatttacttcaataacaaggaaatcagaaatctcaggacagtgctggatgtggcagaaattcagggcaattcacaactttcctaccaatttagagttacctgtctggaatcacttcaactgacagtggaagatagtttataaaattgtaggggaggcaaaatttcaccttcgtccctgtagggtcccagcatggccctagtattaaattgatttaagatattaatagactgacaggagacaaccacacaaatgtttattttacatagcacgggggccctcattaaaaaaaaaaaagacctaaagcagcagttaagagccaattgcttatagagtgaaatggacaaaaaatagtagttgtgaaacatgataaggcgaaggggcttggggtaaagaagcgactagaaagatagggattaacaaattttgtttggacagatttccctcgacttcaactttctgtccttgaagataacaatgttattttatagggaagacatctttcacatgggaatttcatctcctccttttaagacacataatatccatgacagtgatcttgcacctgctgtttttaagtgcctttaatttaaaatagtcaatatgccacagcagcatattttgaggtggtatattattaactccttcaaggctaaaagctttgaatatgccggggtagttaccagactggagaaccttctcagctatttgccacttgtggaatgcattcaaatgtactgagtgcttattaacttttctctcagtccctcactctgctgctcttctcgcctcatctcacataagggaaaactcaggctccaaaagcaaagtgattccaccaagatgacaatggaatcgggacctggtgtccaagcctggtcctcgcacgaggtagatactccctgagatgctggggaagagccatggtagggccactcatggccctcttcctttggcggaccttggaatccaccttccctgcgttaaagtgctccaccaggtgacgccggaagagaagccagcagtaagtacatgtgaaatccagtagctgaccacagacacgcgagcgataagaaaaagctcgctgcttcttttctcaacactccg

SEQ ID NO: 12816 - DNA, 2300 bp, Homo sapien
gcactgtctgcccaatggagaagttggaaccaggtagatccacaatctcctccccattaccccatgagtagcccaactggccagtgttgggtccccagattgtgaccacagaaaaccaaataattgactggtcagaaatgccaaccccgttaaggcagtgttctgaataactactaattgtctttatctcattgttatgttgttaaaatgtcacagtgactcaatgatttaaaatttctaaccgttcattataaaagatagccctatagttgaaaatacagtattgccatattttccatattaagaagcaaatttcttaaaagctggtaaatttcttattgtgtagagttggcaaggttttagcataggtcagctccagctttttctcctctttaatcagaagtgaaagtttgtgtttcttatgtttcttaatgataatctttttcttttgaaaagcaaaatacatgaatattagatatggacatgaaaataccctttccctaaaagcagaagtatagtctattcagataaagtaagagatcatcagagtaatgaaatacctacgtaacaatgcacttgtaccccgaacttaaaaaaagatatatcatgtatagaaaccacagataagcagatgtacgaaaccaagcaaaaatgagaactttgaattacagtcacaagtaaactgaaatcgttacttttcatttttgtaaaacttcaagacatttattgttaattttttactttatacttaatttttattatttcagtaacaatatattgatttataatttactatatgctaaattactttataaactatcctgtgctttataaatgtaaggtattagttttattattctcaaagaaagacctacaacggaagtattgaaaatctttacattcctgatataccctgatcaacttcaatatggaaagccttgcttatatacaggctaatcttttctatctctgggtagggagaaaaaaacaacaaaaaaaaaacaccagcaacaacccttaatgtcctttaacaaacacagattcaaaatgtcctgattacatctttaaaattaagtcaaatgttttcatcccaaataaattctgttctttcaaataatattttcccttcatttctaataaaagtttatgagggcaagattcaaaagtgatatttctgacttttttatatatcaatagtaagaaagttataggagctaatttcacttcatattaaaccacttatagatttggcattaactttaacttgctaaagtacaagagtttttataataacaatgtaagtcttaaataaaattttcaagtttcataaaattatttgtctcagctagttaattcaactggtttttagccatctctgtttccaagaggagagaatcaaaggagaaaatagttctacaatcaaatactatatatctaatcccattagtctctcaaaaaaaaaaagaaaagaaagacggtatgaggttggctaccttaacccctgccttaagcagcacaatatccatcattaaacccctcagcctcaattctcccttttctgtttttgtcccaggaactttatcaccctgaatctacctacaatatcctcccctatctcacacatccaaatggttcattctattttatctgtacccctcttgaagtacttcttcattttgccattgcattacaatcattattaaacatgtctttctcctttactaggtaaaaaaagctgcttttggttgatagccagttcgtatacatctccccgcacactgctggcatgatgagtgaatgaatgaatgaatgaatgaatgaacaaagaaataaataaaatatttaacatatattccattaagtaaagggcatataatataatatcagtacatacttgtaattaagatgcaatgagacaagtgagttataaaaattacagtacagtaaacaataaataaaaacatctttaaaagtatttaagagactttttttgttcaaacttggataacgcacacccttctcattgagatgctgcttcctcattggtttgtgctgaaatatgagtgcaatttcctgtcccctcagcagtgttggtttctcttcttgacttgatgcaggcacagatttatcaagctcctcagtcaacaaacacatcaccggaagaaatatgggtaagtataagattaaaaaataaaataatattttaaagtagataacatgctttggcataattgtcagtgatgttcgcaacattcttcctggtttaggctgtataaatgtggtaatgcaaagcatgataa

SEQ ID NO: 12817 - DNA, 2300 bp, Homo sapien
tttattgggtggacagcagtgctgcagtgaacgtgctaggaacagagaatgagctcactttgaggcataactgttctttcagttctagctgacctggaagattggctactgttgatccttgtccatgtttagctctagaaaggcatttgaagaacatccagtacaaaaccctcattttataggtgagggatctaagcccaattccaagtctcccagttcataaattttttctttactgtagatttttctggataaaggtgacaacagatcacacacacacacacacacacacacacacacaaagattattggtccaggggagaaaagtgcagggacactttcaggtatggctgaattcaaatgctcaacctctgtggccaggaggacattttcaccatctctcagttccaccttttgctattttattttggcttttatatgatgtcaaagatggttaacagcatctccaggcccaggttccacagattagaaaatccagcgggaagagagcctctttcttggtatctctggaaaatgtaaaggttcccctgcccttgttccttcccatctttaaactgatcactgtggttaggggtgtatagttttctcataagccagggcagggccccatgcctgccctggagagtagggtcggtcccaccataataacagagactgtaaggagaagagaggatcgtttctcaagggaaaatcaggatgctgttaccaaacaaaggagagaaaagagtctgtttctatgactacatctttctgggctgtgtggtccaaacacacctgtgacaccagacatgtcccctacattattttccattgaaaacgatgtttatttccttttatacatggtgagaaattgagtttctttgcatagagaatagactccttcagaaatattcattctggaaggtaatgtcaggaaggatcctggcaggcaatggagagatcactcaaattcaggtattctgaggaaagtttagtaaagagatatttacaaaggatgggcagggtacaaggaagccacaaggatgatgcgtgaactggggataagaacatctgggcaccctgaggcccctggctctgagagggcaagcagagggggtggttaccaaagctggaggcacagaagtctgtctgcagacccccaggcatagccagcctatggccaggcattaaaatgagaactagggaaagaaacaaaaatccatacctgcttctcctccctccctccaacttgctgcaggaattccctattgaatgaaccaccaggaagccagtgagaaatctctttgttgtaggtcctaagatcagcctcccagggcacaacggaagaaggacaaaaagtgggagcagagaaacaaacaggaagtcagtttcttatctatttttacactctattcatgggctcattcagggaaatacccataagatgtctaaacacatgccctggtctgatttccagtggcattgactgctaaacatgtatgttaaaaatggcctgtgtaaacatcaaaatacatgagacggtgaacatatctaacagcagtatcagtgtggtcccttgaggcttcctcttgatttggaggcatgaggtttgtttgaacttttgttctttcatttacaggctacgtgacctttaacaaatgagataacctctcagagactgtgtccttgtctttaataggaggatatttcccctgcccacctaatggtatctgttattcagtgcaaatgaaatattggatataaaagtatttgagagtgataaagtactaatgttatattgatcttttcaaccttaaaatatgagcataagaaatacagattaatatttttatgggtatgattttttgcaatgtttatttcagagttctacgtggggaaaagaaagagagatcagactgttactgtgtctatgtagaaagaagtagacataagagactccattttgttctgtactaagagaaattcttctgccttgagatgctgttaatctgtaaccctagccccaaccctgtgtttgcagagacatgtgctgtgttgactcaaggtttaatggatttagggctgtgcagaatgtgctttgttaaacaagtgcttgaaggcagtatgcttggtaaaagtcatcgccattctctaatcttgagtacccagggacacgatacactgcggaaggctgcagggacctctgcccaggaaagccaggtattgtccaaggtttctccccatgtgatagcctgagatatggccttgtgggaagggaaagacctgaccgtcccccagcc

SEQ ID NO: 12818 - DNA, 2300 bp, Homo sapien
cacacacagaaggggacctgattgggtgggagctggttatgtgtaactagcgttggagttgacattttggcatgtgctctgagcttgaattttgataccaaccattcagtgcatcatacctagtctttctatgctccaaatgaatgtctgtggggacctgagagcacctggaatttgttggaagcagatcagagcacacgtacgaaaaggtgcaattgcttttctcatgacaaaagaaaaaaaataatcacaaacacatcacactgtggatatcaccttaaccaatgacagaagcctgctgagtttggtctttctcacaggggtaggtagtccacatgaactggcgagcagtggtgaaaacatgacatcaactgctgcgtggttaaaggccaatcatgcattttcctcagtgggtgcaatggtgacaataaactgatttggaaatgtccatgtactttggttataacttgttttgataagaggggtagaaataccaaaacaattgccttgcatgatgccagtggcttgctgttctgtctagctgatcctacatttttacaaaagtagacatcctgcatttctgagacacactgaggaggaccatggcatctttccatctcagggctttttgtcccttgggtgtcttagggtagacatagtgataagatccaatctcgctatctccaaacaaaaagaaaatgtaccccttgtacagtaagcttgaaatgtttttattgcttgcagcgtaagtgccattaattccatttaacaatgatacttagaaatatttaaaatatttcattttacttttatgtttgggcattcctttattctgaaaaagtcaccactgctccttgcttgtttctacatctcacatcggttactcactaaaactggaacaccctagactgattgttcccaggcaaacgataagctaacacatcataattatgattggtctgtgaggctagaacatcccgcagaggaaagtcggggaatggctagtcataggttgcatgatgattttaaatgggtttgtatcagaaaggggaaaatacatactcctgtgtatgcctcagtctttatcataattggctggttcacagctagctctttgggccacacgtgaaagcatttggacctggcaacaccaggcagttgctggttatgggtgttctaggctcactgctaccttttacagagttcacgggattttacgtaactaacccgcagtgtggatttaccaaaagatcacagcactagcggagacttccagaaactgtctcatgctttctgacctccagggaaagttgtacccacgacatcctcaaccactggtaccatggaagacctgtccctgcccatttctcaaaaatgcacagctcttccctgcctggagcacatgaagtcccatctccctgtccccagacctttaggctctgttgaagttctggcattgcttatgagacccttcctgtccaaggaaggtctaagtcaactcctccattggactggagatgaggctcactggtgacatcctgtgtcgactcagtaataaatagtcacttgggaggcgatgtttatgcaggtgtggatgttgagttttactatgggaatcattccagcctgacaaaatgtgttttaaggaataggtagataactgggacttcctctgttattctaacaagtcgaagcttcctaattaaactgtccatggatctcacttatttggtttccactctgtgttatctggtacgttctttgtagcagtgtgttaaaattccaggccctacggccaaatctggcagaggcttccctctcatttatccagtgccttctgtgggccaggcacaggattaggcactttatgaacgtcagctcattgaaacttcacgacactatgtgggaagtatttgcaaacccattatatacacaaggacacagaggctcagggaagctatgttatttatccaatggcacacagcaagaaagtggtagagctggtattcaaagtctgaccaaagtctgctttcaacttcactacagtgtctgtgtcatgcatccttgtgattgtgtgtgtttgtgtgtatgtgtgtctttctagcttcatggacacagcttacagatgtggggagcagatatggtggaatctccaccaccaagagggcacaaggtctttgtgtaaacatggctcaaagggttgcccctgcagacacctactgtacatttatttggttttggaaattttgtatgtggcaccctttaaaaaatgccctttgaaagcactcttttgcacttta

SEQ ID NO: 12819 - DNA, 2300 bp, Homo sapien
atgccattaagaacatttgtgatgaattggaagaggtcaaaataccaacattaacaagagtttggaagaagttgattccaaggctcatggatgactttgagagcttcaagacttcactagaggatgccactgctgatgtgttggaattagaagtagagtgtgaagatgtgactgaaatgctgcatctcatgataaaacttgaatgaattaggagcttcttcttatggatgaacaaagaaagtgatttcttgagatggaatctgctcctgcctggtaaagatgctgtgaacattgttgaaatgacaacaaagaattcagaatattatatcaacttagttgataaagcagtggcagggtttgagaagattgattccaatttgaaaaaagttctactgtaggtaaaatgctatctaacagcattgcatgttacagagaaattgtgaaaggaagagtcaatggatgtggccaacttctttgttgtcttatttcaagaaattgtcacagccaccccagccttcaacagtcaccgccctgatcagtcagtagtcatcaacatcaaaggaagaccctccgccagcgaaagcattatgacttgttgaaaactcagattattattagaatttttggtaataaagtattttcaagttaaggagtatatatacattttttagacctaatgctattgtacactcaatagactgtagtagagtgtaaacataacttttatatgcactgggaaacaaaaaagaaaatgtgtgactcattttattgtggtggtctgaagtctaactcacaatgtctctgacgtatgcctgtataacctcagggtatgtaatttagattttaatttgttaccctgatatttgcatttgttttagtcgtagctctatagttagatatcattaatgttcatctctagtccttttgctgtggtttatctcatgatcacttacttggctgaaagtcatcttcaagtagttgccttaagaatggctcaggggagcaatattctgtgagatcttgcattgttcacagttgtagcttaacatttgaaggatagttgaaacaaaatgaaatccattttattgactcacattttctttttctttttttttttttgagactgggtcttgctctgttgtccaggctggagtacagtggtatgaacatagctcactgcagtctccaactcctgggcccaagtgatcttttggcttcagcctcctgagtagctgggactacaggcgcataccaccagggctagctaatttttaaaatattttgtagaagccaggtcttgctgtgttgcccagactggtctcagactcctggcctcaaaggatcctcctaccttggcctcccagagtgctaggattacatgtgtgagccaccacgcctggctttacattttctttttaactggtctcacaggtgttgctcttctgtttcccagtttttatgcagctgttgggggaaacctgatgccagcctttttttccccacttttataggtgactttatctttttgttcagtgacttaaaatattatttctctttcatctgataacattactaggttttgactcttttattgcattaaagttttcttgattgacatctttaaacattttctttgctgtgtggttttggttttgttctttgggagattacagctatacatatattgtaacttctttgctcatcttctatgtctctcatttctcttctactttttaactcttaaaatctagttttcattttgttaattttattctccctattcctttagtttgtatgttttccacaatgcctgtgctgccatgagctccttccaattttattttttgtttttgtgatcaatagggaattttttccttttcctgtttctttcctgaatttcatagctcacatttcatcttcacttgttgttccatttttccactgatttcttgaatttctactttttggcttctctgtgaagattcttagagatgattatttcatacttggtcacaatttttgtctgattttggaaacatttttctggtgagcctctttccatccattggtaagttttgctactcttttcacattttttttcttatggaagttttatatttatgctgggtcaacttctttttaaaatacctggccccaggcaaactggatattcctggaccagctttctgccaaatgatttcatggagttggggagaggagagcagggtgagtcagggtaccaccttccagacagcacatcctaactctcttcatttctgtgacagagtgtttctgcaaat

SEQ ID NO: 12820 - DNA, 2300 bp, Homo sapien
agctccacctggatgggctacaggagctgcacacctaactctcctgcattttctgtcttgcagagcatgatactgttataagcttataagagtcatcccagacgcctcctttcttcctttgcatccatcactaggacccgcacattttacttccttaacacgccttgtctctgactcctcctctgctgctgcctgagttgaggcctcataatacattccagtaaactcctacccacaccccccacagacgatctctcacttgctgcatgtctcttacgcactgctgccagagtcagcttgctaaacccaggtctgaccccctggctcttctccctgtgttagccttgatggcttcccacgctcattaataagaccaacaagagccacactctctcctctgcttgtctttgcagctttattttggtgtagccatcttcacaccctctagtcctgacacgcagacctgaggtaatttcccaaatgccccaggctgattcatggctgagtgtctttgtatctgttgcccccccattgctgttccgccttcctctccacctccttctgccctctcgcagacacctaatgccctttccacaccagtgggcaccttgtctttgcattctcgtctcctcttcggtggcactgacactctctcttcatgtctttctgtcccccacacctctgtcaaacacagcatctgcacgctttgttgcatttgcttgcatagaacacgtagttttcttcacctcctaataatgtggacagctcacgttgattgaggacttgctttgaacaaggcattgagcaacatgccgtacattttatgttaaatcttcccaatagtgctactgcttctgtccctttccagggaggaggaaggaggcttggagaagggactgtcttttaggagccctgcccagtgtttcctgtggagggtggggccatcgtggaagacagacctatggtaggggtaagctgggtggctgttgaagtccaaccttccccctgcttcctctaaccctgataaccttgttctctggggcctgtctgctagtggagaggcttctgactttttttttttttttgccatacctttggtttataaatacaagaagagatttggggaaaaatcaggggaaactgtcgagcttacaagtcccgagaaggaagtcactgctcctttaagtctcatgtgaaccccttgttctctccccagcttgtggggtgaaagaaaagccctttagtcttttgggtcctcaaatcacagtttatgcagtttggccccagtcagagggaccccaggaaggcagactcagggtaaattctgcctgtcttccaccagagaggggactcaccaagtgtgactcatgccattcaatagaatttttaaaatctcacaagtattttgtacccctgagtaaaagagaggcttgtagctcttcatgaaggaacaagaaaggcccgaactgagtgtttggagcccagtgaagtaaaatactgccctgtctcttgtctgtccactctagcgcttgtacaaaccatgaagaactctctttggactgtttgctttttgagaatgttaacaccttgactctggatttctgcctatgggaaaaaaccacaatagtgccaggggtgcttccatatgcaggattaactctgcagtcaaagtttctgttgggcaggtgtgtgaacttgataccataaatgctggcccaaagcaaatgggagaatggatgaatgaacaaattcaggaatgaaacaaactgtaaccaggggtctcctagttgtaggttctctgctaaacttcatattgagacacaaaggaagggcatcttataatataatgttgggggatgagcagtcagcttggaggtggggacacgtaaggtgggttttgatgtttgagaaggaattgaccaaaaaaagagtcaagaggtgagaagaatctgggaagcgagacctgtttctctgggacaggtgtgagcgggtctgggtgctgctgggtttggctggggcaaaggttgcttgtgggggcgtggcagtgggtgaggcctgtgagataggcaggcgccaggtcctggaagggagagtcagggagcaaggcatggagcctgcactttactctgaatgttggtggcgccttcagagcattgttagcaagggtccatgtgatcacactgacacctgagagagtgacacaccatgtacatggctggtatatggaggatggatttaagggggacaggactgaaggctgtcgcagtgattcaggtgagagaagatggggttctggacta

SEQ ID NO: 12821 - DNA, 2300 bp, Homo sapien
atgtcttagccatcctcccagtcctagtagagagaggcaaagtgtggttacagagtccagggaagatggttctgaagcacccgggaacctgcctaaagggctgaagagtcagagtagcaccatcagattggtaccagttttgcctgaacggggtttgcagagaattcagggctccagcctggggtgcctgtgacagcccagtgacaaagcactcacctttcccacagaccacagcggacctctgtaggtcttgctcttggactcagaaaccttgatgtgatagtgacggatggatggtgagaaagatgctgctgacatagggctccccagaagcctcaaggtgccgtagagtagcatgcaacttagagatcagctgctagtgtgggattttaggaccccagctggcaggcataggaatgagctgggcaatttctatgcgtaagtaaaggcaacaacaatctaacaggaccttatggcactagatagtaagccccatgaaggcaagatctctgtcttgttctctgccatatggccagcacatagcacagtgatggcacttggaaggggttcaatatatatgttgaatgaacaacaaattttagtaaccttatctggaagccagagtaggggtttaaactacttcctatccaacactgcagcatgcaattcatgtcttcatttagcaagtatttcttgagcacctactacgtgtaaggctccgttgcgaggcatccgaagcaatttgtcagcatcattcatgttgatactcggagtgacccgttcaagagcacctcagcaccacctggcttttctgaagactgaggccccaccacaaacccctgtggggcttcaagcaggggcagtgagagggcgttagacgaatgctccaggtttagcccctttccgggaacaggtctgggtcccttcgcatctgccctgctggtcccaggatcccggggccgccgcttccgggagctgccgggtcttggcaactccgctttcctccgggggcccccgtgcctctctcaagcctcctttccagccaacgaccagcggccccagtccggctgcaggtagctggggaagggaccaagctgtgccttgggagcgagcttccccgggcggggagagcgcagcagatgcggagcggtcccagaacaaaaggctcatggctggcacgggcctccttggagtgcggcggggacgtgggttcgggactcaggcgagagagccagacgcgggaggaaaaaaaatgaagtgagaaaagagaaggagggagagctcagggtgagagcggtgagaagaggtgacccggaggccgaggtctgcggcggagccgcagcggcccttcctccgcctcctgcagcgccttccaggcaaccaagcgtgtctccggctgcaactccagcaagcgcgccgctgccgcctccacgcccgcccgccggccggccgagccagtaagtagcggcgcgcccaccgctcgttccccgcccctccgcggcttccccgccaccgcccaccgcctcccgccgccccgcgggcaagtccgcgaccgcctcccgctgccccgagccgggtgccgggggctcagcgcgccttcccagctgggagcctcggtccgctgctcgccctgctccctcttgccggggcgcggcgtctggggcgcgccgcggggagggtcgccctcgccgcgcgctgcccgggcgccgcgccacccctacatccaatggctttcggggagcgggaagtggggggcgtcgccgggggcgaggagccgcggccggggtggggcgtgtgcgctcagcgcggccgagcgaggctgacgtgcccgcccaagcgcgcgcccgggagtgtgtgtgcgggtgtgtgtgtgcgggagtgtgtgcgcacacgccttcgggggctggagtgacactgcagtgggcttctccgtagccccagccttcaggctgcgcagcccctaacctgccggcaccgcttttgggaagcagcttggctcttccatctccccaagccttcctctccatcctttcatccacccctcgccgatcttactttttcttttacccacggggccgcggccggccaccccctggccggtgcaaacacccaagccctctccagttctcccccaagctaatattttcccacctgtctttttctggggttcctccacgagccagtccaaggctcccccatcctcggaaattgttttgttggactgctaaaccgaggcgtgtaaagcttgaggactttattattatttgggttcttttcatttcttccccttctgggcaacg

SEQ ID NO: 12822 - DNA, 2300 bp, Homo sapien
tctgccaagttgaaagaccctgagaataagacttgctcataaatcaataggttattgaaagcacacatgctttctacacgtctttaagtttggttcaaattaaaaccttcctagaacgacatgaaaatcagagctcattcattatggtgtgtgaccttgctgagttcttatttttaaattcagtaaaataccatatgtgcctgtcaacttggtgtatatgtgtgaaaacactcatccattcctgaaacaagaccttttggataaaaaacaaagataacttctttgaataaagcaaagactaaggaggagagtgagtggagctacaactgtcttccattctatggatactggcacagatgccaagtttatagaaaatgttaacttattttaatgatctactatgaccaggaaataattttccccctttgactcaacttatctttagctacgtcaggccattaaacacatcagaaagcaaatgagcttggattctgtgaaaaaaaaaatcaatggcattagaaaaatatgaagacgcttttctagaataaaacacactaaacagaacaagcaaatgcaatctttgattggatcctgcttgtcttagtccgtttttgctggttagtttataaataatggaaatttacttctcatagttctggaggttgggaagtccaaaaccaaggcttgttctctgcttccgagatagcatctccttgctgtgtcctcacatgacagaagggcaataagagacaagctcattcccgcaagcccttttttaaaaggcaccaattcataagtgggaggggagtccttatgacctaatcatctcctaaaggcctcacctcttaagacaattacattggagagtaagttttacatgagttttagagaaacacattcaaactgtggcactggtttttaccaaacaactgtaacttttctgtgtgtttgaaaattttcaaagtaaatagtggaggggaaaagcaaaaatattctagctccatctctttaaaaaattacctgggattatggtttggaagtaatacagagagagaaaaactctaaaacttgttctataagaagaaggactatagctctgtacatttttggtaagatgtttggcacaatgctttataggagcataaaaatattgtcctaagggttaagattttaaatagagaaacttatagggaaagaggatgcagttcctggttatgaatcatgtccatcagcctgacactttaattacaacttctttggagtttatagtatattatcctcattaatccccaattagaggtttgagtcatcaaaataaatctgcaggacttacacacacagagttcattatggagcagcctagcttcacgcttccaggtgtatgacatatgacaccctctgtcctttcacttctgatgtgtctctagttcttccaagccaaaagcagagcccaggattagagcaacatatatttaagggtgtgtttttgcagatgtcagttgggactagaaaacaaatgtaggcatgcttaaacgctgagaccaatgtggaaacttcacgaggtgggggtagggggaagaaaatttttggtggggcacgtttaagttcacgttaatgtataacgctatcaattttactaccactgagtgggtatatgaaggggatgcttgcgtgtctgtgtgtatgtgtgtgtggtaaaggagggtgtgtgtgtggcggggggtattttcacaaaatgacatggaaacctgactgcagttcttttgggaagaggacttggaggtgtcttgggggtggggaaaagatggaagactgggatttcttctggacttcagggaagaaggatgaaaccaaagggaaacaatccaaggcagattaatgaatttagtctaatatttgtgaattcaaagtagattctaatcagcccatctcctccctcttctgtttgcagaactggcactaaagaggattccccaagctgcttcatcactccctgccattcgctgtcccaggaaattctcctgactcgccccggaatccgtgttcgactcttctctggctgagctgttcattgccagccaccctgagactccccacgcggcaggcatcgtctcctccggtctcacagctaccccgggctggagcgtggggagggggtaagggagccagccaactcggggaaacttcgttgccagagatgactggggttttcgggctttcccagccttcccatgccgggccacacggcattcattaaagtggtggggcaactattggtgcgctccagccgggcaggtttt

SEQ ID NO: 12823 - DNA, 2300 bp, Homo sapien
gggtggattttccccttgtcgttctcatgatagtgagttctcatgagatatgtttgttaaaacatgtgtagcactttcctcttcgctctctctccctcctactctgccatgtgaagaagctacttgcttcccctttgcccttccaccatgatagtgtttcctgaggcctccccagccatgctttctgtacagcctatggaactgtgagtcaattaaacctcttttcttcataaattacccagtctcaggtagttctttacagtaatgtgagaatgaactaatagactgcataacatctgactccctgcccctgtatccttccaaattacttttgttgttggggccacagagccatcacacacacttcaacatgcctccaattttgaatcattgtctgcctaccctgggttttaggaaaacaggggttcaagcgttattataaccgggtttctgatttatttctccttccttgttacagagtttctgacttactccctcaagcctgaattccctgatacccagctctgctgagataggaatctcagaagagagaaagctaacatttattgaatacattcttttatttgccaggcactgttaattcttttaactataaaattagtagcatcattttttcatcccaagcaacagagaggtagactgttgatgaaaagagtcaaactctgtaaaatatttttagagatttattctgagccaaatatgagtgaccctcaggaggtcctgagaacatgtgcccaaagtggttgaggtgcagcttggttttatacattttagggaggcatgagacatcaatcaaataagaaatacattggtttggttcagaaaggtgggacaactcaatgagtatgtaaatttaaacatttcctggttgacaattggttgagtttatctgaaggcctgggatcaataaaaaggaaatgttggggttaagataaaagattgtggagaccaagtttattgtgcagaggaagctctcagtatagcagacctcagagagagagcagattgtaaaatttgtcttgtcggacctaaaagggtgcctggctcttagttggttatctcctggatttggaaaggaaagaaggaaaacaaaggggaaaagagattctctatagaatgtggttttttcccacaagagattttgcagggcaatttcaagatatggcaaggaaatatatcttggggttaaatattttgatttttttttccttgtctcataatattatgccagaatcagattggaaagtaagtcatggtatatagagtcaaataaaacccatctgataagaatttatggtttctagggcatgactccctagacaccttagataggaatttgggcaagataaaaaaattagagcttagtcctcaactctacagaagaaaatgacatttacccaggaatgggcattgcaataggaatatgcgtgccatggcaaactgtttgcatattcaaggaattaaaggaaaaaaaagtttttttaaaaaataaaaaaaggagaggattacataattgttttgaggtaattagccttggctccaagcatcaataacaagggtgatgtcagttcaaggttggacagacaattgctggacagatgtcctcatagaagtatctttttgggtaaggtggaggtctttgtgcaaggttgtggttttcgcagtattttgtgatagttttattatcaggcattcatggatgagaactctccttcatggccttctccagttccacttgtcaggttttctaacacatgtgactctatttttgattctgacaactttcacaatctacattagaaaagagaaaactggggctcagaaagttttagaaactaattcaagatcaagctggtaagtagcaaaaaatttagaattaagttctacatatctggttccaaaaccaggactcttttcattacagcagtggttctcaacagagttgcgattttgccccccagggaatatttcacaatgtctggagacatttatgactgtcaggattggaggtggagtgggtggggtctgcttctgagaagctacttgcttctagtaaacggaggacagggatgctacaaaacagttcatagggacagcacccccacaacagagaattatacaaccagcccaaaatgtcaatggacatttgggctgagaagtcttacatgacagaatgcttcctaccctgatctgacgttatttccaaggattcaaaggtaactgcttcaaaattaaacaaattatagaaagccatcaataaatcaaccccttattcatgt

SEQ ID NO: 12824 - DNA, 2300 bp, Homo sapien
tgagaacatgtgcccaaagtggttgaggtgcagcttggttttatacattttagggaggcatgagacatcaatcaaataagaaatacattggtttggttcagaaaggtgggacaactcaatgagtatgtaaatttaaacatttcctggttgacaattggttgagtttatctgaaggcctgggatcaataaaaaggaaatgttggggttaagataaaagattgtggagaccaagtttattgtgcagaggaagctctcagtatagcagacctcagagagagagcagattgtaaaatttgtcttgtcggacctaaaagggtgcctggctcttagttggttatctcctggatttggaaaggaaagaaggaaaacaaaggggaaaagagattctctatagaatgtggttttttcccacaagagattttgcagggcaatttcaagatatggcaaggaaatatatcttggggttaaatattttgatttttttttccttgtctcataatattatgccagaatcagattggaaagtaagtcatggtatatagagtcaaataaaacccatctgataagaatttatggtttctagggcatgactccctagacaccttagataggaatttgggcaagataaaaaaattagagcttagtcctcaactctacagaagaaaatgacatttacccaggaatgggcattgcaataggaatatgcgtgccatggcaaactgtttgcatattcaaggaattaaaggaaaaaaaagtttttttaaaaaataaaaaaaggagaggattacataattgttttgaggtaattagccttggctccaagcatcaataacaagggtgatgtcagttcaaggttggacagacaattgctggacagatgtcctcatagaagtatctttttgggtaaggtggaggtctttgtgcaaggttgtggttttcgcagtattttgtgatagttttattatcaggcattcatggatgagaactctccttcatggccttctccagttccacttgtcaggttttctaacacatgtgactctatttttgattctgacaactttcacaatctacattagaaaagagaaaactggggctcagaaagttttagaaactaattcaagatcaagctggtaagtagcaaaaaatttagaattaagttctacatatctggttccaaaaccaggactcttttcattacagcagtggttctcaacagagttgcgattttgccccccagggaatatttcacaatgtctggagacatttatgactgtcaggattggaggtggagtgggtggggtctgcttctgagaagctacttgcttctagtaaacggaggacagggatgctacaaaacagttcatagggacagcacccccacaacagagaattatacaaccagcccaaaatgtcaatggacatttgggctgagaagtcttacatgacagaatgcttcctaccctgatctgacgttatttccaaggattcaaaggtaactgcttcaaaattaaacaaattatagaaagccatcaataaatcaaccccttattcatgttgcagctctcttccattataaataaaaatggattgaaacttacgataaaagggaggcagggacaggagcggggaagcttggcgagcagaaaggaaattcaaacttattattaaggttaagaattaagatgtaaatatgtagatgtttttcacccctaggattttcactaatccaaaagttcacggactgctttgaaatttaattatttggaactggttaaatgttaccctgacctcagctaacatttgtgtttcacttttctccgggacccaggggacgtggatgccagatgagtccacctcctctccctgctcttcccgcagggacagagcctgccaggtgctggtgactcggatcctgacaggaggtcgctctgcggaagactggcaggatcccagagcaacagactggggctcgatgccccttccccgccaggtctctccgtccgcaactgtcctcctagtaccgggtatcccgcaggcggggctgcggaacgcacgtcccctgcgccgtgacgtcacaatagcgactcactggacccagcccttagcaacggcctggcaacggtttccctgctgctgcagcccccgtcggctcctcttttccagtcctccactgccggggctgggcccggccgcgggaaggaccgaaggggatacagcgtgtccctgcggcggctgcaagaggactaagcatggatggcagccggagaggtaaagggcagctgtcaggggctaccgcc

SEQ ID NO: 12825 - DNA, 2300 bp, Homo sapien
ttaattctgtttatatggtgaatcgcatttattgatttgcatatgttgaaccagcctttcattccaggaatgaagcctacttgactgtggtttattaactttttgatgtgctgttggattcagtttgctactatttgttgagcatttttgtgtctatgttaatcagggatattggcctatagctttcgtttttggtgtgtctttaccagattttggtgttagaattatgctggtttcatagattgggtttcatagaatgagttagggaagagtccttcctcaagtttttggaatagtttcagtaggattaataccaactattggtatgtctggtagaatttggctgtgaatctctctggtccagggctttttatggttggtaggttttttttattactggttcgattttggaactcagtatttctcttcagggtttcaatttcttctgaattcaatattgggaaattgtatgtttccagaaatttatctatttcctctagatttcctagtttctatgcataaaagtcttcttaatagtctctaaggatcttttctatttctgtggggtctgttgtaatgttgcctttgtcatatctggttgtacttatttggatcttctcttttatctttgttaatcttgctaacagtctgttgatctgtttatcctttcaaaaaaccaactttttgtttcattgaacatttatatggattttggaatctcaatttcaattatttctgcttttagataattattttctactactagctttgggattagttcttgttattctacttcctctagttgcaatgttagattaatttgagatctttctgtcttcttgatgtaggtatttagcactgtaaacttgcctcttaacactgcttttgctgcatcccagaaattttggtatgttgtgtttctgtttttatttatttcaaagagtttttttgtttttttttaatttcaccttctgttgtttacccaaaagtcattcaggagcaagttggtttaatttccatgtaaaattatgtggttttgaggagtactcttggtattgatttctacctttttttccaccgtggtccaaaaatatgtttggcgtggtttcaatttttttacatttattgaaacttgctttgtcttcgagcatgtggttgatcttagagtatgttccacatgcagatgagaagaatgtttattctgtggttgttgggtggagtattcttctgtagatgtctattaggtccagttggtcaggtgtcaaatttaaatccagaatttctttgttagttttctgctttgagggtctatctaacactgccagtgggatgttgaagtcccccattattaatgtgtggctgtctaaatcttttcataggtctagaagtacttgtatgaatctgggtgctccagtgttgggtgcaaatatacctaggataggtaagtcttgtggaattgaatccttcgtcattatgtaatgcccatctttgtccttattgctgttggtttaaagtctgttttatctgatacaagaatagcaacccctgctcttctatttactgtttgcatgataggtctttcttcatcactttacttcaggcctataggtgtcattacatgtgtgatgggcctcttgaagatagtagaaggttgggtcttgttttttgtttttttttaaataaaatattattttattttttaaataaaaaaattaaaaagtggttcttgccactctgtgccttttaactgggtacatttagaccacttacattcaaggttaatattgatatgtgaggtttgatcctgtcatggtggtgtttgctgtttgctttgtagtcttgattgcgtatttgctttataggatctgtgaacctctgtatttatgtgttcttttatggtagtgagtatcattcttatgtatgcatgtttagaacttccttgagcatttcctataggctaggtgatgtagtttgggtatttgtccccacccaaatgtcacattgaaatgtaacccctagtgttggagttggcgcctgatgggaggtgattggatcatgtctgtgaatttctcatgaatggcttagcgccacccccttgatgctgtccttgtgatagtgagtgggttcttgcaagatctggttgtttaaaagtgtatgcccccacagccttcccctctcgttcttgccatatgaaatgcacattccctcttcgccttccaccacgagcaaaagcttcctgtggtctcccctgaagcagatgctggcattgtgcttcctgtacagcctgcagaatcatgagc

SEQ ID NO: 12826 - DNA, 2300 bp, Homo sapien
cagaactttacagtgatctgctgttcatgttttgggattctaccagtgtgttacatatattctgcacaaatatctttatccaagtttcatgatattcatagctaaaggaaacaagatgcagattggtacagtggattttatactgtagtctactggtttccaaggaaagaaaaaataggatacaaggtagaaattataagatacaaaaatgggaaaagtttcatgctttctataagttcagaagcaatttttccatcccatttcagagagatagcttaacatatacttctaccttttaaaaagactttcttcagtgtttcattttgtttattaaataaccattaccgataacatttctttacaggcaatcataatggcttatgcatttctttctccttcctctgatctcagtttgtgctgttcttctaagtgtaaataattcctgtgcttattaattaattgccctataggatatttttagactgtacttagaaatttcttctttgagagctaaactcttctggtacataagctgtagtgtgagtatcatttaggactacttataaaaactaacatcttgaagtcatttaccaaatagtaccctagtgactcaaaatttaatgccagcatacttacttgctttgagtaatgttgtcttgtatttggaataaggttataaaacagttggaaaggaaaggtgatttgacatattttagatagtagtcacaatgtccagttatctgcaatttttttgctttgataaatcagcactttaggttagctgacttatttgttcccagaaaaagagttaaaatcagtttaaaattttttatgctgtaaaaaaaatctaaaatcatataattttcaaataagtttttaagtagacaatatgataaagtggcaaagaacatgggctctgcctctgttcaaatctgtgagacactgcacctcagagcagtgtttttatctacaaaatagggtaataattgtactacctctcagaagttgatgttaggattaaatgagctatacatgaaaatgagtacagtaccttgcacatagtaagcacaccatacatattagtagcagtgatagaagttcttattattcctcttctattcaatgtcaagagcagtacctttcatacaggaagcctttttccttactcaacttgtccatcttccccttgttattcctcccaatgaggtaataagacagatataattggctaaatcctagcgatttttaacctcaatttctgtaacctccatgtaatttcccctctacctaatgaaagtgcctcagagttttgcaaaggatatacagatgtgtccgtaagggctgaagtcataggcaaagcttcttagacattttcagtttataaaacaataaaatactatctgtgtttttagactttacaaataacctgtagaaatggttttcctaaagtaaagccaaaaagaaatggagcaagtcaaaatgcctcccttttcatagtattacccccaccccaatgaaaagaagttgagaaatatatatgaaattattatggaataaatatttattaattatatttaaattatcaattacctaaatcagggctccatacattatgaggagaagttccttttcgtttctttaaaggcttaacatcacaaagggatggcttacactgcactctccaataatgacaagacaggacagtgaggatgatgtcactaatagtggttgagaagggcattggtgctcacaatttgtgtggaagctttcagataaaactgacatctcccaataaatcttaatatgcaagttgaagatcccaaatatagatatgttattcatctttttttcgtttcagaaaggaaattgattgctctattacttatatttggaattaaatgttaatatcttagtttaaatacttgactagaacttcagataaaatattaacatcttcaggaacatatcagttaattttgtaaacccttgaggctatcatttttttaatgtataatctcaaaatccccaattacatgaattcgtaatgcagttgatgactgtcatatcgaatgttcttagccctcaggcgaaccgcaaattgaggatgacatgttaaaagaagaaatgaatggattttcatcctttgcaaggtcactagtaccctcttcagagagactacacctaagtctacataaatccagtaaagtcatcacaaatggtcctgagaagaactccagttcctccccgtccagtgtggattatgcagcctccgggccccggaaactgagctctggagccct

SEQ ID NO: 12827 - DNA, 2300 bp, Homo sapien
ttcctgattcaattaacaagtttttatttagtgcctactctttgcccagtactgtcctaggaatcctaggagatataaaagaagccgtcatgaaacaacttttacagttcttgccaagtgtggagatcactgtggaatggtgtggctagaaagtcatcctggaagcagagtcttacttgcagagaagcagaaggcttagacaagtggaaagagggcaggaggggctgctggccaggggcaaagcttgacaggggcagaaagcgatataggtggtcagagaggcccgtttggaaagtccctataggtcaggcagaagaacttaaccttgggagtccattaagagtgataagagaaggaagcctggtattagcaaggaaataagagagaactgagaaaccagatgccaggagaccacccttgttgcaataatccggatgtaaaatgatgagggtttggatttagaatgttccagggggaacagaaaggaaacaaagaattcatgagacatttcaaaggaggaaataccaggtcttgatgacaggctggagatgataatgggagaagtcacacatgattccagtttttctaccttgggaagccagcaaagtgacttctttttagatctcttttctttgctcacacacaaattgaccccctcatagagttcagttgaaatatcaattacaaacagaattgatctattttttttcccttagaaacacaggtaatcttatttgcctttagctaaacgacccaagatgcaccttgctgggctttgctcttggatagcactcatacctctatgacaatgctccccactttggccttgtactgcgtgtgtggtgtgcaggtgcgtttatcacccactaaaccaaaagtccgtgttgtgcagggaccacgtctcatgcagagttaagtattcaaaagtttttgttaattgtttaagaaaatgagatttacatgaaacaatactttaaaaagctttccagaaacaacagcattaaaacaaaatcactgaaattaaaatttacataaattaaaaggttctgtgttccacatgccaagaaaagatcttacactattgtaatagtggtagggtcacacagttttattcctcagcttaagtgctgcaatacagtaataatgcagtacaagaatactgtataataaaccttaaacgaaacacttcatatatactttacacaagttattggatattgcttagtatttatttcccccacccctgctgtgcaaagatattaatatccctcttttataggagaggaaacaggtaaagagaagttaagaaacttgcacaaggtcatccagctagtaaatgttggagctgggatttgacaactttgtcaagtctccatccttaacagttctgctctatattgcataagcagacagctcccttttggggactgacaggttatttgaggcatatgaaccatttttggtgggggggctttcccacccagtactggaagtgtctagttatatggggcataaccttaggagcaagcaggaaaagaagaaatgtattccaatagtgttcagaaatataccagagtaaacgaataaccatcaataacagcattttacagcctacctaataacacaggaataaaaccctttatctggaacctaaataataccccctccactcattttattaaaagccttgctttatttggaaactcttaaaataagtggtcatacgattaaaaaaagcagcggcgcgccccctccccggcggccgggcgcagctgtccgcgcctcccccgcgcggctgcccgcattccaactctctgaggtcacgggccgccgccgcctccccggatccgcccgcccggctcagggggagggacgcctgggcccggccgccccgctgctccggccgcgcgtcccgcgtcggtccgacggtctgtccgtcctcctgccaccccccgcccccacggggcttctttgtgcggcgctcctcgccggccggtcccacctccaggcctcgcccctcgccgtcgccaccgccggactctgcccaggggaatggtctgcgagccgggtttttggagacaggaagtgaggcgtgcgagccccatgagcgcgccgcggcccgggctggcgtgcgggtgcggctgcggcggccgcgcggcggggccccgggaggcgggtcgctgagcggggcgcgcggccccgaggatgcgggagcgggagcgggagcaggtgagggcgcggtccccggccggcgggaggggcgggcggctggcccgagcggtggggtgtgtccactcgcc

SEQ ID NO: 12828 - DNA, 2300 bp, Homo sapien
tgcccttgttctgtgtcattctgctctgctgcctgtcatcaatgctgaatgagtgtatgatcactggatttatccttgaggaatgcttttgtaaattaggtctttaatttcttttaccctattaatatttaatgagtgcttactatgtgtccagcatcctgaaaggttggagaaatataaagccctacagagagtttataattttgttagggaagacacacacacacacacgaaataacattgcacagaatatattattatactaatagcttccatatagatgccataggaattcacaagaaaggattatatgagattattaaaggaccacgtgacagaccctaggtagccccacaactcctgcttctgctgtccccacaacccactcctgacccctagtgtggattgcttaggtaataaacatggcaaaaataagaggtttggcagatgtaattgaggtcgtgaatcagctgattttggggtcaggtcctgggtgggcctaacttaattaaatgaaagcccttggctggtctcaaacttctggtctcaagtgatcctcccacctctacttcactgagctgaaattacaggcatgagccactgtgcctggcttttactggcgtaagtgaacagacatgttagtgaaccctttggcaaagaactgtgggcagcctctaggacttgagagtggcttccagatgatagccagaaaaaaatctgggtccttactcataaagccacaaggaaatgaattatttttttttttcctgagacagggtctcactctctcatcaaggctgtagtggcatgatcttggctcactgcaacctctgcctcccaggctcaagcaatcctcccctctcggcttcccaactagctgagactagaagtgcatgccaccacgcccagctaattttttgtacttttgaagagacatgtttttgccatgttgcccaggctggtcacgaactcctggtctcaagtgatccgccagcctaagcctcccaaactgctgggattacaggcatgagccaccgcactcagccagaaatgaattcttgctaacaacctgaatgagcctgaacatagattcctcctcagtcaagcctccagatgagaatacagcctgcctgacacgattgtagccttgtgagaccctgagcagaggacccagtgaggttgacccacggaaaccatgagatgataaacgtttgtgttttaagctgctaaatttgtggtcatctgttatgcagcaatggataacagagaccactctcaggaattagtggatatgagggagaaaggagacctctctgtgcttcctctgtttcccaggttttgtgatcagggatagggagaattcggctattgatacaaataggggaatcaacagtagtaacctattgagtggaggaaggggagatgaaggcgacttctgtctaagcgctgagttgggagaaaataagagtagttacttagaatttgggagtggggtttgtgtgagaattcaaggctgatggaaaattcggtcattatcagcacagagttgacaacttaagtcctaagaacaaaagtgttgtcccacggagggtgttcagagaagcaggaggatgggattcgtctcggggagaggccacgggtggccctggaagaaggaaggcagaaccaaacccaggagggccagtgtactgcagagtcaaagagttgacggattggctctgttgctctggatagtccattttcccttcaagggtaattgcagtgcaacctctaatgggcagactccattttacaggtaagaaaagttgaaatacctggaccgataccatactgacagtaagtgagggctggatttgaactcgcgtctcatatcacagcccaagatctttctgctacacatttaattcattcttaccatccaagagagaataaaatgaataagcggagggccagcagagagactaacgaaaggtccccgaggtgcccgggaggcggagctgcaagaccacccgcacgcgcacgccgccgccctccttgcctgagcacaggtttcgcgggtagaaggcgtgcgcaggcgcggacacgggcgcatgcgcgttcactccggcgcgcagtgccggccggggcggggatacgccgtgtgcgcggccgggggcggaacggaggaggaggcggtggtgtcccggctgcggggtaggagtccgcggcagcctccgggtaagccaagcgccgcgcagtgctgagttcccgcacgccgcagagccatggagatcggcaccgagatcagccgcaagatccgg

SEQ ID NO: 12829 - DNA, 2300 bp, Homo sapien
acaacccactcctgacccctagtgtggattgcttaggtaataaacatggcaaaaataagaggtttggcagatgtaattgaggtcgtgaatcagctgattttggggtcaggtcctgggtgggcctaacttaattaaatgaaagcccttggctggtctcaaacttctggtctcaagtgatcctcccacctctacttcactgagctgaaattacaggcatgagccactgtgcctggcttttactggcgtaagtgaacagacatgttagtgaaccctttggcaaagaactgtgggcagcctctaggacttgagagtggcttccagatgatagccagaaaaaaatctgggtccttactcataaagccacaaggaaatgaattatttttttttttcctgagacagggtctcactctctcatcaaggctgtagtggcatgatcttggctcactgcaacctctgcctcccaggctcaagcaatcctcccctctcggcttcccaactagctgagactagaagtgcatgccaccacgcccagctaattttttgtacttttgaagagacatgtttttgccatgttgcccaggctggtcacgaactcctggtctcaagtgatccgccagcctaagcctcccaaactgctgggattacaggcatgagccaccgcactcagccagaaatgaattcttgctaacaacctgaatgagcctgaacatagattcctcctcagtcaagcctccagatgagaatacagcctgcctgacacgattgtagccttgtgagaccctgagcagaggacccagtgaggttgacccacggaaaccatgagatgataaacgtttgtgttttaagctgctaaatttgtggtcatctgttatgcagcaatggataacagagaccactctcaggaattagtggatatgagggagaaaggagacctctctgtgcttcctctgtttcccaggttttgtgatcagggatagggagaattcggctattgatacaaataggggaatcaacagtagtaacctattgagtggaggaaggggagatgaaggcgacttctgtctaagcgctgagttgggagaaaataagagtagttacttagaatttgggagtggggtttgtgtgagaattcaaggctgatggaaaattcggtcattatcagcacagagttgacaacttaagtcctaagaacaaaagtgttgtcccacggagggtgttcagagaagcaggaggatgggattcgtctcggggagaggccacgggtggccctggaagaaggaaggcagaaccaaacccaggagggccagtgtactgcagagtcaaagagttgacggattggctctgttgctctggatagtccattttcccttcaagggtaattgcagtgcaacctctaatgggcagactccattttacaggtaagaaaagttgaaatacctggaccgataccatactgacagtaagtgagggctggatttgaactcgcgtctcatatcacagcccaagatctttctgctacacatttaattcattcttaccatccaagagagaataaaatgaataagcggagggccagcagagagactaacgaaaggtccccgaggtgcccgggaggcggagctgcaagaccacccgcacgcgcacgccgccgccctccttgcctgagcacaggtttcgcgggtagaaggcgtgcgcaggcgcggacacgggcgcatgcgcgttcactccggcgcgcagtgccggccggggcggggatacgccgtgtgcgcggccgggggcggaacggaggaggaggcggtggtgtcccggctgcggggtaggagtccgcggcagcctccgggtaagccaagcgccgcgcagtgctgagttcccgcacgccgcagagccatggagatcggcaccgagatcagccgcaagatccgggtgaggcccgtgccggtcgggggtgggaagccaggtctcggcgagcgggcggttgtcaggagtaacggggactgtgggcccgggtggacgccgcggcctggcctccgctggacgctcctggcgggctgcggctcctcctcgtccaggccgcctcggccctggggacatttgcggcctcggagcgtggctgcggctgaagtagccgccgggaaatggaaggacaggcgcaggcccggctggagccaccaccgcggcgcacggcgccgctttggatccgctgcgggaggtgggcgccgcggggctggggctggagctggagtggggtgcggggtggggggcggtgcaggcgaggctcctcccagcccccgcccggggga

SEQ ID NO: 12830 - DNA, 2300 bp, Homo sapien
actgtgggtcttttgactgggaaaattaccattattgtgagtactatttttttttctaaagcgaccgagtagatccttttctccgataacttgatagaatacttagatttttaaaacagactaccaaatgaatttaaaaccaaattaattcaacattctcatctggccataaattgagttctttaacatgtagtgaagcaaagggtgatgtccccattttggcactttgctttcttaagttagtgttcattaacaccagccccaaacagactattgtgattatttggagccttgaagtaattgtgtccgtggggacagtagcatgtgactagggttctcattgaaacatgaggtttctggcatattttgagaggtactgggaagggatgtaaggcaaagtacctcatttataactaccaaaacaggttatgttacaagcaagattacagccttacagcatcagttttgaaagtaatagagtgaaatgatatagcatagtttgagattataacttgttttaacctctcagaattaagttgtccaagacaccatctagtttaagcagttaatataagctgcttaaatggtggtaataataagcaatattacatgtttatgatacttgttttactgtaagctacagtaaatctttagtacttacaaacagggtgacatattttgtagactaagactggtcagatgatattctttcccatatttttgcagaggctagatgttgaaaacagtgaagaaaaaaatacaattttttattgacttctgtaggatttatacaaagcccttttttaaaaatgtgaagtttgaaagttcataccatttattcactaaatacagtttatcagtatttatctcagctaggtgcggtggctcacgcccgtaatctcaacactttgggaggctgaggcaggtggttctctcaagtccaggacttcaagaccagcctggacaacacagtgaaaccccatctctatttaaaaataataaaaatataaaaaaatttaaaaaattatctctgaatataatgtcataaatttagagtgacagttgaaatgaaatctttcttaacagaaggtttatttttgttttttgtttttttcctcaggcttcatggtgtattagataaacttcgctctgttacaactggtaagattcataacttttttttttaatttctgcttgctatggcatatgatttgtttctttctaaagtcatagtgctttgggaaaaacccatcaatttcaaaacggttcatttgaacttttttagaaagcacatacttttatgaacttaagagcagtaaatttaacataattcaaagataatttaagtgtgggagagggagcagtgcactttatccgaaggaaataattacatatatgtgcaaagatttagcctcaaggatatttcagtattttataattgaaaacaatttaaaagttcagtcataataaacgaaattgttgtattaccatgtgtggaataatatttaactattaaaaataatgttgtggaagaataacagaatatacacgcataagatacatgttttaaaaaatgtgtatatatgctcttcccccgaaaaatcacctttgagataattggtgatttttattatatttttaaaattttctacaataaacatactgcttttgaattggtgatgaggaaggaaacgacttaaagtaataaaaatagatggccgggcacggtggctcacgcctgtaatcccagcattttgggaggccaaggtgggcggatcatgggctcaggagatggagaccatcttggccaaccaacatggtgaatctccgtctctactaaaaatacaaaaattagccaggcatcgtggcacatgcctgtaatcccagctacttgggaggccggggcaggagaatcgcttgaaccagggatttggaggttgcagggagccgagaacgcgccactgccctccagcctggcgacagagcgagactccatctcaaaaataaataaataaataaaaataagaaataaaaatagattaaaaggactgtatttttcttttcagaaccctctagtctgaagtcttctgataccaacatctttgatagtaacgtgccttcaaacaagagcaatttcagtcggggagatgagaggaggcatgaagctgcagtgccaccacttgccattcctagcgcgagacctgaaaaaagagattccagagtttctacaagttcgcaggagtcaaaaaccacaaatgtcaggtaagagtctggtgtagacctgctgggggcagatggct

SEQ ID NO: 12831 - DNA, 2300 bp, Homo sapien
aagtctgtgaatccaaagccttgaattttgaacattattttctgtctggaattttgaagaactgattcataaagtggagaaatgaataaagatttttattttacaaattccagcacttagcattttctttattctgttactgtgacatctatttgggaaaccaaagactaccattctttataaggattcctttttttttttttttttttttttttttgagacagattctcactctgtcacccaggctgcagtgcagtggcgcagtctcactcaccgcagcctctgccttcccaggttcaggtgattctcatgcctcagcctcccgagtagctggaattacaggcatatgccaccacgcctggctaatttttgtatttttagtggagacagggttttgccatgttggccaggctggtcttgaactcctgacctcaagtgatccacctgccttggcctcccaaagtgctggaatgacaggtgtgggcctctgtgccaggccaggattcttcttttaagagactatagtgagcagcatctaccaacttgcatccttgtatgttgcatatcttatttgtttgcttggggagtaaaccaaagtaaaaacgtcctttgtcaaattaaggaccttacaagattttctgtgttaatggattggaagtctttactattctttttttttttttttgagatggagtctccctctgtcgcctaggctggagtgcagtggcacgatctctgcttattcagtctctgcctcccgggttcaagcgattctcctgcctcagcctcctgagtagctgggataacaggcgtgcgccaccacacctggctgatttttgtatttttagcagagacgggatttcgccacattggtcaggctggtctcgaactcctgacctcataatccacccaccttggcctcccaaaatgctgggattacaggcatgagtcaccacgcccagcctagatgtctttactattcttaagatggcagtagtccccaagttgatctatggattcaactcaatccctgtttaaaccccaaattgcttttttttgtagaaatcggcaggctgatcctaaaattcatatggaaataaaaagggactgagaatagccaaaactattgaaaaagagtaacgttggcaaggttatgttgcttgatttcaaaacttactacaaagctagagtaatgaagactgtgtggtactggcataaggatgaccatacagacccgtggaccggaattgagaatccagaaataaatgcatactttcacaacccatcaatttttggcagcggtgttaagacagtttattggcaaaagaataggtttttccacaggtgatgctgggacaactgaatatccacatgaaaagaatgaagttggaaccttatcttatgtcataaacaaaaataactcaaaatggatcaaaaacctaaacttcaaaactcttagggaaaaaaatagatatgtcttggattccagaatgatttcttaaatatgacaccaaaagcacaagcaaccaaaggaaaaaagataactcggacttcatcaaaatttagtatttttgtgtttcaaaagatactatcaaaaaaaaaaaagacaacaaaatgggagagaatatttaagaaacacctgtctaataatggtctagtattaagccaaggctgagttcttatttccccatccttaagtttacacgatactatattagtgaagttgaattctgtcattaccacatgtatcttgaaagaagtttgtgtggatcacgggtccagttactttctccgccctttccctccagaggatttgtcactctcaataatgttatatactaatttcaaggggaaatacaactcaaaacaaatcagaaatctgaagcttaaaaatgttatggtttagatgatgaaaagggaaaagtacatttaattcatatcatatttagatgtaaagcacttaatgttatattgcttaacctataaagtagcgcttcagtgctctcatcatatgaagtaaataatagaaaattctttgtgtgacacatgtctgttttcagccaatcagaaaccaggattattttgtatgtaataatagggtttactggaagaggagctatacagatggtacttagaggatgtagggccctacgtattagggcttcttagttgtagcgaagagcaattggtctggtacgtttagctttttcacatttagttttgaattctgactctagaaatgtacaaccccatcttttgaattacaggttttaagatgttatttgctcttaatacgtctt

SEQ ID NO: 12832 - DNA, 2300 bp, Homo sapien
ggtgtgcacttgctttccaggctgctgctccccgtctgtcccttattgcatttatcatcttcagcccagtcagtcttgctgttaggggaactgcccagtctctgtaagtgatggcatttgtgaccccattgtaggtaaaaatgttttcccctttttagacattgctggctgagcgcggtggctcatgcctataatcccagcactttgggaggccgaggtgggtggatcgcttaagtcctggagttcaagaccagcctgggcaacgtggggaaaccctgtagccaggcgtggtggcacgtgctacttggtaggggctgaggtgggagtatcacttgagcctgggaggcagaggttgcagtgagccgagattacaccactggcacaccactgtactccatcctgggtgacagagcaggaccctgtcgtaaaaaaaaaaaaaaaaaaaaaaagtaaaagacattgctgagtttcgcacctggacttacagctcagcaggtgggaatccttttgtatttgggccactcatcatcttgctggcgtgtgaggattcacatctccttatcaccttacctgttttcagtttttatttaattttattagttccccacttgacgtccttctctatttttaattcagctatgaattagtattgagaattagaatttttggtgaaaaatttggccgtagttgcagagtcactgtcctctttccttttcacagtgagaactgttgtcttcttcctggcaaccttttataggattctatggccagtgttaatcccataatttgagctcacttattttatatgactgtacatttaacagaagattctaagacaggtttgagggaaatatgttaaaggtgctgtgtactgaattgatcataatgaatgaaatacttttatttcctttccctttgtagctgagatgagtgaactgagtgtggcacagaaaccagaaaaacttttggagcgctgcaagtactggcctgcttgtaaaaatggggatgagtgtgcctaccatcaccccatctcaccctgcaagtgagtaccatccccccatctcaccctgcaagtgagtaccatccccccatctcaccctgcaagtaccatcccccatctcacctggcaagtaccatcccatctcacccagcaagtaccatcccccacatctcaaccctcaagtgagtaccatcccatctcaccctgcaagtaccatcccatttcaccctgcaagtaccatcccccatctcaccctgcaagtaccatctccccatctcaccctgtaactaccatcccatctcaccctgcaagtgagtaccatccctgcatttcaccctgcaagtaccatctcatctcaccctgcaagtaccaccccctcatctcaccctgcaagtatcatcccccatctagccctgtaagtgcgagtaccatcccccatcttaccctgcaagtaccatcacccacttcaccctgcaagtaccatcccccacctcagcctgcaagtaccatcccccacctcagcctgcaagtaccatcccctatctcaccctgcaagtaccatccccatctcaccctgcaagtatcatcccccacctcaccctgcaagtaccatcccccatctcaccctgcaattgagtaccatcccccatctcaccctgcaagtaccatcccccatctcaccctgcaagtgagtaccatcccccatctcaccttgcaagtaccatcccccatctcaccctgcaagtaccatcccccatctcaccctgcaagtatcatctcaccctgcaagtgagtaccatccccccatctcatcctgcaagtaccatcccccatctcaccctgcaagtaccatcccccatctcaccctgcaagtaccatcccccatcttaccctgcaagtgaataccatccccatctcaccctgcaagtgaataccatccccatctcaccctgcaagtgaataccatcccccatctcaccctgcaagtgaataccatccccatctcatcctgcaagtgaataccatccccatctcaccctgcaagtcatagccagctgattttggctttcagtttagtgtctgtatcttacaccttattttgtttttgtttttctgtggacaagtttttagttttataactaaatggagtgacaattaccatggccctctccagagtagcgtatttcttgttcatgtatgtttgttgagaggcaagggtgggggggctttgtttgtgcctcggacctgtgagatactgaaatacctggggttccttaagaattctgtacgtttaagcaga

SEQ ID NO: 12833 - DNA, 2300 bp, Homo sapien
agacaggagatgtgcaatccatgatatcaggttagtgaacaaatggaatagagtttctagtatatacttgatttaacttccatttgtaaaattttccatagccttgccttcaaaaagaggtccccagggcctgtagcatttcccgtattataaattgtatgctaaaatatggctgtttgtatactacttaattcttcttgctaaattataaacccactgggcaccaactataatagcaagtactagtaggtaatgtttgatgaattcatgttaacacttagccatgtccattaagttcatcccaccaagaggtatctcccactgtaatacaagagagctatctgcccttcaaaagttgtcaccctggaaaactaaagttgtgatttcaaacatatcttctcttagtaacctcagtttgggaatatgtagttcattaatttaatcaatacctattgattaaatgttccagaatccaaattaatttaaatgtttcttaaacctttgtttttcagtgcttaagcatttttcaacagtggctaccatttacggagtacttccgtgtgatcagtagataagattattgaatctaggtctgtcaaaagcttgtacacttttcatcagtaaaatccttttacaaatgaaaccttcctcagaacttcaatatataaaatagtaacagtggcttcccttagcttttacatgtctctatcgtacctcagtaagactcatgggccatttcaagagactgaattgtcccatatgactccaaagattgctaggcaaatagcatttcactttgtcttttaaataagttcttcaggccgggcgcggtggctcatgcctgtaatcccagcactttgggaggccgaggcaggcagatcacctgaagtcaggagtactcgaccagcctggccaacatagtgaaaccccatctcaactaaaaatacaaaaatcagccgggcgtggtggcaggcgcctgtaatcccagctactcagggggctgaaacaggagaatcgcttgaacccgggaggcggaggttgcgccatcgcactccagcctgggagacaagagcgagacttcgtctcaaaaaaaaaaaattcttcttccaagattcaagttgtgtcatttcaccttaataactggaggttagttaagctgggctgtgttctttgcttaatattaagacaacgttttttccagatggaagaaaactatcttaatgaattgttagcttattaattatgtaatgctaatggcttttaaaagctgagatgttctgactgggtgttgtggctcacacctgtaatcccagtaccttgggaggccaagggggaaggattgcttgaggccaggagtttgggaccatagtgagaccccgcctctatttaaaaaattaaattttgttttgttttgttttgagttggagttttgctcttgttgcccatgctgaagtgcaatggtgcaatctcagctcaccacaacctgtgcctcctgggttcaagcgattctcctgcttcagcctcccgagtagatgggattacaggcgtgcaccaccatgcctggctaattttgtatttttagtagagacagggtttctctatgttggtcaggctggtctcaaactctcgacctcaggtgatctgcccgcctccgcttcccaaagttctgggattataggtgtgagccactgggcctggcctaagaaagtttttttaagccattagacgtttttaaaggaattgggagatgacaattggggaaatatttaaaatttaagtaaaatataaagcttccttatttcatgtaacccagacaatctcagtatacatgatcagttgtgtctgacaggtaaatctatttgaggccttatcacacgttacttttaagaactagaaaggaaaagtcactgatcttaagtatttataatacttcatgtggtctaatactttttacgttttgttttgattcagatttagtccggattcccggtatctggcagtaggttctagtgagaactcagtggatttttatgacctaacgctgggccccactcttaacagaatcagctactgcaaagacattccaagctttgtcattcaaatggacttctctgcagatagcagttatctccaggtacagtaccaatactgtatacccaggtggcaagttcttctgcttttacatttcgtgttagtgaatgcatttaaagttcctgagctccagagctccagcttctcaactcctccctttgtaccttctgacctacagctcccctttcctcccccacttatcagagctt

SEQ ID NO: 12834 - DNA, 2300 bp, Homo sapien
atatgtataattatgtgtcaatttcaaaataaaaattcaaaactacaactcctatgaaaatttttgagcgtgtttgtacttattaagtgtatttataaatcatacggatattatcttcagcctgcatattaaattgtagttaagcttttactttttaactaaaaaataaattctattattttttcctatatcccactgcactgaccccagtttggaaatcctaagattatcaaataaaaactttgattattgaagaatccaggtgtactgccacagaaaagttctattctgtagcatggactctaatatgtaatctagcccattgtgcttacagatagatgtgtgcctgtagtcatagaaaaatttgcatgagctaatgactgccttgctactagattagctcaaagcaaaaagttctctgaaagcaggtcaatagggtcatttttatattatgaagaagaaaagcagctgttgtattacattcactgtattggtcctgcttgtgtttcagggcaagatccttgttgggacaaggaatgctgaaataatcgaagttggagagaaaaatgcagcttgtaatattttagttaacggtcatgtggatgggccaatctggggactagcaacacatccttccagggattttttcctttctgctgcagaagatgggacagtgagactttgggatattgctgataaagtaagtacagataatttttttaaaagaggttacaacttctaaaaagaaaagttggaagttctaaattgctagtacttaaagaactgccagaattctgttgagcattttgaggggaaactggtataatttagaagtacttcacttaatgtttcctatgactctttttttttttttttttaaatgcagaagatgttaaacaaagtgaatttgggacatgctgctcgtactgtgtgttacagccctgaaggggacatggtggctattggaatgaaaaatggagaatttatcattttactagtgagttctctaaaaatatggggaaagaagagagacaggagatgtgcaatccatgatatcaggttagtgaacaaatggaatagagtttctagtatatacttgatttaacttccatttgtaaaattttccatagccttgccttcaaaaagaggtccccagggcctgtagcatttcccgtattataaattgtatgctaaaatatggctgtttgtatactacttaattcttcttgctaaattataaacccactgggcaccaactataatagcaagtactagtaggtaatgtttgatgaattcatgttaacacttagccatgtccattaagttcatcccaccaagaggtatctcccactgtaatacaagagagctatctgcccttcaaaagttgtcaccctggaaaactaaagttgtgatttcaaacatatcttctcttagtaacctcagtttgggaatatgtagttcattaatttaatcaatacctattgattaaatgttccagaatccaaattaatttaaatgtttcttaaacctttgtttttcagtgcttaagcatttttcaacagtggctaccatttacggagtacttccgtgtgatcagtagataagattattgaatctaggtctgtcaaaagcttgtacacttttcatcagtaaaatccttttacaaatgaaaccttcctcagaacttcaatatataaaatagtaacagtggcttcccttagcttttacatgtctctatcgtacctcagtaagactcatgggccatttcaagagactgaattgtcccatatgactccaaagattgctaggcaaatagcatttcactttgtcttttaaataagttcttcaggccgggcgcggtggctcatgcctgtaatcccagcactttgggaggccgaggcaggcagatcacctgaagtcaggagtactcgaccagcctggccaacatagtgaaaccccatctcaactaaaaatacaaaaatcagccgggcgtggtggcaggcgcctgtaatcccagctactcagggggctgaaacaggagaatcgcttgaacccgggaggcggaggttgcgccatcgcactccagcctgggagacaagagcgagacttcgtctcaaaaaaaaaaaattcttcttccaagattcaagttgtgtcatttcaccttaataactggaggttagttaagctgggctgtgttctttgcttaatattaagacaacgttttttccagatggaagaaaactatcttaatgaattgttagcttattaattatgtaatgctaatggcttttaaaagctga

SEQ ID NO: 12835 - DNA, 2300 bp, Homo sapien
gaactgagaggcaataaattaataaccagcacagtcttcccctctggctagtcaggatccacatgaacctttatacacacatttgaacttcagtacaatcacagaactaaccttatgtttctacccaaagagatgcagctacccttggtacaagtgaagtagttctcacccctaaagagagaagacctacgctattctcaaatttagtcacggtcttatattcttttaacacaaggaatattcttttaacacaaaattgtaaagttaacctccaacaaacttgtataaaatatgaaggagaaaaaggagagaaaagtcaaatagttaatatacacaaataaagatatacatataacaaacattatatgcagctcctgaaaaggattcatatattaaattgtctccttcatgtcttcacttgaacttctcataggcatctttaacttaatttgtacagaactaagcactggtggttcctcctctagtttatcccatctcagtaaatggcatcaccactcaagcaaaaccatgcccttgacgcctttcaccccacatccagttggtcaaagttctgccagctctatctttgaaatatatccaaatccttcctcttatcacctccactgctgccacccagctccaggtcatcatcatctcttgactctcaaatctgagaaatcacatcttagatttcttcatttccaatgtatgcttgataattaaatgactacttgttctcaacttatgctataacttttcattctgtatataccctgtcctttcctcatcagatttcatacaagataccaaaatccttagggcttttgaatatgtttgctgcaacccttgctgttagggtaagcccttttttgtgtttatcaatgcagcactaacccttatttttacgaatgttaacatcattaatgacattaatgaacgatattaatttatcattaataataaaaatatcatttcatatatggttctgaaacgtatatatacagatgtatcttcctacctttaataatggcctattagatttttaaaaatattttagtttcataggccaggtgctgtggctcatgcctgtaatcccagcactttgagagtctgaggcaggtggttcacctgaggtcaggagttcaggaccagcctgaccaacatggtgaaaccccatctctactaaaaatacaaaagtagccaggcctggtggcacatgcctgtaatcccagctacttgggagcctgaggcaggagaatcacttgaacccaggaggcggaggttgcagtgagctgagatcatgccattgcactccaccctgggcaacaagagagaaattccatctcaaaaaaaattacttttataaagatgacttatttcttaaatttctgtttttttggaaagaagctacaaaggtaaaacctactctgcaaaacttccacatatatcattggctttttatgttaattaaaatctctcattctttttcatcaacttaatttcttttaaggtaaatatccatacttgcttttgttgtattcagaagtgagtttcattcctgcttagaattccataccattgacttctatagaaaacttaatctgtatctcgactcctttttaatattgatttgaagccataataaagaggcaacctttttagcaaatattttttttttttttgaggcaaggtctcactctgtaacccaggctggagtgcagtggtgcaatcatagctcactgcaccctcaacctcctgggctcaaacagtcctcccgcctcagcttcctaagtaaatgggactacaggtgtgtgccaccatgcctgtctatttatttacttacttacctgtcttcccttccctcttctctcttccccctcgccccttctcctttgccccttgccccttcccctactctgcctactggcagagatggggtcttgctatgttgcccgggctggtcttaacctcctggccgcgggcagtcctcctgcctcagctccccagagtgcttggattataggcatgagccaccacacctggcccatactttaaattagaaaaaagggaaaattgcctaatatgctctttctctttcaggtgggaggtgttgctgtttttctcctgatggtaaagctttagccgtaggtctcaacgatggaagcttcttaatggcaaatgcggatactctagaggatcttgtgtcttttcatcacagaaaagatatgatttcagatattcgattttcacctggtaagatccattgaaattgtatttgagtattaacttgggtctggcag

SEQ ID NO: 12836 - DNA, 2300 bp, Homo sapien
gctgaaacaggtcctttacctccatttcctatcttctgctgagctaaatctcattcattcctcagaacaaaatggagacatcatagctatctactccacttcctttgatatgtctccccagaatcactcagctagaaatgattcttcggttgtatgctctgatcaactctgtacctttactttgtgatgtattatgaactgttcatgtatgagtattcccaggcttttgcctccttctgcttcttaaaagaaaccatagtgatcatatattagtctcccagagacttaattcagaatgttttaaaaaattaacaaattttcatctaatagttgtcgtctttgctttaaatttgtcagagaaactcttcatgtgagagagtggtcatataattcacaatattgacggagcgatattatactaaaataccaatcagtcaaccacaatctctctctgttaccttctaccgtgtgtgtgtgtgtgtgtgtgtgtgtgtgtgttggtgagcagtggacatgttaacagaaaaccttggacataagacgttcttctcttcttaattggaagcaattaagtctctaaacaaaaatgctataaaaaataccaaaatacttctgaagaattttccagaagcattttaatgcaggtcatgaagattataattataaaattttaaataaaggaggcataaaaagtaaaagctgccaaatagtgccttagacttttcttaaaaatcttactccatatagggagggaggaatggatggatggatggatatggagcaaagggcaatacggtatatggatttaatgttaacttgaaggagtccctgggaaatgcagaggcagctgtatgagtctatgcataggaagaggaccttgcaagttgcagaggcagaagtgatgttgaccagggaaactttaaaaaaaagtacagaagcttcaaataatacaatcttggatttatcttggggctcatttttctatttctatttctagtactatgttggttagcataatcagtaagtactgtaattaacaggcccacagctgtatagtgactcaaatacaactgaagattaattcttgcacatgtgtaacagaagtcaataaaagcaaaatttttctggagaaaagtctctgacactgattgaaaataagaatttttacttccccctaccttttctccctccctctgtttctccttctcctgcccacaaactccacaactttggaaactccgtggtgttttactacatatttatccatcttttggttgttactaatatctgtattattttggatactcaataagaagtcatcattgaaaaaaagttccacttcactggtcaacatggtccctaagggaggaatgtgtgttctatttaaaaacgtcaaaaagattagccgggtatggtggtgtgcacctgtaatcccagctactcgggaggctgaggtatgaggtgagaatcgcttgatccccagaggtggaggttgcagtgagccgagatcatgccactggactccagcctaagcaacagagcgagactctgtctcaaaaaaaaaaaaaaagtattactgaagtaatatagatgaattcatcctttattatttcctaaatgtaattttgcacatttagctccttacaaaaaaaaattgtttgaaaattatagtgtttaaattaaacatttttcataaactccatatttacaaagaacttcttttaccataaaaatctattactttatttcctttattctttattaactccagaaatttagtatggatctctgaagtacttaaagtaatttagaaactgaaattcagcattttcctgtacatctggcatatattgtttccatgtatttctgttcagcaacgtattgttgctgaattaatactacttgtgttatttatgtttactttatagtttataaacacttgatacagcttcacggtcattttagacatgtttgaaacggcattaattctgttgtgacttctgttcatgtagtctcatttttttctttttaacagagatatgacggaagttgtacatattaaagataggaaggaggcaattcatgagttaaaatattcaccagatggaacttaccttgctgttggatgcaatgacagctcggttgatatttatggagttgctcagcgttataaaaaagttggcgagtgtttgggatcccttagtttcatcactcatctggactggtcttcagacagtagatatttgcagacaaatgatggaaatgggaaaagacttttttatagaatgccaggtaacaat

SEQ ID NO: 12837 - DNA, 2300 bp, Homo sapien
gatggtttaattaagaatgtttttgcttcgcactctacacttgggtcattaaaatcgtaatggaaaatatgataatgggaaaataaattacttaaatctcttattaatctgagtacttaagtgtgtatcatgggatccataagatattgtgctgaaaaatccgaaacatagaaaaaactatattcttccatctcgtctcataaaatttacatgtaaccagtaattaatatatcacaaatgtatagcaacaaatatttaatgttttctaagttcactgcttgaatttaaataatcaacaatttttctttttctcaccaggggatttcaaggaactcactagtgaattagaacatattcttattaaaaaacagaaaacgccctcctggtgacaaagagaaactgtgtgtgcttttgcccagggtaccctacatgggccttagagccacttctcaggcctgatttctttgtttatttgcagcagctgccagaaagctattcctctttttcagattctgcccagaatggaaactctttcagagtttacttttcatgacatctatgtaaattcctttcagatggcctttatttcctgcatgtaaactgcttgcagattagaagtcataatcaaagacgaaacggtaatcctgtctcaagttagtaactggcatctttgaggaagtagacattggataacatctattccaatatatctgtaccacacaggagtcaaccccttttggagtcatatttcttgaaacgatggtagtttattttagcttttgtcagatttctgtcttggtatttcctatggaaatcaaacagtaatttttagacaataagggttcatattggtatatcctgaattagtatttttttgttgtaaatcttgtggccatcctgaacttaacactttttaaattgtggatttccaattatttttagaggtattgataaatcttgttcatattcctgtgagaagaggacacaactgagtaggaggggaaatgacatagtcaggaattgattgttcccaatacttttattacaggagttttctacaggatcacaattgaatttatttaattaagagtaactgttggtgatgtcccagtcatttttaaaaaaatcgaagtacaattttttttttttttgctattcggaaatcagatctcacatgtcagtttaccatctaaagtctaccttcagctttgcggtcacttaagaaaacatacacttaggaccaggagcagtggattgggcctgtaatcccagcgctttgggaggcctgaggcagaagaactgctgaaggtcaggaggtggagaccagcctgggcaacacagcaagacccccgcctctacaaaataaacttaaaaacaaagcaaaacatttgccgggcatagtggtacgcaactgtactccttactactccggagactgaggcgggaggatcgctggagcccaggagttggaggctacagtgagctgagactgcgccactccactccagcctgggcgacagagcgaggctctgtttctaaaaataataatttaaaagcacatttaggaagctcggcatcattccaatgtctgggtccgaaagcactataaggcagcaagacacacaaggtatcaagcgtaaaaaagagaatttagcatcccggtgtggattttcccaggcaaaaacgtggcctacgctgggtgcagggaccgtgcggaaccggcaggtgcttcccggttgaggacgcaaagcagcgggagcccggggtcgccgagggtccgcctgggcttaagcagctcaacgagggagggctcaccggcccgcgcacttgcagagacgcggtcccagcgactccgcaactagaccgtggccccgcgaactccagcctcttctcggctccgggaggggcggagtgagcgcgggagggggcggggccacgcaaggccgcgcgcccgccgctcggctcggctcggctcggctcgctcggtttcggggtgcgcggcgcgggtccgccaggctgtggctacaaagccgcggcggggcgcgagcgccgcaggtgaccggggctgggagctgcgtgcgcgggcggcggctgaggagctggaggcgggccctcgctctcggcccaggcgctacgggctgaggagactaggcgagccgaggcgggcgaagggctctgggcatccacttgacagccggcggcgctcgcggccctcagcatgttccgcgaggcgagggttttcctcccgcctgtgggctgaggcggcggcggcccccgaaacgagatgcacctgacgggcg

SEQ ID NO: 12838 - DNA, 2300 bp, Homo sapien
agaaatatctagttgctacagagtaaaagataaggatctatgaactgagatctagcatcgattgtgaaactaacccttttaaagggcttgtttctctgtgcttcactttctctaggaggaaaatggtcctagtaactcttatctattcccttcaccaggaattgttacattgtctattcttcctattactagcatatctttaaaaaaatggtttctgctttatcagttagatattattaaaaaatgtaagtctgtctataaattcataaaatcaatgaaccataaacatatttacatgatattaaaaataacatatttttatatccttttaaagacacattttatgctacatttggacatgtttaacatcctgtaatttactaaatatcctacaattttcctcattcatttgacttttgtgagaggaaaaaaacagccttctgaaagaagttaacacacattatatgctactaaaatattttaatgcctcatttgttccacatttatttatatgtttattggcatgtttatttccccacttatgtaaatagtgtttctctgtaggaagttggcaataatctcaatagatacatgactagaactcaatgtagtgggtgattaatcctggctacccatcagaatcacctgagacacttaaaaaaacaaaaccgatgccccagtcctacctcaaacaatttaagtcaatatttctagggctggaattgggacatctctatttttaagaacttctcagatattctacaaaatacttgaccagcacttttcaacactgtcaaggtcatcataaacaaggaatgtctaaaaaactgccacagtgtcagaggaggtgaaggagacatgataaccgaatgttatgtggtaccctaagtgagatcctggaatagagaaataacattaagggaaaactactgaaatccaaataaactgtggagtttatttaatagtaatgtaccattgttgattccttagttgtaacaaatgtatcatcttacactaaaacaaatgtcaacatctcacacaatagagaaactgggtatatgggaactgtctactatttttgtgacttttctgtaaatcgaaaactattctttaaaaaagtttatttagaacatctgactatatgctagagagtaaaagataaggatctatgaactgagatctagcatcatttgtgaaactgacccttttaaagggtttctctgtgcttcactttctctagtagggttgaaaatcacttacatagtaatctgcttacagtgtaccagaaaacaaaaagacgctgtgaaatattgagcccaattgtcaattgtcggcatgtgcgttcttaaaaatttgacactcagaaaccatgggctgcttcattaggacctttagggagattacatttctaccggcagttccaggagaacacaaatagactaatgacaatacacttaactgtaacaatgacaatcctgataattactgacttccaaaatacaacaattcaagaaagactgcttagtagagaataaaaggtaacaataaatttcttagtttagaagcataagtttcattttaatacctatgaaaaatataaatatgtggattaaatagaatgtctaatgttttctcagaccccagtggtttgagaaaagcctacctggatttagccggtcacacctctcttttcataaccattgcaattttaagcatatttgtcatctgtgcaaatttctagagaaaagtcagaattgtgtttgaagaaatcactctgcacaagtaaacccttgccaaacagcaagtgccaggagacgatgtttcacaaagcttttaaaaattattattattattattattattattattttgcacacattatctagtttggtaaaactgtcaccaatttacaatccggaatcaccatgtgagtcgaattaacaaatgtattagcaacttgtagtcaaccagattgcagttccagctccctaactcaatgcaattttaataatttctcttctctgagtctatctcagtttctcatctgtaaaatgagtaaaagcaaaccacttgcagttcagatgttgagattcggtgggaaggacctcgagaaacagcggacaatttcaggatttaggactttaggtcttgatgggtggatggtactgtggaagctgtttacttgtttgtatttctagaatcggaaggtaaagcgaaagggatggaaacgagcgaatggaagaagtaggacagacaccagacagagatcaactccagggactcttccggacctgcagggc

SEQ ID NO: 12839 - DNA, 2300 bp, Homo sapien
ttatttatatgtttattggcatgtttatttccccacttatgtaaatagtgtttctctgtaggaagttggcaataatctcaatagatacatgactagaactcaatgtagtgggtgattaatcctggctacccatcagaatcacctgagacacttaaaaaaacaaaaccgatgccccagtcctacctcaaacaatttaagtcaatatttctagggctggaattgggacatctctatttttaagaacttctcagatattctacaaaatacttgaccagcacttttcaacactgtcaaggtcatcataaacaaggaatgtctaaaaaactgccacagtgtcagaggaggtgaaggagacatgataaccgaatgttatgtggtaccctaagtgagatcctggaatagagaaataacattaagggaaaactactgaaatccaaataaactgtggagtttatttaatagtaatgtaccattgttgattccttagttgtaacaaatgtatcatcttacactaaaacaaatgtcaacatctcacacaatagagaaactgggtatatgggaactgtctactatttttgtgacttttctgtaaatcgaaaactattctttaaaaaagtttatttagaacatctgactatatgctagagagtaaaagataaggatctatgaactgagatctagcatcatttgtgaaactgacccttttaaagggtttctctgtgcttcactttctctagtagggttgaaaatcacttacatagtaatctgcttacagtgtaccagaaaacaaaaagacgctgtgaaatattgagcccaattgtcaattgtcggcatgtgcgttcttaaaaatttgacactcagaaaccatgggctgcttcattaggacctttagggagattacatttctaccggcagttccaggagaacacaaatagactaatgacaatacacttaactgtaacaatgacaatcctgataattactgacttccaaaatacaacaattcaagaaagactgcttagtagagaataaaaggtaacaataaatttcttagtttagaagcataagtttcattttaatacctatgaaaaatataaatatgtggattaaatagaatgtctaatgttttctcagaccccagtggtttgagaaaagcctacctggatttagccggtcacacctctcttttcataaccattgcaattttaagcatatttgtcatctgtgcaaatttctagagaaaagtcagaattgtgtttgaagaaatcactctgcacaagtaaacccttgccaaacagcaagtgccaggagacgatgtttcacaaagcttttaaaaattattattattattattattattattattttgcacacattatctagtttggtaaaactgtcaccaatttacaatccggaatcaccatgtgagtcgaattaacaaatgtattagcaacttgtagtcaaccagattgcagttccagctccctaactcaatgcaattttaataatttctcttctctgagtctatctcagtttctcatctgtaaaatgagtaaaagcaaaccacttgcagttcagatgttgagattcggtgggaaggacctcgagaaacagcggacaatttcaggatttaggactttaggtcttgatgggtggatggtactgtggaagctgtttacttgtttgtatttctagaatcggaaggtaaagcgaaagggatggaaacgagcgaatggaagaagtaggacagacaccagacagagatcaactccagggactcttccggacctgcagggcaggcagagcattcggttgctaggcagctgcgcctcctgggagggtgggggaccccaggggcaggtgtctaactcactacctttttgtttagccgcggtgccttcttttcaaaatcaatgaaacctgtagcctttaaaagtagacatctttttccaaccaagtttaggcaagccctgtagccgagttctgcttgcggttgtttttctttttcctgttctcaggcgcgctgcgggcacctctcggacaaggccccagccgtcgcgggttgccgggcagagtcggacgccgccagctcttcactccacgcccacctctctcctggagcgctgggccttcgctggccgcaccggcagccatgagctcggagatggagccgctgctcctggcctggagctattttaggcgcaggaagttccagctctgcgccgatctatgcacgcagatgctggagaagtccccttatgaccaggtaccggccagctcccgtcagcctgtgcatcctg

SEQ ID NO: 12840 - DNA, 2300 bp, Homo sapien
aatgtgttaagaggtaaacatgtttaatataaaatgaaataacaacaatgaaggatggctatttctataagctgtgtagtatttctaatgctattttaatatatgttttatttatccatgggttttaggcagcttggatcttaaaagcaagagcgctaacagaaatggtatacatagatgaaattgatgtagatcaggaaggaattgcagaaatgatgctggatgaaaatgctatagctcaagttccacgtaagtattgggttttcagttaagttaatgaaataccattaagaggaagaatactgtgtataagaggaatatatatgcctatatatttctacactttatatatataaacattatagacatgaaacaaaaatgatgaaaaaaccattacttcaagtaaatggtttctgttctgccttatggtacaaaggctttttccccacaattcagttatcttaaacttaaggtatgagattgatgtataacaattttctgatacaagctatattatgcattttagaaataatttatacctacattcaactgctgatcatatgggaaaaatttataaaagtacattctatttgaactacttgtctaatatatcagaatattgtttatctgggaagtatccaaacaacagaggtgttctaagagcactttaaaaaaaggtcgttcgaaaacatcactttattcttataatcgaacatgatttgctctaaatcataatgtgaggtaatgaggtgatatgctgggctgtgagtgtctgttgggattgtcacagaggcacagtccccagcttggagatgtggtggtacaaatggtattggataatggctgatctaagagtgttgtttacaactaattgatcacaactcattacagatttctttgttccttcttcactcccactgctttacttgactagccttaaaaaaaaaatggtattgaattataaccaggacatatggtggtcttgctggtaattatagttctcagtcatttatatcttttggaaggtaatagctattttaaaccttcaaatagaaattgagaaaaaaatacatatttttatgttaatatatctttctttaccattattttgttcttttagaattaaaaatatctaaattctagatattgtgggtaaattatcttttattgggagaagtttgtatgagaaataattgaactatgaagatagaaccattattttgaactttggagcctgttagtcttgagtttaaatcccagccctactaataggttgacctgtttacttaattctgtgaacctttgttaaataggttaatactacctactttacagacttaatgtgatgattaaatgtgatgacataagtaacatgataggtactcattaaatattagtctaaaacacatctccctaaaatacatttcttgctattaatgtctttttcaccaggccagcgcaattctgaaaattgtattagcttacagtttttacagattaatagataatatataaattgtattagccatcttgtctcctaggccctggaacgtctttgaaactccctggaactaatcagacaggagggcctagccaggccgttaggtatgtacttctgcttcataacctctgccactaaatattgatcagactgtatgagagtctttcctcaaatgatcttctttgtattataacaatttataatcttcacaggccaatcacacaagctggaagacccattacaggtttcctcaggcccagcacgcagagtggaaggccaggcactatggaacaggctatcagaacacccagaaccgcctacacagcccgccctatcaccagctcctccggaagatttgtcaggctgggaacggtaaattctatcagctttcccatagccttgtattactttggtattaccaaagtagctttatattatggtatatcattttcccctgttgttatagtggagaattatatggaagatttttgaaggtgattatttttatttatgttgcctttatatttttatgcatattaaacttgtttacatttcaagagaaagtttcagatctcttggtctattgtttttcctctgtaggcttccatgcttacaagtcctgatggaccatttataaatttatctaggctgaatttaacaaagtattcccagaaacctaagttggcaaaggtatgtacttaaaatgattttgagttatgaagtaatattacacgtatgatgataatgacaaattagaaaatgaataaaaacttgtgaaggaaaggccatgtctttattg

SEQ ID NO: 12841 - DNA, 2300 bp, Homo sapien
agactggactcatttaatgaagaaaccgtatcctggggggagctagaaatcagccactatcttggtttcagactttccccaccagacataatatgtacttcgtccatattatatctttttagaagtcagtttgaaatgtgtaccaggtgagaaaaagtagaattcctgactctctcaagtaagctgccgtatttgaaggagatttagccatagatactccaaattactttattatggagtaacataaaacgattctcacaaaagttactgagtccaaaaatgcccaagaatgatttcaaattacggtatgactgctatgagcattatttagacacactgctctagaaaggtctgttcacacaaaacaaaggagcaattttttaaaagacttgagtacaagggaataaacatattatttaatattattaaatgcttattcccttgtacttgagtcttttaaaaaattgtccacacccagcccacaaaccctggttttgtattcctatcaatgaaaaaaaaaaggtcaaaatacacttctgctggcatatgtagggccatttggtttggtgatctggaattagggtaaccagaacatgagcttttagctcataaaaacctcctagtcatatcagactcccgaaaatgccctcatctgttcataactttctagaaggatggtgacttcttggttcatactttcatcaggcagtgcagtcaaaaggtaaggagaaaactgtttagggtctgcagtgcccctcactggcacccatccagactcagcttcaaacccagaagagccttcatggtccctgacaccatggggagaagttcccttctctaagaacccataggaatttgaagacagtgttacctgatcagaattttgcaggtgtgatcatttagacagggctccctcaggcatgctgatcatccacgtggggtctctcctccagtctcgagagtcacttattgaaaatggttgttgtaggtgctgttttaaggtggccccaccttatatttggcctcaagcactacccaatttagatgattacttgattcatcagattcagctcccaatgactttagctcttcctcccaatcaagtctcctcaaatattgatttgtaccctggaggacacatcacagctttgaaagtgattcaacagtgggatcagatatggcagcaataagggccaaacccacaggatccagaggtgaccaccttgagatgggtaacggggaggaatttatccccgtaagcttaccaggacagatgggcctatgacctcagaatgataccataactgcaggaggacaggagacgcagcccaagcatcttggagaacaaagacaccagtggatgtgggggcccagcagaagggtagtgtccaaggccaactctacactacggttactgttggtggcaagacctgcagacaggacatgctgaaaacaaaaccatcacaaaaggaaccagagagatgcacgagaacatcctctttctactcctccagcacggtgagtggtgccctgtgatcccttccttgttcccactcccctctctcccatcagctccttgttggctcctgggggatgtgtgtgcgagggtctggggtgggcacttgagtgatgacgtaataaaccctggcagatgaaggtcttagggctaggaatgtcattacaagaaaccctcaggatctgggataggctggcaggctccagtactaaagtacaattgcagtttattgtttgacaacttccaaatgaaagggaagctctgtctaaaccacaagtcttaaggctcatgatgggaggctggccagccaccagctacaccaaagctggaattctcttgagatcccgggtaagcccagcttccgaatgtgcatttgtgtttgcagagcagtgtgtgatgcccacccaagcctacgcacgtgtgaggatgggcacaataaatgcagctgagaaccccgaaaccagactgcaaaaactgcacacacgcctgaccgcaggtaaggaacagaaatgacgttgtggaccagcatctgcacagggaggcgcagcacacataacactacgtggtgtttttcttcaattgatgcaactcagtaatttttattgcaactggaagacaatacatcacagaaactttatggtaggtctggggaaaagtgttatttacaataaatgatgaaatagtttgtctttggcaatatgattacatacgaagaatgcaaaatgcaggtatggatgccttccaagcaacaccaagtccctagagttcggctgatcgcgcctgc

SEQ ID NO: 12842 - DNA, 2300 bp, Homo sapien
tagattgcatgaacgagggagggaatgcatgagtgagtagctgtcaccacatggcaggtatctttgctgaacactggtttagtcttctgacaaaagcctcctaatgtagccgcttcagacgagagcaggcttttttctctgaagtacccagccaacatcgtctggcggtgtctgactctgtggtgttggcggggacacgaaccaagcacagcttgatttttatggtttaatgtaagagatggagcctccaccactgtcgcttcagaagattgttgttttgacgtctcagccacacaaatggagtgaaactgccattataggagataagcaggggagactgaggtgtcaggatttaggaccctgccttcaaagcagatccacctgttgcccccacagtttgcgagtggctccattgaacacaaagggactgatggttgaatgcaggcgggctgccgggtgcccccatctgaggacgtctaactgtgtcccttctttgtctcccgtccctccccactgtcctcgctctgcaggaatggcatcaccagctgccggatgcggactgagagtgagccatcttgtggctccccagtggtcagcggagaccccaaggaggatcacaactacagcagtgccaagtcctccaacgcccggagcacctcgcccaccagcgactccatctcctcctcctcctcctcagccgacgaccactatgagtttgccaccaaggggagccaggagggcagcgagggcagcgaggggagcttccggagccacgagagccccagcgacacggaagaggacgacaggaagcacagccagaaggagcccaaggattctctgggggacagcgggtacgcatcccagcacaagaagcgccagcacttcgccaaggccaggaaggtccccagcgacacactgcccctcaaaaagagacgcaccgaaaagccccccgagagcgatgatgaggagatgaaagaagcggcagggtccctcctgcacttagcagggatccggtcctgtttgaataacatcaccaatcggacggcaaaggggcagaaagagcaaaaggaaaccacaaaaaattaaaaacaagtcactgatttgttttgaacttacgaccatttggtttcagcatgtcaggagatttctaatgatttgtggcaatatcagcaattttttttcttttttcttgtttttggtttggttttctttcttttcttttccttttattttgttttaatttgccccctcttctttgttttggacccttaagaattttatttttaaaggagattgaagccatagaactcatattgacactcagctgttttacaaaagcttttcattatctgaagacaaaaccgaaaaagccaaaattaccattgcttcctccagcttgtcagaaacctgtggctgaatccgcagggatgtcaacgtcaatatcacaggaacacacattcggcacctagaaggcacgtgggcaaagtaatcatcgttcaggcccaacccttaggtttaaaaagtcaggttgtccatcccattgggttcactgagtgaaggcacataaagcaattgaggaggaggaggaacccctcgtccccctaggagcagacccaagcttgtggcaccaggcatctgatggtgccaggaaagccactggaattgtcacacggcgagcacagagggccggccaccagtcctcgatgcttctgaaccctgaagcccgatgacatcttacgaggtggacgttggactgttcatgcgcatcgggtgtcagtgactcatggagaagaaatggggtaaatttttagtgatgttgctaatcattgaattctgttctctattaaattaagaaaatgttccaaaagccataagcctgaagattggccctgtgcacgcacgcacacacacacacacacacacacacacacacacacacacacgaaggagagagagagaaaactgatggggaaaacaagctgtgtcttcttaactgcccaagtgaaaagcaaccaagtccaggaaattacaatagctgttaaggaaaggaaataatggtacagatctttttctgtctatcaaaactatttgatccaagtgaaaaaaaaaaaaaaactagaaagctacggaacctgccattagtattgtggtgtatttttaagattaaaggtacactgatggacaaaaaaaaaaagtaaaacatggcaaaaaataaaataactcctatactgccctcaaaatggagtttgcaattaatatcaggatttatctttgcaaaaatcagtgatttccacattcag

SEQ ID NO: 12843 - DNA, 2300 bp, Homo sapien
gtttctggggagtacctgctgcggtgcacgtgacatgggagtgggtgtgtgtgtgtgtgtgcaggtatgtgcacatgcatgagtgaatgtggcccctgccctcaggcctttaccagtgccaagtgtgaactttcagaatgaatctctcctgccatccctctgcccgtctttctccccaggtcccctgttggcctttgtgagtcgtgacacacaggcatagggtaaatgacctcagcttttaagtcaggtatacttgagtccattccacaccttgcttcctaattgccacctgattttggagaagttttctaaccctctttgagctgctatacaatgaaaaaaaatccctcttgcaagattactatgaggattgatgatgatctgtgtagcatccctggcacttagtaggtgctccaagagcaggtgccattgccacacttcactccagaggaggcagcataactaggagagaagtatatggaccttggagctggccaaccttaggttcaaaggccagcctctgccacccaccagctgagtgacctcgagcaactcatccaatgagtttgagcctttcctttccagtcagtcaaatagatagtagtacttacttcatgggattttgtgagaattaaaagataatgtttggacagagacctgcacagtgcctggtgatgattgggtatccaataaatagaattaatgatgcttatgatagcatttctgcaatgtcttgcaatttcctaagatgttcagtaccttccacccccgacagacaacagcaaaagcaatagtaacatagatccttccccagctgaaccgaagtgataccttcaggaatgtttcaaactgttttcagtctctctgaagctcctgatgcataaggcaaatacccacaggatggccatggaaggagtggaataggagtcctgactggctatcctttctgacccttctgagtgactaagatcctgcagaaatgtgacagaaaaagaaagttccttggagatgggctggaattgcttgtgatctgtccctctgattgtgttagaacgcttccagccaggtccaggtccgttctgccttagcacagcgaatcaatcactgtgacatggagggttttccaaaagagaaaagatttgttcagaaaggtaccaagtgaggcaggagaacagctctcaaatccacctccctgaagacaaggctcggggatatttatgggttagggaagcagggtggtctaacgtgtggggaaaagtgattggcaatggggaaaaaatgaagtaacaggttcattctgcacaagcatagtcggggttcatggcatctcaaaggaagtatgttcagtaaatggcagcattagcgtgatctgggggaggtggagcttttggccctccaatgtcaaaaggccacctctccggcacttgctcaggcccagttgaaggggcagtggtcctaactggtttgaactggacaggagcttgccctagtttctgaaaaacaactgttgcgaccattaccgtggtgacctatgaatgttatctgtaaagtagccagtgaaggtcaagttccagcattcagtggcaaggcctcagcttcatggaaaaaggaaaaaaaaaaacaaaacaaaacaaaaagcaagtgaccaaaagcaagcagtacaggcagatccgatcaaattaaccccttggtttcaagaatgcaaactagactaagacatttgcaaagactagtttcagagaccacagggagactgcaagacagccagccatacttgcagtgatacggaactttacaaagtcattgaagggcttgtgctgaacttctccctacctcatggtcaccgcagcatacactggttggcccctctttccgtaggctgtgatttctaatggggcttgatcaggatgatctggtcctgctaatttgacacagttgcagtttggagttagaaccacaggtcttggtgttgatgacgtctgccagtagagatgctcccaacgtcctagttgtggattcatttcccacattttgaggaattttgtgaggatattgtgataagaaacaagaaggctgtgacatgtataaaggtcgattgtgtgctgatcatttgtgtattgtatttctcaggctctgggagacttttgtctctgtgttttgccatgcatggcctggaaaagaaatagttatgaagttttcactttttgcagctgtcatgggcccaagttgcggtggctcacatggacagtatgggttccaggaaccctgtcaggacagctttctcctcccacccctccact

SEQ ID NO: 12844 - DNA, 2300 bp, Homo sapien
cagtaaagtaatttaattgcactgttgctatgacaacatgctgctctctttctttttaatttgcttatttgtcagtagcttcccagaggaactaacacgctattctccatgtttccttttgttttaaacaaacactgccagcaatatggttttaggagaaaaagtggcattgtcacgaagagagggttatgggagttcagtacccttggatcatgtgtgcgttttgtgctgggaccccgtactctccaaccactcactgcatccctataaatcccgcattttataccaacagggtgaagagctgctgatcactacagttccatgtaaaaacaaaacaaaacaacaataaccaaaaaaaaaaaaaaaaaaaaaaaaaaacagttcccagaaaccacagctgaggagttttccattattatactctaactacagatttcgccaaatctttttttcctcctgtttcagagggaaaaaaaaagaatctggatcatgtgagttgcagttaagcaaacatttttaatctgctgccaacaaggctgctccaccagatacgcaaatagttattcactggtgacctccttacaacttttctctacacacacacacacacacacacacacacacacacaccctcttttgttttttttatgacttgctgtgttttgttaccctctttattttttaacggagaaaatgcggcaagaaagcttagtttctcgcctagtaaacagaaggtctccaaataactgacaaagacattactggcccagctctgaacagatgttcgatgcgaactttaaaaagttaagaaatcttcccagagccgagcagtagcgagtttggggggccgggtcacccccgcccacccagcacgcgcgcgcgcgcacgcacgcgcttcactctcgtctactgtacttgtcaaaaacatttcaaggggacctgcgggagtggcgattggctgcaccccgcgtcaatcagcggcgttgccgggcaacgggggaaactgctcttatccccatatacagggcaattgggagctcgcataccttcactgccggtcagatgtcataaaccttttattggccgcaccgcggcgagcctcgaaaacaaatcaataaaagcccgccgtcccccaacttatccagggcccaaggagggtttcaaacagggccgggatgaggggggtcgggcctcgggggtctccggagacgttcgttgcctgtgccaagtctgcacagtttggccggggggtgatctttgttaggagcctgtttctcatcttggggtctccacttgatcggaaccccctccccggcccggaacggcggggaccccgtcctccgcagacaataccaactctgttccttgcgggcgtcttttcggaaaccgaggcaccgggaagcagcacgcacgtcggggcaggaaactcttcggacccggcaacttcccggctcgggggctcccggggtccacacccgaccctccccccaggacctgcggggtccctcgtcttcccagagcggcgaggtagtctccaggaccgtctcggacgcgcctcccgccccgggtgccccccgagcccacgcgggagccggcaggagcggggtgcaaactcacctggccggagcggggcacgggggtgcgggggcgccgctgcccttcagcaggagccgacaaactttcgcgggcgcccggcgggcatcgctcggtggccccgctaaggacgcgcgggcgcggcgcggcgagcccggggcggcgggcggcggggggcggccgcgggcgcgggcggcaggggcgcgggggtcgcggcgcggcatgggacctgcggcgtccgccgggcgcgccgcgcgtcctcccgccggccccgccgctctccccgccccgtcccgcctcccgctcgcctccgccgcggcgcgtcgggccggggcgcgccgagcggcgagaaattgtttccactgcaaacaaaaaaaggcgacacatgaccaggcaggaggaggggaagcgcggggagggaggagggcggagggagggacagagcggagggcggagggagccggagaaagggaaaacgtgggcctggccgccagcggcctggggcgcggggcactgacccgccggggcggaccctgcccgcgcccctcgcgcgccccagcactcagccagggcggaggccggggctgggccgcgcggcctcgcctcttgggccccgcggggcgggggtgaccggcgcgggtcccgcgacccagggcggccgcgaccgtgggcggtggggcaggtgggtcaggcggcgcgtgccctgt

SEQ ID NO: 12845 - DNA, 2300 bp, Homo sapien
tgtttgagaatgcaagaagcaaaaacacacatggaatgacatattccatgtacaatcacctttggctcacatcccctctttttgaactctgagaaagcaggaggggactggggccggtgaaaataaggtgccacctctacttaatataaagagatttctggctattgtgtgagtgtagctgggggacttgggggtggggttgggggctggggatggaagaggaagatgtaagggggcgacttcgtcctctctaggccagcaagggcttggacaaaggtctctggccttggttcctctggcggagaataagcaccctcaactgacgcgctgatggaggggcaggacctgcattagccggagctacaggaaagcagggtacacattgtctcatcctggctttgttaccacttctaaccctgagaatctctggcgtgagacttcaaagatcatctgacttgtctctgccaccttgtgccttttgcttagtgactttgggtaggtcgcatcaagtgctcagtaatcaaaggggtggggctggatgacctcaggctacccctgggcttccacctcctaattgtctccagatggggagatgccacacaacttggaagtagtaaggtctccggtgagtctgaaaggcacatctttgctgaagacttgtcacctgccctcttgaacctttgttagggggaatgactctcagattggggggggggggtctattttttgagacagaaaaaattttcagaagcctaactggtgtttcccttagtccctccttttggctaggtttaaaagtactgcatgctagaaagctttctccaggtctactcgctgtttttttctgtagttttcagaccgctcacgatgtcctgtccactggctcaggagggggtggcaggaagggtgccctgggcttctcctctgtagaggaaccaaccaatttggctacctgggagtaatgtgcaatcacatttttatttttgtcaccaccagggtgtcctgttggactctctcctctcatcctctcccaaggcggctggttggtgtggctttagcagtgggtgctattatttggaggtgcctagagacttagagtggtggctgcaccatttcgctgggtggcttgcgaattgtcagtctggttcctgagagctcaaactgagatggaaatgagacctgttttctctctaggccggccggggcgttccgcacaacccacttgagaggccccaccggcgtggcctttaggacggtgcctcttgtcttgtaatggccaccggccctccctcgggagacacgcggccacctgggtgggacgctgcggtgcttacctccgggacacgaggtggtcgctgggagagggctcggaaggccctgggggtcctatcaggacgcagcactggggagacgtggaatctcctcttctcacccccacaagcctcgcccgcatcgtaattctttttatttttactttcgagccatgtaaggcatgcagatggggtaggagcgttcccgcgacacgttgccagcagcgcagcgccggcccgctcgtgtggccggagcccggggaggggacagggcacgcgccgcctgacccacctgccccaccgcccacggtcgcggccgccctgggtcgcgggacccgcgccggtcacccccgccccgcggggcccaagaggcgaggccgcgcggcccagccccggcctccgccctggctgagtgctggggcgcgcgaggggcgcgggcagggtccgccccggcgggtcagtgccccgcgccccaggccgctggcggccaggcccacgttttccctttctccggctccctccgccctccgctctgtccctccctccgccctcctccctccccgcgcttcccctcctcctgcctggtcatgtgtcgcctttttttgtttgcagtggaaacaatttctcgccgctcggcgcgccccggcccgacgcgccgcggcggaggcgagcgggaggcgggacggggcggggagagcggcggggccggcgggaggacgcgcggcgcgcccggcggacgccgcaggtcccatgccgcgccgcgacccccgcgcccctgccgcccgcgcccgcggccgccccccgccgcccgccgccccgggctcgccgcgccgcgcccgcgcgtccttagcggggccaccgagcgatgcccgccgggcgcccgcgaaagtttgtcggctcctgctgaagggcagcggcgcccccgcacccccgtgccccgctccggccaggtgagtttgcaccccgctcctgccggctcccgcgtgggct

SEQ ID NO: 12846 - DNA, 2300 bp, Homo sapien
actgcactccagcctggccaacaagagcaaaactccatctcaaaaaaaaaaaaaaatttccctgggtggaaacaccataaaccaattgcccacacggacaattgcacgatttcacatgaattctcagcaatatgtttggcctggtgcagtggctcatgcctgtagtcccagcactttgggaggctgaggcaggcggatcacctgaggtcaggagttcaagaccagcctgaccaacatggagaaaccccgtctctataaaaatacaaaattagccaggtgtggtggtgcatgcctataatcccagctactcgggaggctggggcaggagaatcacttgaacctgggaggtggaggttgcagtgagccgagattgtgccattgcactccagcctgggcaacaagagcaaaactcttgtctcaaaaaaaaaaaaaaaaaaaagaaagaaagaaaatatggacaagtatgaaagaagcacacaaaaaagaagtatcccataactctaacattcagaaggaaccactattttagccttttttccccaatttttttttttcttaaacagtcttcattctgttttgtatgaattactgcaatgatttctgagttgttctgctggtttttgatcttccagtttctctcttcctctcccgaaattcatcttggatccaccatccccatttatctttttttttttttttaattcgtatctctgataatacaacttctgggctcaaaaatattcagtgagccacctttgccctctgaccttaacacatataaattgctcaccctgctattcaaggagtttggtgatatgatgcttgcactcttacccactaatctgtgtgctctttagggacaaagaccgtctatctctggcagctaacacaatgccatgcacttggtaggcactcagcaaatatttgttcagtgaatgagttcctcttctactacaatcaagtcagatttggtaattctgtgccatcgatttctcttggaacagcagtttgtaagcaaaatcatccccttgtgctttctcaaaatacacatatccaggcaccatcctagaagactctagttggttaggtgtggcttctggatggttctgatgggcatccccaggtgagaagctcaggtcaagaacaccccttccccatttccacaggttaaacagcaacccacccttattagatatcccacttccaaagtcatctcccctcccttccccagatgtttcaccatgtcccttgtctcagctgttagcagtagggagtggtggggggccatgcgcgtaggggagtcatgtgactcaggctaggccaatcgcactatttccctgagaagttaaactatgtcatggaaggcttgaggcagttcaaaggtggtgggtgctaaaagtcagaaggcctcagggcttgctgctggcagccctgtgtggttatcattgagcagaggaagccaacctgcagggtagagagtggagtcacctatagagggaagcacgaaaggaatatggttctgtgcaggccagcggtgtgtgcctgcccagcctccccgtatttcctctcatatatcctttgtactggagtctctttgcaggatccctccccagaagactgtctttccaggcctgcctcggactcttcctattttgggcagtctctcaggtcttcccgactgcacctgctcacctactcagttgtactgcctcaaggggggcaaggtatatcgggttttatacttaactattccataaatagccatgctgctctaataaccaatacagtgtgtgtgtagggggattaaagttcttgaccagagaaacatttagcaaaagaatgcacaaaacatcaagggaggggcgctcttctccttggaggaggaactgaggtcccacgctgatgggggcagataagcctggaattgaggacttccagctcccagatacttatgtactctccagcccatgctcagatggggctgcagaatggtcccatcaagtcctctatcaggaaataagtgtttctcaaagtgatttctagggcacatatacaattcggctgttaaatgtgtttgtaaaacagtgtagacaagacattagacaatgcagcttgcttatttgtgacttctcaggacctaagacgcaagggtcctttctgaaagttcatggggaattgtgaatggggttgttcccaaacaaatttggcccctgcaccctaggtcaggaagcaagtcccagagctgaggttctatggaattagaaggtggaaaaggccacattaagccctcctttggcttt

SEQ ID NO: 12847 - DNA, 2300 bp, Homo sapien
ttatctccatggccactgtttgcaattattgttggtctgagccactctcccttcagcccctactcaataattcactccactccaaagcagacccccacctcttcctggctgaaaagtgccacctctgggcagccaacatcagcaacaagggttctagaaaagtggatgttttataagagaatggtagttcatttaaccaagttaaaaacagaggcatggtctaataaggacatattcgttccatggttctaacttccagaataaggtttctggtcttctctggcgaggtggtgataatggcctggcagggatacgcttggtggctggcagggagagagcagagagagaaccagtgggtgcctgcaatcgccttctacccaggaaacagggaggagaccactgaactgagtgcttgagggagcttggtgccagtcccagctctgccccctgccaagacacagccccaggatttcactccaccatctcaaagggccactccctcccatagtgttggtacataactgttatcagctcttagcagaaggatttcctaccactttacatccctatgttggaatctcaatgggaagcttctctgatcgtcctacaggcagtggctggaacaagaaaagaagactgggccaaatgttaggagacctggctcttaacctccaagcttatctagacatgcaaagacctccgaggctcctccaattcttaaaatctcttccctatgaaaatcagaattgcctttacagctttaaaaaaaaaattgtaaatttctatttcttctgtatgttgtgcctttataggaaaggaagggtgtactggaactctaaaacactctactgctaccccaccagctgatcggtatgcaaacaaggccagcgggaagctgaagcagatgagatcaggtaagaaaatcacgaagtgctctaagccaaagtgaggtgttgagagcaaggttgtctatactgactctgatgaaagctaactcagactcaaagtttctccttcataaactgcaatcatccttcctcctctattttccctgacaaaatcctcacctttctgccaacccacgaaggggacccccaagcgacactgactctagaagatcatagttaagatcactctaagatgaccttgaaggaccttgctatctgggtaggctcacaggtcagctggtgaccaagcacttgacccttgagattcatgatagagatggcagaaaggaaattgggaggtcgttttgggtcagtaaaccctggctggggtggggatgatagggagaagggataaacactataataaactcaagcgacgggggctggacaaactgcccactccctgcttttaccaaaggcaggtcctctccaatgctggtgaattctctgcaaagcaaaaacccagtctgcaactcattgttatagccaaacacaaagcacagctccagagcacaaaaaccaccaagtatgtacaagtcagcattttggaagcagaaggagctgccacgctcgggcccttggaggctgcttaggggaagctctttccctctctcgtggcatctcttgaatcaaaattcaacttagctcccaaatcagaggataccgatggtctctaacaactgtttcttatttaggtttgataaccccagttcacgcttttgtctactttgggaagcactaggcaaagtcgtggccatgtgattggctcccaatgctgggctggggctggcaaccgccctccggcctccacgcagcgcctgtgaaactcttcattcagcagaactggggaccagatgcctctatgccccaccgataaactcctcgctctgaagttaggctaagcagaagaatcaggtctttgatttttgcacaaggtctcacggaagcaaattccatcgctgacatcgtaagtgacttgttttcagctgttcctgacacctctgatggctcccaagtttattttccagagacacccatcttaggcaattctgggagccccagggggaaaatgttagaaatatcaaaacagccacgtgctctagcatttagcacattgtagaacaatataaatttagtgcatttagaccactttatattaactaatttagaaaacgttgctttcgcagacttcgccgggtgcctttcactgccaaactaaatactccactttaaaatacgcccctgcgtactcatgtgatttctccttttaggctaggaatgtaatgttgacataaatgtcaaataaaattaatgagagaatgggccctcaaatggtgctcctgtgaagggaat

SEQ ID NO: 12848 - DNA, 2300 bp, Homo sapien
aaagttccaggggtcaccaggtctggacagagacaccctggatgccactaataggccaccttgtatatgaatttacagagtttttgaggcctttcggtgccgggactgctcatagaaacccaggttcaatttgacaaaacactactcctccatgtgtcaagtggagtcagttcttaatttctgataaagagcaaaaagacatatgggggatgaggcattgctcagcctcagagtttgaagtcttctgccggccaggttgccctgggcagctccaggacagaaatctgaccagtgtgggtgggtcttcctagccatgtttctcattttagcagagactaacatatttccaacaagcctcatatttgcttgctggtaaattgctgctctgagacaggtaagaaatgatgactaaaaaaacctacctgcgtttttgtttcggatgcttcattttccgcagtacttacagagagatagttgggaggccaggtgatgtactcaaaaaacagggcttgttgaaagcggagacaggatgggattccagctgctctgctcaccagccatgtgatttttgaacaagtcactttaccttttgggacctccaatttctcatctgaaaattgcagattattgtatctgctttctcacagaggtgtggtaaagatcgcatgagatgtatgtgcaagtaatttaagattgacaagtgtaacatatgacaactagttcttggcgtggatataaggcatcagagaaggtgcctttgatgtttaattaatactaaaaatcttccattacacttgtttagctaaaattggaaagggggagggcaagaatacttttcaaagggacttttttctgcttcaaaaatagaaatcagaaagcacatatttgattttccttatggtgtaaaccacagtgccattgttattagcagttttacagaattgcgaccttcaaacttggtgatatcaaagactgaaaaaaagctcccagtcttgaagcctttcaaacaggcttttctaactaaagcacttttattttgaattaagggctaatagaattgtcctcttaaatgagcacttgcaagattaaaagttgctttccaggtgggctgcagtaaatgaatgtgccaagaggttgctgaaagcccttttgggggcaaacgaggggaatctgatatgagttcatgtaacaaacacccttttccctttgtgaaagagaaacctggaatttacagtctttctaattgtacatgagctgatttgtgtatacatctaggatcataatttactttcagtttactgaatttgtgaattttcgcatttgttttaatttgtaattaagttctctctatgaggcacgccatatgcctccattaattctttctcgttgatttcttaggagatacatgagtgcatattttcatgcaatttttgaggtcttttgaaaatcaaatgactacatgtttagccatatggggctttgttatttaaaagagcatattataaagtaaaagaaggcgaaatgcaaaagggcctgttgtcaacagggggaaaatattgggaaaaacagtttaaaacattgttttaaacacacacattttcaaccttttttctttttagcgttatatttttgaaatctatctttatcgatcccgtaccgcgtctcaccgtctgtgaacggccaatgtcaccagtgcacccggcaaacctctgtctgccaggtactgcccctacgcttaccctcgggctgcagatcctagcatctgccttctaagagttcagttggagccaatgtctttcttttgaacatcttgtgccaggatttgacattaagctccagttcatccgcacaccccgcggccgctttcgcaagggaccgagagggtggcggcctcgcccggagactcgcggcgctgggagctgcctgccctcggtgcgggctgcagaccgggccgcgaggcgggcgcgcggcgcgcactaggacccagcagggctccaggccggggtgggagccgcgccgccgaccccgggcgggcgccgggcgcaggagccggggttccggccgcgatctgctgcagctcggccgggagacggcgcgacccggcggcggggccacccgcgagtccagcgtcgccgcagccccccaatgcggccgcgagaagcagcgggggggcaggcgatcgaaggtaacgaaaatggggctcatttcctgcctcctaatctgctcgggtttagcattgtcacgagaagccctccgtgttcaggctgctgcattttggggcactctttgattttttttaa

SEQ ID NO: 12849 - DNA, 2300 bp, Homo sapien
tgagctctgagtgcttcctttgcttgatggtggcagctcaatttcttgaatctggacaatatcttgactctgactaattccagcttaacaagaagggtgttgtctctcgaatgaatgtaacaggaaagcagaaaagcataaagacaggggtgagcaggaaacttgccctactcaagcaggaggttcatggaggctcagctcaactctcattattggtgaattggtgcaatcttttctggagagcaaatatctaacaaaattttaaacgtacatattccatgacctagcagttatacttctaggaacttattccacagatatacagccacaaggacataaatgtgtgtatcattgcagcaatgttggcagaaaaaaaaaaaaaaccccacctatataaccccagacaggaacctggctaaaaagaatatgcaaccatattttaaaatgcagtagtggtgtgtgcttttaggttgatatattgttaaatgagaaaagcaagttaaagtaggcacaatatttacccatttatgttttcaataaaagactatgcatatgtatgtcatggatagaaaatttcagaattacacaaaaaaactgttaatggtaatcccctaggagtgggaccctctggtaggcggcgagcggattttatgctcaactttatacctttctgcactgttttaattttttgaccgtggatgtattttataaacaaagcaacaaaagtaaaacgagaaagagactatgtcatgtcctatgtaaatttctcctgttaccaacactcccctctcagtcttccctcttggcacctctctagcatcttgtatttatagtagttattagcagcctggtggtgagataggcttgtgtagactccagtggaaaagatttctacttcatctctgggctgaggtgttaagaggaagctaaaattcagcactggacacatctctgaaattgcttataaagcaatttataaacatcctaagctagccctgtgaacttttcttaggatccattcacctttgatcgtctaccccatccccaaatatataagaaagctctaccttggagggcttgtacccaaacagcattacaacagcagttttaaagtcctctctgctgagatatcctttgtgatcttcatcacatgctttaaatacctgaagaacattaaatagctttagttaatgagacagaaatggtttatttttattactagtttattatacagtttggacctcgaaaatctaaaacttggcccagcggtagagtatgaaaatagaatttcattatcccaatattaattctcaagaaatcttaaagatggactgaaattttcttaaacatgggctgaaatttccctcaaagtgcaaacgagttaaccgctaggtgacgcaaattaattcatttaggccactgagataaattctacccaaaattcagtcctggagttaggaaggtgaggcaaaggggctggctttgaaaggcgggagagatgcagactcaaggttaccattaatagactatatagagagaaaggagatggaacttggaggtagccgtagtcctggacggggagccaggagccctgcagctccaggatcagtcattaaccacgaccctttggacaggcagcccaggtcttatctgcacacccggcagagtgagacccagacacgggagaggaagcgagaggcccaggccaagctgaagtccgaggctcagtcgccctccggaaacctacttccacccacttcctgtgttccgagggactggcttcccacgtccgcgacctggctctggcctcggagaagaacatcgcgactacaacaaccgagccccagcaacccaaccagctaccaccgctttcccagcctggctggcagcctaccgcggccacgcccaccgcggctcaggaagccgaacttcaccgcgcaactccgacgtctcctcccattggacaacctgccagccactcgcgttaatcccgcagggctattggccagagtctttgtttaattacgtttccttggagccgccctggcagtgaggcgcccaggcctgcccccagcacttggctccaccccctgactgtcccttaactcgttgagcgcggctggaaatccaagcgcttctaggtgctggttcaatgcctggttcatgatttatttcattctctccctccatcttgcaataggttacttttaatcatttagatctatgacactatgctaaacgttataggagacaaaaagactgtgaacaaacaagaagaaccaaacgaaaagagccaagtc

SEQ ID NO: 12850 - DNA, 2300 bp, Homo sapien
ataaagcaatttataaacatcctaagctagccctgtgaacttttcttaggatccattcacctttgatcgtctaccccatccccaaatatataagaaagctctaccttggagggcttgtacccaaacagcattacaacagcagttttaaagtcctctctgctgagatatcctttgtgatcttcatcacatgctttaaatacctgaagaacattaaatagctttagttaatgagacagaaatggtttatttttattactagtttattatacagtttggacctcgaaaatctaaaacttggcccagcggtagagtatgaaaatagaatttcattatcccaatattaattctcaagaaatcttaaagatggactgaaattttcttaaacatgggctgaaatttccctcaaagtgcaaacgagttaaccgctaggtgacgcaaattaattcatttaggccactgagataaattctacccaaaattcagtcctggagttaggaaggtgaggcaaaggggctggctttgaaaggcgggagagatgcagactcaaggttaccattaatagactatatagagagaaaggagatggaacttggaggtagccgtagtcctggacggggagccaggagccctgcagctccaggatcagtcattaaccacgaccctttggacaggcagcccaggtcttatctgcacacccggcagagtgagacccagacacgggagaggaagcgagaggcccaggccaagctgaagtccgaggctcagtcgccctccggaaacctacttccacccacttcctgtgttccgagggactggcttcccacgtccgcgacctggctctggcctcggagaagaacatcgcgactacaacaaccgagccccagcaacccaaccagctaccaccgctttcccagcctggctggcagcctaccgcggccacgcccaccgcggctcaggaagccgaacttcaccgcgcaactccgacgtctcctcccattggacaacctgccagccactcgcgttaatcccgcagggctattggccagagtctttgtttaattacgtttccttggagccgccctggcagtgaggcgcccaggcctgcccccagcacttggctccaccccctgactgtcccttaactcgttgagcgcggctggaaatccaagcgcttctaggtgctggttcaatgcctggttcatgatttatttcattctctccctccatcttgcaataggttacttttaatcatttagatctatgacactatgctaaacgttataggagacaaaaagactgtgaacaaacaagaagaaccaaacgaaaagagccaagtccaggattctcgttcagatcagcaagtcattgggatcgagctcctagggcagctactacatctgttatgtcctcaagataatcccagcacctagcactgtgcctggcacaaagtagatcttcaatgaaagaacgaaacgagccgttatatttacacagatgtatttcactcagtcctctggaagagatgcctagtgtgaaagagattccaagaataaataccataaacagcaccgagcccaaatcccacagcaaacatccttattaaaggcaaggaacgtggggcgagttccttttctcagaagattttacgagaacgcaactgttgcgaagaaggaacagacattcgaggttctgagtccaatgggaactcatttaactttttattttgcagcagatttcaaagtctgcacccagcccctcccaggacacaggtctccttgcagctgcctttaacctaagcgtatcctctctccactttaaaccaaacgccgctgcatggagccctgggagcctgagccatgagaatcctgtaaagagggtgagtcttgctattagttaactagagcgaagttaggggacgcctttctggttctcctctcgttttaagaagtctccaggaagtaagccaagagctaggagagaccaggtttccccagccccgtcctgggtaaacacccggcgggctttaggacccagcggtgggctctccggaaggggaaggggccgggcctcgaggcacaagccgctgccgccagggtttgaactgcgcgcatgcgcggcggccgccgaaggggcgggatccgaggcaagcgttggttctgtgcgcctcaggtacgtgttgggcggcagtgggcgcggactcggtgcggtctctcgcgggctgcggtcgggcccgggatcctgctcctggccgagtcgcggtgcgcgggctgctggggtccggcagggctggaggcggaccg

SEQ ID NO: 12851 - DNA, 2300 bp, Homo sapien
gcccggccttcgatttgcctttttaatacagctgtgtgctccaactctgcggagaatgggttgaagacaaaggaagtgagagggctcttgctgaaggcgttggggacggagcagattcagaacgtgaggaagtgacggcagcagctgctaaccttactgcgtgctcatttggggccggccaggcacgattcgaagcgcctcaccaagtgtaaactcgcttcaccctcaggacaactctatactacgtaccgtgaccgtcctcctatactgggaaaccgagcacagaaagcttaagcgcctggcacgtggtgggcgctttcctactcactttctgggaccacgcacctgtaagcttaggtctgggaataaaaacccgagcaggggcccctagcgccgcgccccggcaggacacaggtctccgcagcgcccgtgcgcgccccctgaggcgctgtgatcggaggaaaccgaggccccggggccgaggcgaccctgccccatcttcccggccgcgccgcttcctcgcggtccgcctccagccctgccggaccccagcagcccgcgcaccgcgactcggccaggagcaggatcccgggcccgaccgcagcccgcgagagaccgcaccgagtccgcgcccactgccgcccaacacgtacctgaggcgcacagaaccaacgcttgcctcggatcccgccccttcggcggccgccgcgcatgcgcgcagttcaaaccctggcggcagcggcttgtgcctcgaggcccggccccttccccttccggagagcccaccgctgggtcctaaagcccgccgggtgtttacccaggacggggctggggaaacctggtctctcctagctcttggcttacttcctggagacttcttaaaacgagaggagaaccagaaaggcgtcccctaacttcgctctagttaactaatagcaagactcaccctctttacaggattctcatggctcaggctcccagggctccatgcagcggcgtttggtttaaagtggagagaggatacgcttaggttaaaggcagctgcaaggagacctgtgtcctgggaggggctgggtgcagactttgaaatctgctgcaaaataaaaagttaaatgagttcccattggactcagaacctcgaatgtctgttccttcttcgcaacagttgcgttctcgtaaaatcttctgagaaaaggaactcgccccacgttccttgcctttaataaggatgtttgctgtgggatttgggctcggtgctgtttatggtatttattcttggaatctctttcacactaggcatctcttccagaggactgagtgaaatacatctgtgtaaatataacggctcgtttcgttctttcattgaagatctactttgtgccaggcacagtgctaggtgctgggattatcttgaggacataacagatgtagtagctgccctaggagctcgatcccaatgacttgctgatctgaacgagaatcctggacttggctcttttcgtttggttcttcttgtttgttcacagtctttttgtctcctataacgtttagcatagtgtcatagatctaaatgattaaaagtaacctattgcaagatggagggagagaatgaaataaatcatgaaccaggcattgaaccagcacctagaagcgcttggatttccagccgcgctcaacgagttaagggacagtcagggggtggagccaagtgctgggggcaggcctgggcgcctcactgccagggcggctccaaggaaacgtaattaaacaaagactctggccaatagccctgcgggattaacgcgagtggctggcaggttgtccaatgggaggagacgtcggagttgcgcggtgaagttcggcttcctgagccgcggtgggcgtggccgcggtaggctgccagccaggctgggaaagcggtggtagctggttgggttgctggggctcggttgttgtagtcgcgatgttcttctccgaggccagagccaggtcgcggacgtgggaagccagtccctcggaacacaggaagtgggtggaagtaggtttccggagggcgactgagcctcggacttcagcttggcctgggcctctcgcttcctctcccgtgtctgggtctcactctgccgggtgtgcagataagacctgggctgcctgtccaaagggtcgtggttaatgactgatcctggagctgcagggctcctggctccccgtccaggactacggctacctccaagttccatctcctttctctctatatagtctattaatggtaaccttgagtctgcatctctcccgccttt

SEQ ID NO: 12852 - DNA, 2300 bp, Homo sapien
ttggacaggcagcccaggtcttatctgcacacccggcagagtgagacccagacacgggagaggaagcgagaggcccaggccaagctgaagtccgaggctcagtcgccctccggaaacctacttccacccacttcctgtgttccgagggactggcttcccacgtccgcgacctggctctggcctcggagaagaacatcgcgactacaacaaccgagccccagcaacccaaccagctaccaccgctttcccagcctggctggcagcctaccgcggccacgcccaccgcggctcaggaagccgaacttcaccgcgcaactccgacgtctcctcccattggacaacctgccagccactcgcgttaatcccgcagggctattggccagagtctttgtttaattacgtttccttggagccgccctggcagtgaggcgcccaggcctgcccccagcacttggctccaccccctgactgtcccttaactcgttgagcgcggctggaaatccaagcgcttctaggtgctggttcaatgcctggttcatgatttatttcattctctccctccatcttgcaataggttacttttaatcatttagatctatgacactatgctaaacgttataggagacaaaaagactgtgaacaaacaagaagaaccaaacgaaaagagccaagtccaggattctcgttcagatcagcaagtcattgggatcgagctcctagggcagctactacatctgttatgtcctcaagataatcccagcacctagcactgtgcctggcacaaagtagatcttcaatgaaagaacgaaacgagccgttatatttacacagatgtatttcactcagtcctctggaagagatgcctagtgtgaaagagattccaagaataaataccataaacagcaccgagcccaaatcccacagcaaacatccttattaaaggcaaggaacgtggggcgagttccttttctcagaagattttacgagaacgcaactgttgcgaagaaggaacagacattcgaggttctgagtccaatgggaactcatttaactttttattttgcagcagatttcaaagtctgcacccagcccctcccaggacacaggtctccttgcagctgcctttaacctaagcgtatcctctctccactttaaaccaaacgccgctgcatggagccctgggagcctgagccatgagaatcctgtaaagagggtgagtcttgctattagttaactagagcgaagttaggggacgcctttctggttctcctctcgttttaagaagtctccaggaagtaagccaagagctaggagagaccaggtttccccagccccgtcctgggtaaacacccggcgggctttaggacccagcggtgggctctccggaaggggaaggggccgggcctcgaggcacaagccgctgccgccagggtttgaactgcgcgcatgcgcggcggccgccgaaggggcgggatccgaggcaagcgttggttctgtgcgcctcaggtacgtgttgggcggcagtgggcgcggactcggtgcggtctctcgcgggctgcggtcgggcccgggatcctgctcctggccgagtcgcggtgcgcgggctgctggggtccggcagggctggaggcggaccgcgaggaagcggcgcggccgggaagatggggcagggtcgcctcggccccggggcctcggtttcctccgatcacagcgcctcagggggcgcgcacgggcgctgcggagacctgtgtcctgccggggcgcggcgctaggggcccctgctcgggtttttattcccagacctaagcttacaggtgcgtggtcccagaaagtgagtaggaaagcgcccaccacgtgccaggcgcttaagctttctgtgctcggtttcccagtataggaggacggtcacggtacgtagtatagagttgtcctgagggtgaagcgagtttacacttggtgaggcgcttcgaatcgtgcctggccggccccaaatgagcacgcagtaaggttagcagctgctgccgtcacttcctcacgttctgaatctgctccgtccccaacgccttcagcaagagccctctcacttcctttgtcttcaacccattctccgcagagttggagcacacagctgtattaaaaaggcaaatcgaaggccgggcgcggtgactcacgcctgtcatcctagcactttgggaggccgaggcggctgaatcacttgaggttaggagtttgagatcagcccgggcaacatggtgaaaccccgtctctacaaaaatagaaaaattagccgagcgtgatgg

SEQ ID NO: 12853 - DNA, 2300 bp, Homo sapien
ctgcctcccaggttcaagcaattctcctaccttagcctcccgaggagctaggattacaggcatccaccatcacgctcggctaatttttctatttttgtagagacggggtttcaccatgttgcccgggctgatctcaaactcctaacctcaagtgattcagccgcctcggcctcccaaagtgctaggatgacaggcgtgagtcaccgcgcccggccttcgatttgcctttttaatacagctgtgtgctccaactctgcggagaatgggttgaagacaaaggaagtgagagggctcttgctgaaggcgttggggacggagcagattcagaacgtgaggaagtgacggcagcagctgctaaccttactgcgtgctcatttggggccggccaggcacgattcgaagcgcctcaccaagtgtaaactcgcttcaccctcaggacaactctatactacgtaccgtgaccgtcctcctatactgggaaaccgagcacagaaagcttaagcgcctggcacgtggtgggcgctttcctactcactttctgggaccacgcacctgtaagcttaggtctgggaataaaaacccgagcaggggcccctagcgccgcgccccggcaggacacaggtctccgcagcgcccgtgcgcgccccctgaggcgctgtgatcggaggaaaccgaggccccggggccgaggcgaccctgccccatcttcccggccgcgccgcttcctcgcggtccgcctccagccctgccggaccccagcagcccgcgcaccgcgactcggccaggagcaggatcccgggcccgaccgcagcccgcgagagaccgcaccgagtccgcgcccactgccgcccaacacgtacctgaggcgcacagaaccaacgcttgcctcggatcccgccccttcggcggccgccgcgcatgcgcgcagttcaaaccctggcggcagcggcttgtgcctcgaggcccggccccttccccttccggagagcccaccgctgggtcctaaagcccgccgggtgtttacccaggacggggctggggaaacctggtctctcctagctcttggcttacttcctggagacttcttaaaacgagaggagaaccagaaaggcgtcccctaacttcgctctagttaactaatagcaagactcaccctctttacaggattctcatggctcaggctcccagggctccatgcagcggcgtttggtttaaagtggagagaggatacgcttaggttaaaggcagctgcaaggagacctgtgtcctgggaggggctgggtgcagactttgaaatctgctgcaaaataaaaagttaaatgagttcccattggactcagaacctcgaatgtctgttccttcttcgcaacagttgcgttctcgtaaaatcttctgagaaaaggaactcgccccacgttccttgcctttaataaggatgtttgctgtgggatttgggctcggtgctgtttatggtatttattcttggaatctctttcacactaggcatctcttccagaggactgagtgaaatacatctgtgtaaatataacggctcgtttcgttctttcattgaagatctactttgtgccaggcacagtgctaggtgctgggattatcttgaggacataacagatgtagtagctgccctaggagctcgatcccaatgacttgctgatctgaacgagaatcctggacttggctcttttcgtttggttcttcttgtttgttcacagtctttttgtctcctataacgtttagcatagtgtcatagatctaaatgattaaaagtaacctattgcaagatggagggagagaatgaaataaatcatgaaccaggcattgaaccagcacctagaagcgcttggatttccagccgcgctcaacgagttaagggacagtcagggggtggagccaagtgctgggggcaggcctgggcgcctcactgccagggcggctccaaggaaacgtaattaaacaaagactctggccaatagccctgcgggattaacgcgagtggctggcaggttgtccaatgggaggagacgtcggagttgcgcggtgaagttcggcttcctgagccgcggtgggcgtggccgcggtaggctgccagccaggctgggaaagcggtggtagctggttgggttgctggggctcggttgttgtagtcgcgatgttcttctccgaggccagagccaggtcgcggacgtgggaagccagtccctcggaacacaggaagtgggtggaagtaggtttccggagggcgactgagcctcggacttcagcttggcctgggcctctcg

SEQ ID NO: 12854 - DNA, 2300 bp, Homo sapien
caggtgggagagtttcttagtgggcatactttgggttgtaaatttactgctgtccctcgaggcagtcccctggtgggagaaagttctgctctggagcttctaagcacatagatgaacttgccctgtagggagtgtctagtaaaggaaaggtaaaaggttatattgtatttctaaaggtctaagtaggaagtggggaaggagttggggaatagtagggaaaaaataattgaaaaaatacattttttttaaagaaatatgggggtagcctcagatcccatagattgagggctccatcccacaagactgcccctctccctcagacaccagttgcaagtctgggcctccagaacttctgactgaccagcttcaagttgaggttcccatgaccctctctttgggcttcatttgctagagcagctcgctgaactcagggaaacacttaacatttactgctttattataaaggatacagatgaagagatgcatagagcaaggtataggggaaggggcacagagctttcatgccctctctggatgcaccaccactgtccagcagcccgcaggtgttcagctgtcggaaagctccctaaaccctgtccttttgggtttttaatggaggcttcattacataggcatggttgattacatcactggccattgctgatcagctcaacctttagcccctcctatccctggaggatggggggttgtgccaaaagtcccaatcttctaatcatgccttggtctttatcgtgaccagcccccatcctgaagttgcctagggtctgccagccatcagtctcattaacatacagaaagacttcacattggagatcccaaggattttagtagttgcatgccaggaaacagggatgaagaccaaatacatatttcatagcatcaaagctgcattaaacacttgtgatttcaagtaaaaaaaatctaatttcatatgacaagttggtggtttatctgaaatttcttctgaaatgggcctttttaaacctgtttttgcttttagtacaaatcaaataattttggaaaggagaacttctgtccatctactccattaaaaatatgtttttagtatttaaaaaaaatttcccaaagaagaagtatgtatgtgtgggtatgaaattgatcactagtattttcagcttttcttgttaattaggctttccaagagcagaaaactgttttcaaatattgcagcatttctgttaagattatttgagtcactttaacattcacttttattctttcccagcttctgaaagaccatgcctcatccatgcctaacgcagagtcctggcctgtcgtaggtcagttttcaagcgttggctccttgggagccgatgaatcaaagtggttatgttctgagtttaaagagagcatgctgacactggggaaggaaagcaagactccaggaaaaagctctgttcctctttacttggtgagttctcgtcctcattgaggtagtttacttttattctctacacaggagaagaattgaaaattggtcctctttgtaatggagagatgttttattctgtgattctttttttttttttggcgtggcgggggcggggtgcggaaagagcagtacattagcatcgtcatttgtaatcaagttgcctttgccttaatatccagtgctaagagcttgccgattcgttcaggagctccattgcagacacagactggcctgtgatttttctatcctttctttcaggttgttgaaccaaggtagaaaatatttgatgtagcacagccagcagaattatgggcattttaattatttagagaactgtgaattaataattaattttccattcaatgttaacttgaatttcaaaggaaaaaatactccaattgaagtataattttacatcaaatatggttcctgttgtttaattactagttcatttttttcataagatgagaacttttaaaaatttaaagcatattttctaatttaaaagtatttttaacagattttcatttccttaaaagctgattatcattccttttcttcaacatggtacattccgagttttattgttttcctcttatttttagatctatccttctgtggaaaatgtgcggaccagtttagaaggatatcctggtaattcttggggagactgtcttgattgtgttttatgtatatttcatgaatgtcctggtaaagttttactactattgcgtagaaatttggagatggttttcacttaactatataaggatcatgaaaataggcaatatgaagctctgcattccgcagatgatacccttcagtt

SEQ ID NO: 12855 - DNA, 2300 bp, Homo sapien
aatgtgggtagggagttacagggaagggacttagggggaccctgttggtgatgtttggctggtaggttggataggtgatttgcagaggtgtacccatttgtcagaactcacctaatgatacacttaagatttgtgcatttcattgtatgtaaattttatccgaaaaggaaaaaaattctgcaagtaaatattgaaccctacgtagtgatatgcaggcagaagtactggggatgagggcggaagtgtaccaagctctgcaacttactctgaaatgcatccaaacaagatgggttgatggatggacagagggacgggtagatatctaataaatcaagtatagtaacatgttaattgtagaatctaggtggtgggtatacgggtgttcactgtaaaattcaactttttagaatgtttgaaatttttcataataaaatggatttaaaaggtaattgcagtactcaccctgggtgtatacacatgcacccattctcgcgatgcccctaaagctcttgcccctcagaaggctagatgaaagaggggcattggggagtgagtaacagagccgagaggactgctaacagcaccagggtttctgatgaaaatgcactcgccagagctgtgtttctttattcgaaatcacacggttttactcaacagggctcctagcccttctgtctctgctcctggtgcgtaagggcggtgtgtggggctctgcgcctgaaaccgctctctcggaaggtgggaagatgcccacgtatccattcctctccgcgtacagattcgctcccacacgcccgggcgggtgattccggagggccgcgcggggctgtgtgcgcgggcgggggcgggatgtgtctggagggggcagagcgccctctcccggccccggagggcccacgcggaccggctgagcgtcccaccagccggttctgcatccactacccagatctgcgcgccctggtgggagcaccgcagccccgggtcggcccttcgaacgccgagcgtctacccgcggagaccagcgcaggaggcgggcccgcgcgcaaggaggcgggcgacagggtggagtcgccgcagctggcagccgcacggctctacctgttgcagcgtcggagcgcgcccgcctgagaaggcagagcgcggtgcggacctgtgctccgcgcgccggctggcagggcagggccgcggctgccaggaggcccgggaacagtcccgacggagcggcgcggagagggcgctccccggaaggtgagatctgagcgcggcagcggcgccagcgcccgctacaaggcggggtctcggggagggggccccggcggtttgctggagagccttgctactgttctgcatgaggtgggggatgccttctgcgcggaccccgcgtccaggcaaaactctggaacgcactaggcagccaagcccggggggaagagatggaacgctccaaggtcaaggtctcctggccgcggagcccttccagcccccagtgtttggcctcctctccggaagcggggctggctcgcggtgcgcgcttggtccgggcggagcctactagtaggcgcagaggacgcccccgcgcaggatccagagaccaagggcgctctggcatggtcaaggcgagggaggctgcccgggggagaagcccctaacttcctttgctccctgttccaacctccctttctggtctcctctctccagcccgtccgcccaacggatgcgcagcgttggggcccggccggaggtcggagccctcggacgccgcagccctcggacgccgctcagcacagcccctctctccgtgcgcccgccctggaccccctccatccctaagccccggcagccgattcggagactcgggaggccacaggctcagcgcgacaccacgaccacaactaggaggcaccatcgtcgatctacctggggaggcacctacaaagccagcagactgacacccgtgtcctagccgtcggcggcctgcgaagcgatagtcaaaggaaccaggacccaggaccccggcgctctgcttacccgcagacctccggaccgcgccccccccccgccgccccgccccgccccgccccgccccgcgaccgtctctttgcgggaaactcgagttggctcgagcttgccctgaagacgcgccacgccccctcccctatctgagccggacagggagccggggtggaaactgcgcccgcatcccagcgccaagcagacgtgaactctgcgcccgttccccgggaccttcagcgttaaggagaactccgaggagagcagggggagtggaggggaacggcggc

SEQ ID NO: 12856 - DNA, 2300 bp, Homo sapien
gagaggaaacctgttggtatcttgattttagccctgtgagacccaagttgaacttctaacccagagaccttctagctttgagcactacatttatggtcactttctttttttttctttttgagatggattttccttcttttcgccccggctggagtgcaatggcgcaatctcggctaactgcaacctccgcctcccaggttcaagcgattgtcccgtttcagcctcccgagtacctgagattacaggcatctgccaccactcccagctaatttttgtattttcagtagacatgaggtttcaccatattggtcaggttggtcttgaactcctgaactcaggtgatccacccgcctcggcctcccaaagtgctgggattacaggcgtgagccacggcgcccagcccctgtgcatctcttttgccctatggctgactctcaatcctccccacccggttgacagtcatctctgcaactctccctcttttccacttgcaacttccaacctccccaagtgctgagcactccaagtagtctttctaatcctctccctgctttctcttagctgtccattatgtagataaacttaaattttctgcttactttatgtcacttcctacagccacaataggaaagtctgatgccaacgttggctactctcttcattactgggttctattgactcgcctttaaccgctgagcttccactgggagttatgtgcctgtttctgacttcttcactatatggtgtctctaatctccatcctctgcagcttctactgcagggcctctgccctggctgttccctctacctagaaagctcttccaccagatatctgaatagcttactccttcatgccttacgggcttttgctcaagtatcatccaatttaaagttaaaatcacccaccactgctgcatgctcctaatcctaggcatttttcctaggcattaatttttcctatggcatttaccactatgtggcatactatatattttactatttacttgtttcttgtaaaatgcattagggaaaggatatttattttgttttttaaatttttattaatttttttttttgagacagagtctcgctctgtcacctagactggagtgcaggggcgtgatctcactgcaaccgtcgcctcccaggttcgagagattctcatgactcgacctcccaagcagctgggattacagatgcccacgatgatgcccgactaatttttgtatttttagtagagatgggagtttcaccatctctatcctatgtgtgatactgtcctatcgtgtgatttcatgtgtcatgtacactagatgccagatttgttaacagaggtcgatagtgctaagactttctattaccgtgttgcagtgatgatgaaaaggaagaagtatacctgttgtgtgttcataagggaaatatttttagtgtttcacaactaaaatccctaaatcaatctggagcagaaaaaaaatcatccatttctccagttcagaaagatgcagtattttgagcacttgttaatgaaatttccagaaacagaagggattgttgccatttttctgatgtcctggagggtgtaacaaatgaggaactttaccaatcagcttcaagatgaggaatttaagacatttggcatcatcacaagtcacaggtcatcagaaaaagacaggtttagaagactcgttacacacatactcccagatgtgcaggttaaattccagaagctgaataataactgaaatatttgtgcaaatgtatatgtcaacttcccagttccaaataccattccagtttttagaaccataaagttcttcccagttataaattttgcataatttaaatattttatattttcacgattgtcctaattctttgacagtaggggtcattgtcttaagttgttgacaagcgcctcataacgggtattcaaaaatttctttcaagtaaaatatttataaagttcactttatgcttataaactgctgcgttgccctagaccgcccgcacaagcccttggagcacaacttggtcagcgcagaatttggttcctatcagcttccgtagcgtccctaacgacttccgcctctggcgggccgcagtggtggaggaacttccggcagcggcagctcaagtggccaaggcaagatggtgagtgactaagggtttctttccgctggtcgtcgcggtgcgatggggtctcagcagcctgaggcgagagaaagaggcggctgcccgaggaactgggacagccctcttctccttttgccggcctgatcttctcggcgggtggaggctcc

SEQ ID NO: 12857 - DNA, 2300 bp, Homo sapien
ggagctgggggcatttgaaggaggccttaaagacgttgttatgacaggcggagctaagacggaaagggcccgtggtgcagtagtaataataaaaacagctagcatttattcatcaattcactaaacaagtatttactgagcacttggtgttttgttgttgttgttaaacttttggctagcttctgttgtagacactgaggattgattgaagtccctgccttcatagtgcgtacattctagagcagaaggcagacaatcatcagaaatatgtaatatgatgtcaggggtggggtggtcattgttgtatggttattgtatagaaagggatagcttggaggagtggctgctttttatagagtcagcgaaggtagctctgaggaggtgaaatttgagcggaccgaaattgagggagtaacccctgcagatgtctgagggaaatgtggtcaaggcagaagatacagcaagtgcaaaggacctgagatgggaatgtttaacctgtatcatgaacggcaagaaggccagatctcatagaggtcttttttattttaattttaatttttatttttttgagacggagtcttggtctgtcgtccaggctggagtgcagtggcgcgatctccgcctcccgggttcaagcgattctcctgccttagccttccaagtagctgcgactataggcgcccgccactacgcccggctaatttttgtatttttgtagagacggcgtttcactctgttggccaggctggtcctgaactcctgaccttatgatccgcccgcctcggcctcccaaagtgttgggattacaggcgtgagccaccgcgcccggcctcatagaggtcttatacggatttctgggtagtattctaagcatgtaccaagtacttttccagcattttctcatttattacaacagttccctcgaggtaattactactgtcctcattttgataaggaagaaatggaaacacagtaagtggctgtgctggaacacaagccccatcgttttttttctagaacagtagagaaacacccaggttttggcattcagcaaacctgaatgtgattcctggctccatctctgacaagctttgtgacaacaggcaagtcatttaagctctctgggccttggtcttcttatctgcaaatgagggggtaatgatggtaccagtgtcatcgtgtttgtaagaattaagtgggataatacttggagaatgtttaggacactgcctggcatatagtaggggttcagtaattgatgtacttgttatttaagactgagaaacatgtaaaatgcccaagaggtgaagaagtgttggtgtattaatttagaagtgcctgtgtggagctgatttgagggagctgagtgggcccttctaatcagtaagttcactcatctttatatttgaaatgccaccatttctgagacattgctcagtgttaagcattgtcctataactgtagggtctcttaaaatcaggaatcccactgagtttattaatacactaagttcttaacaccttaaggtgatggagcttttcagattgagaagaaagacctgccccagagccccctggctttaggggtaggaattggataaggtgctattggaaggaaagtcttctggatcttggtgtgatctaagtaaggggtaaatgattggtaaacgatttttgagtgtgtaaaatgacgtagctttcatagcctgattttatggaatacattcttgatagcttcagtccggtagtttcctatcaagagatgtgaagctccatattttcccctcaagaggggggtgatcttaagactctcagcctctttagttgtatctacttctcaatagagttgttcttgattctaagatgcaatcaattgccaggtgcaccagtaatctatcgaacatcttttcagggaaaaagaaattctgccacactaaatgcacacattgactgcaagtattacatcttgggttcagaaatgttcaaatgagggagaaatgttactcacaggacatgttatagactcacaggacagtataaagttattcttttgaagtgatcatattctgaatttacatctgtgcctgatttttctcctccagggtcaaagtcagagtggtggtcatggtcctggaggtggcaagaaggatgacaaggtaaatatgccagatttgtcctgtgatatgagcaaattgtggaaaatgtcatgggtctcggctgagaagttctgtggggattcatgaattttaaaaagtagaatgatccagtagtttttaaactagcctgtcctacagatacaat

SEQ ID NO: 12858 - DNA, 2300 bp, Homo sapien
aaaccctgtctctataaaaaattagctgggcgtggccgggcgcagtggctcacgcctgtaatcccagtactttgggaggcagaggcgggtggatcatgaggtcaggagttcgagaccagcctggccaatgtggtgaaaccccgtctctactaaaaatacaaaaattagccgggtgtggtgacgtgcgcctgtagtcccggctactcgggaggctgaggcaggagaatggcatgaacccgggaggcggtgcttgtagtgagcggagacagcgccactgcactccagcctgggtgacagagcgagactacatctcaaaaaaaaaaaaaaaaaaagattaggtgggcgtggtagtgcatgcctgtagtcccagctatccaagaggctgaggtaggagggtcacttgagccctggaggttgaggctacagtgagtcatgatcacaccactgcatttcagcctgggcaacagagtgagaccctgtctgaaaaaaagaaaaaaaaaactgatgcctgacccttcctcaaagattttgatctattcatctggagtatggccaagcctaggagccatagtggagaagtgctactttaaaagctctattctgagcatggtggctcatgcctataatcctagcactgtgagaggtcaaggcggatggatgacttgaggccaggagttcaagaccagcccggccaacatggtgaaaccccatctctactaaaaatacaaaactagccaggtgtggtgacacacatctgtagtcccagctacctgggaggctgaggcaggaaaactgcttgaacctgagagtctgaggttgcagtgagctgagatcgtgccactgcactccagcctgggtgacagagcgagaccatctccaaaaaaaaaaacaaaaaaaacccaccctattctgcagtatcagattcatttggtagagctcaggacttagaagttcattgctgtgcagattccaaaggaagcacagtcatttgagagaattgacagtgttcctaagaagatccgtgctgaggggtacccacaatggagagacggagacacctgtacccagaggccgagagctagaagagatccctcttctacagcccctcatcttacagcttaggaaattatgtttcagaatggccggtgactagcccaaggcccctgtgggagttgagctagtaacagggctggagctggaacacaggcctcctgacccacagctgcaggccccctgtggggctctagtactaaaggggctgcggtacagggctgggaggcaggactggacaaacaagtctgtcagaggagcgggcagcttgttcagtgagccctctgaccgcagaagcagcccactggctagacttggctgcttctgcacgataacatcctatccactggaaaggtcctatttgttttctgttcaccttccctcattgatgctttcagggagcagtccagcctttgcatctgctactctgcctgtctaaaagcaacatcattgccacatgttgcaaagctgagctttgtgtcagccatcccatttctggaaagtcttccctgtcacacaccagctagccacctccacactcctcccgtgctggcccgaggctgccagctctgcccctaactgcctctgtatcctgaggcacctacccagcccttgtcaaggtcctcactgaccaccaaaggatcccaggtcttccaattcaaaaattctcaagttgggcactctttgctgactcttgtttttcttttcttttttttttttttgagacggagtcttgctctgtcgcccaggctggagtgcaatggcgcgatcttggctcactgcaatctccgcctcccgggttcaagcgattctcctgccttagcctctcgggttcaagcaattctcctgcctcagcctcccgagtagctaggattacaggcatgtgctggctaatattgtaacttttttaatagagacggggtttctccatgttggtcaggctggtcttgaacttctgacctcaggtgatcctcctgcctcagcctcccaaagtgctgggattacaggcgtgagccaccgcgcctggccagctgactcttgtttttaacctgaaacagaaatatcagcaagtagagcagtattggaaatgatgtttgagctcttccctgagatcagtgggaggaactgcctctcccttggaagggcatgccacagcagctctcactgtggcgttcatcaagagctggtcctgtctcagctgtctgagctggcagcaagcccacccagtagctacttttctggagcagtag

SEQ ID NO: 12859 - DNA, 2300 bp, Homo sapien
ccgtctaggagccgagcacgctgtaccgccagccccagccctgcctgcatgaggggcccggcacgcttgtgcagcaacgctgcttacactatgaaggccaaggctggcctggttctggtgttgcattcgagggctgtgaacagaatgaaatgtcaacatccatttttcagacttgttctgcctccgaagagatttttagtgctgagtgattttcactattaacatatggctggaaggaatggttttcttatcttctccgagctctagactggctagcttctctctggctttttttgttttgttttcctctctttagaattgctgtatacttgtatctcctcagcacatttagaaaagccagtgtataattttggctggcaactgacggacgcagcgggcagcagcaggcagggcagcgcacgagagcacctcccagggcacggtgggaaactggccagcccagccccactactgccctctcctgctcgtccccagtccctgagctacaggtggctgtaggcagaagcccaccgggtgttccttagcgacagacaggtcgtcagctgctccccttgatgccttttcacagaaacaaccctcaacttgaggaagttgagagctccactccgaggtggacttgctccccctccctgagagctaactggcttgaactgtcatgagttcctggctgcccacaaagagggaccttctccacccttgtcctctgcgtggggcagacatcagccagacatgtcaccgacctgattgggggcagggagtaggaagtccaggaccaaaccatgctccccatgacagcagctggcgcctcagtccccatctgactcatgtctcttctcatctggttcagaacttagaagggcgtggcctctgatcagctggttccctccaaaccccagtggcaacctgtcccttgagagccaggaatggctcttagcagtgggcagtgagcccccgagaggataaagcggctgctcgaacagattgcgagcacattacttgctgcatgggaggaggtttaaaacaaatcaaagattccttgagggcattttacagaaaacaagatgtcaagagcatcactgttgttatttaaaagcccatttgaggccaggcgcggtggctcacgtctgtaatcccagcactttgggaggccgaggcggacggatcacgaggtcaggagatcgagaccatcctggctaacatggtgaaacccccgtctctactaaaaatacaaaaaattagccgggcgtggtggctggcgcctgtagtcccagctactcggaaggctaaggcaggagaatggcgtgaacctgggaggcagagcttgcagtgagccaagatcgcgccactgcactccagcctgggcgacacagcaagactccgtctcgaaaaaaaaaaaaaaaaaacagcccgtttgagattgctgacatgaacttctgaaagatgactacgtgcctcccaagactaaccgtcagcttggagggctgagaagggggttcccagctggagtcaaacagtggctcatgtgtttcatcaggaacgctcgtcatttccccgaaggagtcactgatcacatcagaccacaggggtcggcccacctcgggtttgggacagtgttctttcctggaatgaagcagtggcaatgcctctggcacaggattgctgggcctgcaggaggccaggaggcacctctgtgctgtgttcccagtaggaggaggcagctactacttgtaaggcacacatatcattttgcattggaaaagtgaagataggcttgctgcagagggagtgatgggagagttcaccttaaattgttctactgaggaagggctccaaagagccagtgggttttccgcaggcagacggggttctccctgtccggctcaccagtgcaggaagccagggaagaaattactgtgggaattctgttatttcacaagcacttcatacctgcatccctgcacttggcaccgcaggcctcagtgaccagctgccgaaacggtaatttcagcattttggtcagtaagcaaactggagaagcagctggggtggggcgcagttcagcccgctaccctgacactctaggccctggcatttgctttagctgcttttgtagaattgacatgagggagactgtccctctagaggaaaacgctcagctattaccaatgaggaaaaggcaatactgatgtgctggggttttttgttttttttaatctcaaacttaggaaaagatgcaagtgcgttacaaagaattttgtttcctgaaccgtgtgagtcag

SEQ ID NO: 12860 - DNA, 2300 bp, Homo sapien
tttgttaactctggggacgcctacatgttccataaaagcgttttagaacccaacctcttttcctctagagtagaaaataaccaaatgtaatttcatttgacatactttgtttcaggattaaaaaaagaatcttaggcctatatgttatcttcttaagtagggacacaggaaaatattgagaaaacaggactggtctaggaaacagatgatccaggttcccaggcctcagtgtccttatttaggaacagttaagagaagggatgataatttttgccttgcctgtcacatatggctgtgatgatcaaatgacataatgtgtgtgacagttctttacaaggctccaggaaaatagaaattactaagatctagaagacaggcatgatcttaaattcatgagatgttaaagaagagttgaagtgttataggaagaagtcaagccaggcagaaagaaagttaattactagtccttgtgtatctccaaatagaaacaatctgaaggtgaggtgaatttggttatatgcagtgaacctgcataacgagagtttaggtctaatgcgcctttagtcattcagaggtagtacacgtattccctcagtaactttttttctttttctaatatcagatacaagaggaaaggagactcctgccttggcattaaccctaagaagcagtgcatatcttgggaagggacttccacagagaagaagcattcacgcaagcaggttgaacgctattttactaagaagagtgtgggattaatgaacatcgatggagttgccattagcagtaaaactgaacctccctcatctgagcccatctcctttataccagtgaaggacttggaagatgcggctcctgttacaacctggttgaatcctctggggatttatgatcagtcaaccacacattggctacaaggacagggtcctccagagcaggaatcaaagcagccagacgcacagccagacagcgagagtgcggctctcaaggccaaggtggaggagtttaacaggagggtgcgggagaatcctcgggatacgcagctgtggatggcatttgttgcttttcaggtatgtgttgccatcccaattctcttaccttagaaggacattcctgattttgggcaaactgatggactgtgcagcaatttttgagcaaatgaggaaatttgacactgggcatacaaagattattagaatagagcctttgccctgagctcgctcaaagtccaatgaggaaaatggacatgcgaagaataagtgcaccctggggtagtaaatgctgtaatgtataacttgggagtggagtgagggaatggcttgtgttgagggaggagaaagagctaccaaggagaaggtgaagttcaacacaatcttgaaagaagagatgttcaccaggtagggagaggcattcctgaagtacaaacagaacaggcagagctcacggaattgtgaaagagagagggctgttcagtgtattacccagttagagccatgcattctctttcgaaaacttgtaggtttgtctgaatccctaattttgaaccactcatacaattaccatattttgtgccacatttggcccttttattggtaaggtctgctcttcagaaaagactttcaaggcattgtatgctagtcattgatgcagaaatcaaagcttaaaatggcagagagtggataattaagtgataaatacaagatcaaacatatcaggtgacacaagcactttaggatccaggttttctttaaaagaaatagtggcaaactggtggtttaagaaagtccctagggggtggtaagaaaatcagtaagcattgttgaaactcaggatctcccaggtccatttgcatttgtaaattggtgtttttgttgttgaggacgaggtcatgaaaagtcctggcctgtatgccatcgaggaaggagagcaggaaaagcgaaagaggtccctgaagctcattctggagaagaagctggccattctggagcgggccattgagagcaaccagagcagtgtggatctgaaactggccaagctgaagctctgcacagagttctgggagccctccactctggtcaaagagtggcagaaactgatatttttgcatcccaataatacagccctttggcagaaataccttttattttgccagagccagtttagtaccttttcgatatcaaaaattcacagtctttatggaaaatgcttgagcactttgtctgctgttaaggacggcagcatcttatctcaccctgcgttgcctggcacggaagaggccatgtttggtaaggagataacca

SEQ ID NO: 12861 - DNA, 2300 bp, Homo sapien
cttcggggtgctgaggcagatggtcgagactggagtgagccatgatcgcaccactgcactccagcctgggcgagagaggagatcttgtctcaaaaacaaaacaaacacaaaaagattttaacttaaaaccaggagtctgtatcagttacttgattatacactttcagttgttcttatgaggagggtctcttgagcaacattctcttatacatttgtaagtacacaatatacctagtatacccagattcctttgtattacagaaacattattattatggttttaatttcttaaaacttccatattaattcttacttttctggggtggaaagataggaggcattgggatagactatttccatcccagttacctgaagtgatctgctaagaaagacaaatgctgccccaattaattgaggtaacttagagtcaaagattttggcagaacctgagatttaaagttgaagacatacaggaattactgcccctattgtcatactaagctcctttttgtaagtactctgccagggacttcaaagcattaagggtgtctattttggactcatagaacctaattcttatgcaggtctgcagacttcatcagagtccatccattccttgattagatgattacatttgcatctctggtttataatgtatttcctaactaaagatctttaactccctaggatcccaataaatatatcttcatttacctatctattttcacttgcaaatatttcagtatatatctctaatatataagaactttaaaaagtaatctcaggctgggttggggggtgctcaggcacaggcacccagcactttgggaggcagaggggggcagatcgcttgagcccaggagttcgagaccagcctgggcaacatggtgaaaccctgtctctattaaaaaaaaaaaaattaagccagacatggtggtgtatgcctgtggttccagccacttgggaggctgaggtgaggggattgcttgaatcgaggagttcgaagctgcagtgagcagagatcgtaccactacactccagcctgggtggcagaaggagaccttgtctcaaaataaataaataagggtcacctcagtgacataagtactttagtacatctaacagaattcacaagaattacttgtgaattgcttgtactctgcctaccttcttatttctccatctatcttaaaaaggtctttttacagtttgtccaatcagaattataatgaggccacaaatatgttgtatttgcttgatgtgtctgtaagatcttcgtatctattacaatctcctgccctcttaaagcccttgatatgttaaggaagcacggttgttttctataatttcccatattctagatttggctaattgtttcttggtagtacaaagtcttctaagttgttcctttactctctatatttctggtagcaagtgtgattagattttgggtgggaggaaccggggtcaagaatgcttcacagacaggtatttcctaactatcaaagacccttgaacttgatgggactttccatttttccttgttctggggtatttaatatggtaacctgattgaagttcggatatctcacatgactttgagccgaacttgcagtcgtaattcacataatagctaacacatattaagtgcttttcatgggccggactcaatgctaggccctttataaatatgttcatttaatcttctcaatattttgcagataaggaaagtaatgcttagagcgtttaagttgacccagttagcaaggatggtgtgaatttaggggtcgaactggaatcccaatttccttagtccctttcgcggtcaacaattcccttctccggttttcgcagttccggttctcacagggtcccaaccactaggaacccgtcactcctcgctccgccccccttggccccgccccaccctgctttgccctgcctctccctgccccgccgcgccccagtcccttgacgaccctcctctctgggccccgcccctcccgcttcggggtcaagccccagagagcgccgcgaaaaccacatttcccagagtgcaccgcgacggcaggggtcctcagaccggcgctcgctcgccggcgccatccctatagagaagaacggaggtacggcctgtggtcatggcgctgttcccagcctttgcggggcttagtgaggctcccgatggcgggagctccaggaaaggtaagcacacaaacgagccgaagaaggcacctggggggcttaagaggctgtttctcgggcccaggtctagacttttgctttggatttgtgtatcc

SEQ ID NO: 12862 - DNA, 2300 bp, Homo sapien
agtattattattattattggatggagtctcgctctgtcaccaggctggaatgcgatggcgctatcttggctcactgcaacctccgatgccctggttcaagggattctcctgcctcagcctactgaaagtagctgagattacaggcacgcgccaccacacccagctaatttttgtatttttagtagagacaaggtttcactatgttggccaggatggtctcgatctcctgaccttgtgatccgcctgcttcggcctccccaagtgctgggattacaggtgtgagccaccgcgcccggccaagatgcagttttaataaggagtttggccatttaggcttgtaactgactggattattgcatattctttaaaattaatttgtattagtcccttttcttctatttccttatctccaactctcgcattagtatgcacgctttattcctactcaggttttcccctatgagcccaggagtattattattatttttttgcagggattaggatcaggtttgtgaagtgaatagtgtctttctaatctgcagagggaaggcagcatcccctggcttgctgctgcagcctctctttaaattaaacagcaggttcactctttctgcggcattccagaaggaacatcagtaggaacagctccacagatgctgacgtcttgtctaaggttatcccaagaagtcctgtggcatttgcaatgtgcctgtacatttttccttttttaaaaaacatattcctgcagactttgttgaaagcagaaacaaacacaagcaagcaaagccctttctagcacagcatgttaatcacacactttgccatattctgtgaaacagtaagcaaatgataacctccaactgttgcccgggccctgtaaaacagaagatcaaattctgtgttctgccttggcaagaaaagaaactgcagcattttgtctagatttttacaagtcctggggttcacattactggctgaaattgttctttctctactttacagaaaaatggaaaacactagtaaacttaaagatttaaatattattttaaaaggaatataataaaaaatggaaaacactagtatatttaaagatttaaatagtcttttaaaaggaatataatcaaaactgtagtttaaaatacaatctagctccataagagaggcaattggctgtgtgttccacttgtaatgcagaggatttgaagcatctattttttcccttgtttctatggatttatgaataaagactctgacccttctcaggatcaggaaaattacgaaaaatttaaagcctgggtttaaggtctgtagaagctgcacaggtacactaattttagtaagacgggcgccaggaaaaagaacaaaatagtaggggagaaatattcaggcatcctaaaaaatattcagtggaaacgtaaaaacattaaagactgattaaacatcgcagcatgacacagatttagcaactgagcataaataatttgactcggatactgctccaaaatccgaagaggaccaatttcttccaggaggacaactacctcgtcctctgcagacccctctcctcggcagctgaaggagtgtggccaatctgcctccacctccccgcggaccccctactctcaggacctcctgcagcaccccaaactggaagtggccgctgcagacccaaggacgaggggcacgcgggagccggcagccctagtggagcggttggagatgttgaggtgggagggtcacccaggtggggtgaggctggggtaggtagcggagtgaacggcttccgaagctctgggccgcccccaggttggactaagcaggcgctctgtcttcgcccccgcccagggtgggcgtctcctgaggactccccgccacacctgacccgagaccgcgcgcccagcctagaacgcttccccgacccagcgtagggccgccgcgactggcgcgcagggggcggcgggaggcctggcgaacccgggggcgggaccaggcgggcaaggcccggctgccgcagcgccgctctgcgcgaggcggctccgccgcggcggagggatacggcgcaccatatatatatcgcggggcgcagactcgcgctccggcagtggtgctgggagtgtcgtggacgccgtgccgttactcgtagtcaggcggcggcgcaggcggcggcggcggcatagcgcacagcgcgccttagcagcagcagcagcagcagcggcatcggaggtacccccgccgtcgcagcccccgcgctggtgcagccaccctcgctccctctgctcttcctcccttcgctcgcacca

SEQ ID NO: 12863 - DNA, 2300 bp, Homo sapien
tttatgaataaagactctgacccttctcaggatcaggaaaattacgaaaaatttaaagcctgggtttaaggtctgtagaagctgcacaggtacactaattttagtaagacgggcgccaggaaaaagaacaaaatagtaggggagaaatattcaggcatcctaaaaaatattcagtggaaacgtaaaaacattaaagactgattaaacatcgcagcatgacacagatttagcaactgagcataaataatttgactcggatactgctccaaaatccgaagaggaccaatttcttccaggaggacaactacctcgtcctctgcagacccctctcctcggcagctgaaggagtgtggccaatctgcctccacctccccgcggaccccctactctcaggacctcctgcagcaccccaaactggaagtggccgctgcagacccaaggacgaggggcacgcgggagccggcagccctagtggagcggttggagatgttgaggtgggagggtcacccaggtggggtgaggctggggtaggtagcggagtgaacggcttccgaagctctgggccgcccccaggttggactaagcaggcgctctgtcttcgcccccgcccagggtgggcgtctcctgaggactccccgccacacctgacccgagaccgcgcgcccagcctagaacgcttccccgacccagcgtagggccgccgcgactggcgcgcagggggcggcgggaggcctggcgaacccgggggcgggaccaggcgggcaaggcccggctgccgcagcgccgctctgcgcgaggcggctccgccgcggcggagggatacggcgcaccatatatatatcgcggggcgcagactcgcgctccggcagtggtgctgggagtgtcgtggacgccgtgccgttactcgtagtcaggcggcggcgcaggcggcggcggcggcatagcgcacagcgcgccttagcagcagcagcagcagcagcggcatcggaggtacccccgccgtcgcagcccccgcgctggtgcagccaccctcgctccctctgctcttcctcccttcgctcgcaccatggtaggtcgggagtggcaaatgccggcgtagcagctgcccgagatttcttcccagatttctagttgttttgtttgttttttgtttgtttttggttcttggaggtttttcttttctgagtgttacgcagcagctgcgcttaaaggaggttgcattttggatttgcatctcggcgacctctgccagggagcttcatttattggttccccttggagctggacttggtcgtaggccgtccacgggcaggggctccggccgcaactgcagcgggggtttctgcatccaatccccctgccccccgcccagccccgcacccactgcatccactagcgccgcacccgggctgcctgcagcgcagcgtttcggcctgggagccgggcggggccgggcactagacccccccccccggcccgcccctccccaccccgcttctccgccggcgcgaaggtggcaggtcgggcgggcagtggagaatgaatgggctggagctggccggtggcgcacattgttccggccgggtgttgaggggcgcagtcagcgcccgccacctccccactttggccggccctgctgggcgccctccctcggtcgctctcccctccttcttcccggggggcgcggcgcgggcgtgggctgggaaggaaggagccggggaagggtggggttgggggcaggaaggcgaggggttgggggcggagagggcggaagcggcggccgggccgccctgcgcccgggcggggccctgcggtgtggccgtggcttgttcctgccgctttcgcaccctgcggccccccacccagtgcagcagtgcgggcgggcgtgagcctcggtgcaccaggaggcacttcccgcgggaggcgctgggctcgcgctaattggggcggggggggggggcggcgggggaggagggaactggcgcgcggcttggtttccattagagacgcaaagtttctgctccgggaggaggcggcggcgccgcgggctcgtcgcctgggggagcagaagcgggtgggaggtgcgggtggccttggcctcagccctggtgcgcgggggccgggggtggtgaccctcctggccgaggaggggcggcgtccagacgcccgctcgggggccgccttcccccccacgcctgcccccgggcacgcgccctgcccggtccctcgccccgcgccacttccagtccgcagagagatgccctccacgtttctgctttctctgcagcctctagattgcc

SEQ ID NO: 12864 - DNA, 2300 bp, Homo sapien
cagccaaggtcagaactgccctgctgaaggaagcacatgctcttaagccactggatttggtggtttattgagtatcactgtgaccataggcaaccgagacagtgaaggtagagagaatggagaggcaaacatgcagaggagggacagtgtgggagtgcctggtgggggatgagaagcccagaatttctgattcatacgggcctgatggcaaccccaagttccctcaagccaggaggtctgaagcctgtgtggccagtgacctgcccgctgccgaatgatggattaagcgcatgtctgatgtaccgaattggccaccagactgctggttggatgtctgccaggttccctcacaagcaggcctgcctgatatgttttctcagcctgttttttcctatttgccagagcccaggcctttgaaactgctatcacaaggctgcttccacttccccccgtggatcctggtggaagtttcttgatgttgagcaagaactcccagaaactcctggaacctgcttctcagccatgcgcgccggcgcagccctgctgtgtggccttaggcgcccctctcctgcccccgggcctccctccactgcgtgaccggccacatggccatggctgctgctctgtgcctgtctcctcatctgtgaaatgaggatacagtcatggacctcatggcgggggtgcggggggaggatggtggtggacggaggcggggcagggccttggactactgtgtgcagtttggattcctccaggcttaaaatcggcttccatccccaactctccagctccccgtctccacccaggccatttgaacgatcttgttgaaaagcacagtggtttccaaagcaaatccaagtcttgtgcggctctgggctgagggtcccacgcttttcacccagacctataatcatcacagatgtttagaggaggtggtaagtacagagctgcatgctttatttctgctgacccaggcccccaccctcctccctcctgggtaccaggctgcctcccaggctagcggggctggtgcctctgtctcctcctaacactcctgagatttgcatccccgcagacgccaggcgcggcgctgccccaggaggtggggtgtttagaacccgctccccgggctcgcccaggagctttgtgtttagtaaaggcagcagtcagttccctggtaggctcagggaaggacgacagctcccggctcagtcctcagcctccaacccccactcttcaatctccttcccagaccaatgaccccctctgcgggagaacctgcggcgaaaggcagagccccagagcagggtctggagtggcaggaccggcagccaatgaaggtgaaggccgagcattacatcatcaccgtggtctcccattggtttacatcctgggcttcctgactccgcctcccagccttaacaatgggcctctctgctccccaggcttctgaccctggtgccagctttgcccagaaggccacagtcgggcagagtcctgggctaggcgggagcccgaggtctgggctgagccactaactaggggtgaggcatagtgttgccaggtgtcatcttcctcacctgcaagaggagagggttccagctgttaatctcgggttctgccgcagttcacccaccaccacacactcgcccatgaacgtcctcctcgcagaccccggggaccctggccggccaggggtctggtctgccatgggctccctttcctccccagagcctggcaggaagtgaacatatggaatgatggttaatgttaactgatgttttctaaagagcacacactgggctaagccttatacattattttattcgtgtcctaaatattagccccccacgcagccctaattgttcagagacaagcactgactctgaggctgggccaggttgagtgatggccaaggccacggacctggtgagggggacagtcaggattcgaacccaggcggctggctccagagcccttcaaacgatgccatgggaatggatgggggtcactagcctccctattgtgactcgtttgagctcttagcccggcgtgtagtctggcgggagccgtccctggatgggggtcactagcctccccattgtgactcgtttgagctcttagccaggcgtgtagtctggcgggagccgtcgcggctggctcggcagctccaggctattccgaggaacagtcttcagagagcctggggtgctgatggggaaaagctgttgctgagatttgacaagtttggtcctgagatgtcagaaaggatttcagctcttctgccaccccaaggacgg

SEQ ID NO: 12865 - DNA, 2300 bp, Homo sapien
taaactacgaataggcaaacacatatgttcattgtatgattttagatatatttaataaacattcatttgattttattccatatttaagaacaattctaaaggattctaaaataccatatttgaacatacttcagtagtattggtagtaatagtcatagtaatatgagtttctaccaattattacgtgattaccaggtacaatgcctcaaatgcaccagctaaatcaattctgaccacaactgtctgagatggatattttattattcacattttgtagatgaggaaatgagactcagagagatttagtgacttgctcaaggtcacacaacttaaaagtgaaggatctggagtcctaaactcaacttgtcccattgtaagactgcactctcaaccactacaaaaaaagccttcctcgttcctttccttccatactggactaaccctataacacttccaaaaatgcctgcttctccagagtagtgagcctattttgggggttccctgaagaaagaattcctgattctcacaaatccctacggttagaaacatcttctcaattgttgattctactgttgtctcagccctgcttggagtgacaaagtggctgagatggtacctctcagcttagaactttttggaccctgttaagcttattcaaagtacttaaacagcaagttttatcatttcatggtgacaggaatgtaacgctggagggaccagctgctcctccaagggccttcagctgtctcctctactaactgcccaacaggtggacagagctgaccctcacggagggaaggtttcacctccatcaaggcctgactacccatcagctatgtcctccactcccaggcttcagggagtctacagttctgctgcagacaagcttgtcacaaacaaacagataatactacatggcagttgcaacaagtgcccacttaatcttgtttcggttggtgttgaaatgttttagccaggttgggaagaaaccatgggatccactgattacatctggccccaacttttaataaagtattcttgggaagaagtttcccatcgcaaagaaatacaaatatttaaaaagcaaacaagtcacggactgctctcagacctgctgccatatgctttgcttttttgagcttacggcttaacattaaaataacagccttgcattcctcaaatatctccactgctgttccttacttccactacttgaaaaggctgtcagctgctgtcacttggaggcattaccatattagccaccactgtttactgcttaccatgtggtatggctattagtttaataagcctcctcttggatgacaccctaggctatggaagaaggaaccataccctggagtccaatgcctaatgaaagagcttgtgtgtgtgtgcgtgtgtgtgtgtgtgtgtgtgtgtgtgttggagggtgagacacggaatgaagctttataaatattgatgagagacactgaattcaattgcatcaggttgtactttaccgatggttaaaggatcgaatattttttaaagtgctttaaccattttaaggttccatgggataaacagcttggggtaaaatccagaaatatagttggtgtacaaaagagcaagtttgagatctgcaagaagtaaaacactgcagcaaagctctttaattcactctgcataaatagctgagcctacaaaagaaatctctagtcagaggtttcctggattataacaagaattctctcgatgggaagaagtgcccttttcacttgaagacaaagaaatgtttgtaatggaaatgtgtgaaccaattttccaaggagagctgctgaaaagcactgattaaaaacacagcgaggtgatgaggcagtgaaataaagccagagctgacccacttaaagtttgtggctgcacttccttctgaaagtgaagagagcaaccctgggccaccttctacattctttcccttctccccaaccccaagcagtccctgccccattactgaccctgcaactctgtagacaatcagaaccttccagcgtgcaggaatgtttactatttctggccattgtgtactggttactaagctactgccactgaggatgaaatggtaacccagtagcccaaaagacaaagtccttctcaacaaagcctaaccaacaggcaatggattatagtgattcagaggaaagataagaaggtaggtagatgattctagcatatgacagtttacagtgatagttcttaggttacgtataatattgattgtttaagaacttccatttcctagagaataaaactaagacaca

SEQ ID NO: 12866 - DNA, 2300 bp, Homo sapien
ggattttgttgttgtttaaaccttttctattttttgcattgtttttctttttcttttcttttcttttcttttttttttttttttttttttttttgagacagggtggtcttgctctgttgcccaggctggaatgcagtggtacgacgatcacagctcgctgcagcctcggcctcctgggctcaagctattctccctcctcagcctcctgagtaactgggactacaggtgtgcactaccatacccagctaatttttactaatttttttttgtagagacaggggtctcgctatgttgccttagctggtctcgaactcctggcctcaagtgatcctcctgcctcagcctccctagtgctgagattacaggtgtgagccactgcgcccagccgcctctgttctttttaaaacctcctgccattattcttttcttttcctcccagcacccacctcattccatctttacagagaaaactggctgggcccgacaccacctgccattctctcctccttatctggaggatcttgcctctgtaggagaaggcctctcagcagggatacatttgttccggggacctggctctctctagtcttctgggacctaatttatctccccagagtcttcactctgcatgctggttctgctcatgttagcgagaggcttgagttgcctctatgaaaaattaacacatagataacctttcttcaccccacacatccttccttcatacctcatctccatcttttctttgcttattggtccccatggcctgtgttctcctcccgtgtcccctaaagccacacgtgcggagctcgtcacctgattgattgtggtggcttcttggcctccgttgccgctggccccattggccccttctcgggtccctctctgtgttgtgacactgctgcatgccctcccacccagatcccttcttcgccctcctttccagatcccttttctctccctttccatggtctggccccactgccttgcctctgaatactcttctggactgatctgatctcttctagtaacttcagctcttttctcaaatgtttgtcttctgttagatctttttcttgaggtcccagaatgtctttggtaaattacctcatgatgccttgaactcagtatttcccgtgctaaactcattcatgacagcttccttccccattctccctttctcctaaaaaaaaacacctccccttctctccctctctctcaaacacacacacacacactccacacactctctctctctcacacacacacacacacaatcacactcgtgcatacacaagggccttctgtggcatggattctcccccaggtatgcaagccagaaactctgggcacctcctgtgcctccccagtccccgcatgcttccacaggtgacccatccttgctgatttgacctcggacacatttcttgattctgaaacccctggaccattctatccactttgttcctggcctgcctccatcagggtcttccacctcaccccactcaccccagtcccccacgatcttcctaaagctctaacgtcatcatgtcactctgtgcagggaccagaggctcctcgctgactgagagggaagtccgtttgtagattactcaccacggcaggcaatgcaccagtactgagaagataaagaagttgtggtttctgcctttgatggtgtctcatagtggggctgggctggggaaggcccagctcagtttctattctccctgatgccattcctgattcctgggatcacctcaccacagtcctgtttctcgccctgggggcactcctgagtttgtctttgtctttgtgttgttggtgtatttgcctcttttcctgtgccagatacaaagctactcgagggcagggattgtcacagctctggtcagttgtaggttgtcctggccaccggcatggtgcatcatcctgtgtggggactccgtaggagccgtttggtggtggattatgttttaagcattcaagggaagcagattttatgggacttaccttagtgtgcatagatacaaactcacacttgtgcagttgtggcaccagtgattctcagatgtctgcatttgtttttctttcccaaccagtgcctagaaagagccatgaagtttgcctttgaggaattccacctgtggtaccagtttgctctgtccctgatggctgctggaaaagtgagtcccttttgtgatgggcagttttttatgcctttcctattaaggccaaagagttgaatgtcatggaattgcacggaatgatagactttgtggaagtctttcgagccactc

SEQ ID NO: 12867 - DNA, 2300 bp, Homo sapien
ctggaactagatagtgctaatggttgcacaacattgtgagtgtcctgaatgctgttggattgtacactttaaataattaaagtggtggcttttatgttatgtgaatttcatcacaagttttaaaacacatacacacacaaaaagggcatttaatgaccaaatttgtacataaacatccaggtcttatttcaggcccacttcccacctttctctcctttgatcctgaatttattttatagttaccaacaattggatgcatttaaactacaggctaaatgtaggttgagtttaaaaagtaaaaagtattctagatattggtgatcttgctggtaatttcatatttattgtttttttctgaacttcatttgagctttcagtggacataaccaaatggccttcttaataggtagagaactggtgaagtgatgtcttcagaatatgcaatcacatcaaaaccccacgtttaaaaaatctctcaggaaggttaataccctgagagaaaatgagacctagcatgagctatctagtagtgaacaagcaaactgtttagggcagaaatttttacaactttaaaatccctccatggcaaatgtattcagaaaatgaaattcctcgttcattttttttccttttaacacttatttctcagctatagtgagtggaagttatttttgccagttgaagtttccagcaaaagtcattagcttatatgactgcaatgagatcaaaatgaaactataatggaaggtttaagaaaccagttcaggagctgtttaggtcctgaaaattgtgttcttatgagatctttacagattgctcagttggggatgatcagagtgcatttaatttcacatttttatagacatttaatgccaatgggtcttacttgggaataatcaagaaaatttgcctttacccagtggttatcagaaaccactctgttagtgatttggttggatttaattttccttgtggtgttttaagagatttcatatggatgaaagcttagcaaagccctcttctgaaacatttacttatttttttaaaaaagtctccttctcagaagatcagcagtctttgtctgcatcttcaaagaatgctaaaacctggtagaaaaccatgctggtttatgatgccacctctggctgatcatgggtagagtgaactaccctgggatgcagtgcttctcttttcagagggatttttttttaaattacttatcctcttctttgttactggaagattacaagctaagtgaactgacatacatcagtcaacaaaacacttcttagtacataccacacattcttttcccccatacattatattatacatcgtactgttttaggcagtggaattacagaagtttgggaagcatattaatctgcatctaacttggaggacaggatccagatgtttctgggttttcactgtgaagaaggggatacccatccagctttaaagaaaggtctttcttgatcgggaaccatttcccactttgccttccctattgcacaaggccagtgaaaacctctgggccaggagcccaggatgcactgagagtagacactcaggtgctgagtcctcgggggtgggatgattaggccctgccattggtacatgtaagaaagaagacgtctacagtggacatcggattgtcagtgaggataattttttcagggatagcgttatctaagctgagtacaagcattttgccaggcttgaggttaagcacacatcattagtgatgctaatatctgcagctcacctgttatttataagagctcttgggaaagggcttagccaaaagtttcagttgtttcaggtataaaacatgtttagtattccagagtgtgacaggtggggtggcatttgaagtacatgaaccttttaagtgttcaaacatcttagtgaatcatattttcttttctttcttgtcataaactggtatgattaccatcgtaaaggaaaaatttttaattatgagccttgcagtagtgcttagcacaatgtgatgatataaatatttattgactgactgaatgaatgactaatacaagatagattcatggctatgcttttcctcgtttatgttcccagacaatagccaggcagctggcagagatcttgttgcggggtatgtgtgagcagagctactggaaccctctggaggatccaccgtgccagtcacctctggacgatcctctccgcaaaggagcaaacacaaaaacctacactctcactcggagagcccgtgtctactcaggagagaagtatgaaagttgatgtcctcacttgta

SEQ ID NO: 12868 - DNA, 2300 bp, Homo sapien
cctcctcattggtaaactgaggtccacagtgtgtgttcttcatcaactccggtggtgggggagttgtggtggggataagaacctgcgtgtgactgctcttggaaagttggagtaagggcacccagaaggaatgacgacgacccctcagtgcctccttgtgactgcgggcgggctacggaaccttccagactgaccgcttcactctcaaatgcaggacccagaatccaacactgccaccaccacagctatttccctggcagtattctcaacactgcagtcacagtgatagtccaaagtgtaggtctgatcatgccactcttccgtgaaaagccctgcagggctgctccatgtcaccagagtaaaagtcaaagtttttttttttttttttgagacggagtctctctctgttgcccaggctggagtgcagtgctgccatctcagctcactgcaaactccgcctcccgggttcacaccattctcctgcctcagcctccccagcagctgggactacaggcgcctgccaccacgcccggctaatttttaaaaatatttttagtagagacgggtttcaccatgttagctaggacggtctcgatcttctgacctcgtgatccgcccacctcggcctcccaaagtgctgggattacaggcgtgagccaccgtgcccagccaaaagccaaggtcttataatggcccaccaggcactacacagaactccccccaacctctcagagttcatctcctgcctcggcccctctccttcgctccacccagcccctctggcctctgccatttctccatcccacccagtgtgctctaaccccagagccttcgcacttgtggtgttctctgcctgggatactcctcccccagagatatcctcatggctcccccttagtttcttcaagtctaatgccacctccgtgaggccatccctgactgctccattttaaatggcaacacttgctcaggctgaagtgcgttcactgctcactgcagcctccaccttctgggctcaagcaatcatcctgcctcagcctcctgagtagctgggattacaggcatgagccacccgcctgtcccaactctttatgttcctcactgaacccttccctgtttcttcaaatagccatttttacagtctagtttactattttattttgcttatttttcccccaaactggaatgtaagctctctcaagccaggaattttgtttttttagctcacaattctatctctggcacctaaagcagcgcccagcacatagtaggtgatcactagacagttgattcactgagagaacacagagggacacctccctaggtctcagtctaggtggccaagacaggaggccccaccagtgactgtgccttcccctcagggggtccgagagctggcgtgtgagagtggcagcccctgcctggctccgctcagccatctagggcacccctggcaggtgctgtgccttgcctgggatggaggagtctccgtccacctctggctgggtaggggctaaggctgcggggcagaggggcatctgctaaggggcacaggccaaccgggccccagggaaccgctggccacctgagatggcaggacaaactcgggcaggcctccccccacccctcacacctggctcactggtcccaccgggcggtgaccttccccagggtcactgccctttcttggccctactcctggggatccaacccgctcccaggctgtcgctagctccctcccgatcctctccctccccttcatcctgcccagacccctaccccaccagacccctcacccgcccttggtcagatctctctcctaccccgctcccccacccccatccccacttcccctcggtcttcaccccgccccagacacccccagtccctctccctgtcctccatgcccaccccgcctttcctccctcgggcccctgtctcccgccctagcccccgcccctgccccagccctggctccggccccggtcagtgctgcggctccggccctggccggcaggggccgctcctcgcggcgcccggggccccgccgcgcccgccgccgccgcccgcctccccgccccttccccagccggcgctcccgttacgccgcggagccgggagccggagcccgagcccgcggcggcggcgggaggcggcgagggggcgccgcggcggcggcggtggggcctgcggggcgggcggccgggcccggccaggccgcgatggcgaccaagaaggcaggctcgcggctggagacggagatcgagcgctgccgctccgagtgccagtgggagcggatc

SEQ ID NO: 12869 - DNA, 2300 bp, Homo sapien
tctcaaaaaaaaaaaaaaaaaaaaagtttctcccagcaaaggctaactggaatttatttttgtttaaagacaaatacttttaatgtggataaaataaaagttggaagtatgcctttcatgtggcaaactggaaattagtggttagtactccattgcagcattaaataccaattctttacaatagggtgcacatatcagatgctgtttttcccttaacctttgcacttttcattgaaaatgttttcaaatcaaatcttgttttattgggtttcacatgattggactaatacttacatatatgcttctttttaaggtatttagacattgacaattagttatttccttatgagccatagctttgaaaaaccattttagaagaaatttccattttttaaacaaaagtgttgggaggccgaggcgggcagatcacgaggtcgagaccatcctggctaacatggtgaaaccccgtctctaataaaaatacaaaaaattagccaggcatggtggtgggcacctgtagtcccaggtacttgggaggctgaggcaggagaatggcgtgaacccgggaagcagaacttgcagtgagccaagatcgcaccacaccactgcactccagcctgggcgacagagcgagactccgtcttaaaaaaaaaaaaaaaaaaaaaaaagtgattttttaaagaaaagataccgataatttgtctttgctgtagatgaatgccacgtttttatatactaggactattactgaataatactgtttatttctttagatcaacgaatatattaaattctgtcttttttgttcaaataaacgctgtgagatgattgggaaggctgtgtgttgaagttagatgcaaagttggaccttgtacagtgagcctcttgtgagaactgagccatgaaagataaagcctgtcattcatgtctgccttggcctgtgcccagctttattagtaaaaaccattcagtttttactaatgatatctaccagtatctaaagagaaataccttcatcctctagaagaaaacaaggttacccaaagagctcacttaattccttcctttttccctgaacccttggttttaagtgaagagtaaaatgtactagatatgacactctctctgagtattactgaggattttgtggaaaaggcagtttggtactttatttccagcttagctgcagacttggtgaccctgagcaaatcactcagcctccctttgcctccatttcttcatctgtaaaatggggttaacctgtgcctccctgtctcaccagcatactgagggatcgattaaagaggattaaaaaaatccataaggtacactgattccaaagatgggtagaatgatatttaataatgaagactttctgttatatagcaatttaattttaaaagtatctttaccaggccaggtgcggtggctcactcctgtaatcccagcactttgggaggctgaggagggtggatcacgaggtcaggagatcaagaccatcctggctaacacggtgaaaccccgtctctactaaaagtacaaaaaaattagccaggcatggtgatgagcgcctgtagtcccagctactcacgaggctgaggcaggagaatggcatgaacccgggaggcggagcttgcagtgagccgagatcacgccactgcactccagcctggggggcagagtgagactctgtctcaaaaaaaaaataaaataaaagtatctttacccacttctctgtagtgaatattgactagcattttgaagtaggaactaacaaagtataaaattaagtagattttttatatttatgggtattgttctagtacaaatttatggtgtacactgtcggtctgagtgtgggtttaaaatatatcattgtgcttggctaatttgtagaatgtcttatttgaattgacttcatttatttcagaggaatgcatagatgatcagatcaaactgtcgtcatagcagtgttttcagcacatacgagaatcttagagtttaggagccttagagctcacccagtgcaatttcctgccggaagcagattccttcctggtgacctcaccaacaggtgcttgtgcagccttttcctgaaaactttttgggaaagtgggggctgctacctcactactttgatgtgtaccttttgttcaagaactttctaaaacttggagctaatcatgggttatttcagaagatgtaagcattttaagttttttattgaattccatccttatttaaaaggcctggttatgtaatattttctgttttttttttttttttttgtatggtttccc

SEQ ID NO: 12870 - DNA, 2300 bp, Homo sapien
aagcaacctgaaggaacttgcaaggcttctgtgttttgtctttcacagcagtcgaatccaggagtctgcaaactatggcctgtaggccaaatctggctcattgcctgttttttaactgcccttgagctaaggattgtttatatatatatatatatatatatatatatatatatatatatatatatatatatttttttttttttagacagagtctcgctctgttgcccaggctgaagtgcaatggtgtgatctcggcttactgcaacctccgcctgccagattcaagcaattctcctgcctcagcttcctgagtagctgggattacaggcgcccaccaccatgcctggctaattttttgtatttttagtagattcagggttttgccatgttggccaggctggtcttgaactcctgacctcaggtgatccatctgcctcagcctcccacagtgctgggcttacaggtgtgaaccactgcgcctgacctgtttttatatttttaagtgattcaaaaataattaaaagaagaatatattacgatacatgaaaactatgtgaaattcaaatttcaatgtccataaaaaatattctattggaacacagctacttcttttatttattgtctatgactgcttttgcgctacaatggcagagctgagtagttgtgaaaaaggtcatacagcttgcaaatcctaaaatatttactatctggcccttaatagaaaaaagtgtgctgactcctgatccaatccatgcttagtttaaaagatcacatctatctgaattacgtccaactgtacatctttaagtttctgctttttcccattctcgtgtctgctactagaaatcaggttccctttagttctatccttgcagcaggattcctgccctgctatctctctcctcttttcagttcatcactgtgtactaaaaaaaatctgcactcttcagcacagcatccctagttccccattatcttaccacacctcaccttgtcagctgtatctcttacatcatactttcatctaaccttatcaatcacttaacccacccttgccttctctgctgtaggccaatgctcacagttactctctctgtgtggaatgtctattgctggtatttctctcttatccatcctttacgttggttatctcaaatgcctccttgccctaaaagctttccccagttcctcgtctgggaataattattgccatccgtgcgagattctctaacgctttgtacgactgctttatttcaaattctgctttatagttcttttgtgtacacacacagattgtttctcacgttctattgaaagctgcttaggggaggaattgtattctattttgttaatctctgcatcctttcggcgcctagtaagagtcttgtacgaaacagaaatgtctctccttcgtaaaattcctcatcgggagctgggactgtgaatttttgtaacgtttaagaactatctgttatttaagaacaaacactctgcttaacttgtttagggttcactagagcgagtaagacctttttagggcacgccgtctcgctggttgtcacacacgcatggatcgctgccgggacccttaggtttgtctgcaaacacgtgggtgataagcgctaccctccaggcccctcctctgtccacggtgattggcggaccaaacgttccaatcatccctccccgcctctttcggcagtagccaatcagagaccccgagcgcctcctgactactagacactgtttactaacagatcgaagctggggaataaggggtgtgaccgttctggggaggtcagggaagggaaggtcttgactgcgagtgcgcaccagaggaaatgggcggggcagagctttgggtctcaccaatcggagtggcggcgctcctccctctcctgcctccccgccaagcaacaacaattcgaggagcgaggcggggaggctcgtgaaacgtcacagcgtactgcccaatgggaaccggcgttggcagacgcgcgcgccctgtgtccaatcagcgaaggcggctcgaatggctcccttaccttgctggctgtgggcggagcggcctgaggaggcggcggtggagcagggggcggtttggttgcgcggtactagcggtgcccgccgaagggggaggaggcgaggagcgagccgtgcggccagagcgggaaagagactcgtctttgcgtccgagttctggagccgccgcaccccgactcctggggccgcggcagcggctgcgaggggacgggcgtccgctgtctcctgggttcccctcgtagcgacccgcgggatcg

SEQ ID NO: 12871 - DNA, 2300 bp, Homo sapien
caccgtggctcacgcctgtaatcccagcacttggggaggctgaggcaggcggatcacctgaggtcgggagttcgagaccagcctgaccagcgtggagcaaccccgtctctactactaaaaaaaaaaaaaatacaaaattagctgagtgtggtggcacatgcctgtaatctcagctactcgggaggctgaggcaggagaatcagttgaacccaggaggcgaagattgcggtgagccaacaccgcaccattacactccagcctgggcaacaagagcaaaactctgtctcaaaaaaaaaaaaaaaagagtttaacataacaggtggcagatgggatctctctcctttgtgagcctggcctcaatttaacaactaccttttgattaattctatttcattctctggaaacatgacaccatgacaccaaacagagcaacttagacagcagggctctgcaggaaagctggggctggagaacacacgtgatgggtagctgtggtcattatggaccttcgcagagcgttgcctgagggtccagcaggtcagagatggcaccctgggtgggtgaggctgcatgacatggggtttttgattctataataaaagagatctttcacttttcactttaaccctttcatttattcattcactcactcattccaacattattgaatacttccaaaaaaagaaaaaaaaggaacaagatgcatgataacaaaagagaaaaagaagcaaaaacaaaaaaccaaaaccaaaatgaacaaattaaaaaaaaaataggctgggagcggtggctgacacctgtaatcccagcactttgggaggccgaggcgggcagatcacgaggtcaggagattgacaccatcctggctaacacggtgaaaccctgtttctactaaaaatacaaaaaattagccaggcgtggtggcactcaggaggctgaggcaggagaatggcgtgaacccaggaggcggagattgcagtgagccaagatcgcaccactgctcccagcctgggcaacagagtgagactacatctaaaaaaaaaaaaaaaaaaaaaaaggccaggtgcgatagctcatgcctgtaatcccagcactttgggaggctgaggcaggcggatcacaagggcaggcgctcgagaccagcccagccagcatggtgaaaccccatctctactaaaaatacaaaaattagctgggcgtggtggcgcacacctgtattcccagctactggggaggctgaggcagaagaatcgctcgaacctgggaggcagaggttgcagtgagcggagatcgtgccactgcactccggcctgggtgacagagcaagactctgtctcaaaataacaacaacaataaaagttatacaagaattttcgactgcacgaggttcagtgctccacgttgtccaagggtcaattgtatggggtccaaaggtaagtcctgatggctttgaagcagatcaggagaaaatcatggtcatagttactatcttttgagcactttctaagtgctgatactgttctagtgcataatgcttattatctcagtcaatcgtcagagcagccaagcaagataagtgaggaggaaacaggcctaaaaacttaccaagacctctaaatgtgggtggcagaatgcagatccaagctcaaaacatcacccttgctattcacagtgtggcccacggaccagcagctgcatcttgtgggagctttttagaaatgcagaatctctgcctgaccctagatcttctggatcaagcctgcactttcacaggatcccctagtgatcccagtgcacactgaagtttgtacagcacagatggcgattcaccagatcggctgcacattggaatcacttgagggatttcaaaaatccttagtgcccaggccatacacccctagatcaattacatctgcatttctgggtctgtcacccaggcatcaggatttttcaaaattacccctctgttgagccggggagagcaggttaactcttgcagggagaactgggcttgcagggtccagccagctgccagcagctctgcagctttaagaactggggcgggctagctgccgaggagaccacgctgctgcatgggccacgtgagctcaggctgtgggagcggatggagctgctacagtcagcgcttggggctggcctcagcttgtagacccgagccctgcagaacaaccccccgtggcgcaggagagcagaagaaagggggcctttatgcccttttgagggaagcacacattctgcaaggccgtggaaacaaagggaggaactgtttgtagccctcg

SEQ ID NO: 12872 - DNA, 2300 bp, Homo sapien
ttaacataacaggtggcagatgggatctctctcctttgtgagcctggcctcaatttaacaactaccttttgattaattctatttcattctctggaaacatgacaccatgacaccaaacagagcaacttagacagcagggctctgcaggaaagctggggctggagaacacacgtgatgggtagctgtggtcattatggaccttcgcagagcgttgcctgagggtccagcaggtcagagatggcaccctgggtgggtgaggctgcatgacatggggtttttgattctataataaaagagatctttcacttttcactttaaccctttcatttattcattcactcactcattccaacattattgaatacttccaaaaaaagaaaaaaaaggaacaagatgcatgataacaaaagagaaaaagaagcaaaaacaaaaaaccaaaaccaaaatgaacaaattaaaaaaaaaataggctgggagcggtggctgacacctgtaatcccagcactttgggaggccgaggcgggcagatcacgaggtcaggagattgacaccatcctggctaacacggtgaaaccctgtttctactaaaaatacaaaaaattagccaggcgtggtggcactcaggaggctgaggcaggagaatggcgtgaacccaggaggcggagattgcagtgagccaagatcgcaccactgctcccagcctgggcaacagagtgagactacatctaaaaaaaaaaaaaaaaaaaaaaaggccaggtgcgatagctcatgcctgtaatcccagcactttgggaggctgaggcaggcggatcacaagggcaggcgctcgagaccagcccagccagcatggtgaaaccccatctctactaaaaatacaaaaattagctgggcgtggtggcgcacacctgtattcccagctactggggaggctgaggcagaagaatcgctcgaacctgggaggcagaggttgcagtgagcggagatcgtgccactgcactccggcctgggtgacagagcaagactctgtctcaaaataacaacaacaataaaagttatacaagaattttcgactgcacgaggttcagtgctccacgttgtccaagggtcaattgtatggggtccaaaggtaagtcctgatggctttgaagcagatcaggagaaaatcatggtcatagttactatcttttgagcactttctaagtgctgatactgttctagtgcataatgcttattatctcagtcaatcgtcagagcagccaagcaagataagtgaggaggaaacaggcctaaaaacttaccaagacctctaaatgtgggtggcagaatgcagatccaagctcaaaacatcacccttgctattcacagtgtggcccacggaccagcagctgcatcttgtgggagctttttagaaatgcagaatctctgcctgaccctagatcttctggatcaagcctgcactttcacaggatcccctagtgatcccagtgcacactgaagtttgtacagcacagatggcgattcaccagatcggctgcacattggaatcacttgagggatttcaaaaatccttagtgcccaggccatacacccctagatcaattacatctgcatttctgggtctgtcacccaggcatcaggatttttcaaaattacccctctgttgagccggggagagcaggttaactcttgcagggagaactgggcttgcagggtccagccagctgccagcagctctgcagctttaagaactggggcgggctagctgccgaggagaccacgctgctgcatgggccacgtgagctcaggctgtgggagcggatggagctgctacagtcagcgcttggggctggcctcagcttgtagacccgagccctgcagaacaaccccccgtggcgcaggagagcagaagaaagggggcctttatgcccttttgagggaagcacacattctgcaaggccgtggaaacaaagggaggaactgtttgtagccctcgtccagacgccccaaacaaacagtaagtcagaagggaacagagcacagcacagtccctccctccgccccaggcagtatccaccttgccccgccccacctaaggagcccaagggtattctgggagcccaccccaggacaatggcagggcaaaaccagtgagcaaggcagaaaattcctgaaattctccactgaggcccagctgttcctctccttgaaaagtcaaggcttggttcaagccagatagcacctgaggacagaacatatcaggtattggtagtgtttctcctctgttctctctcctgcaaggc

SEQ ID NO: 12873 - DNA, 2300 bp, Homo sapien
tttcacttttcactttaaccctttcatttattcattcactcactcattccaacattattgaatacttccaaaaaaagaaaaaaaaggaacaagatgcatgataacaaaagagaaaaagaagcaaaaacaaaaaaccaaaaccaaaatgaacaaattaaaaaaaaaataggctgggagcggtggctgacacctgtaatcccagcactttgggaggccgaggcgggcagatcacgaggtcaggagattgacaccatcctggctaacacggtgaaaccctgtttctactaaaaatacaaaaaattagccaggcgtggtggcactcaggaggctgaggcaggagaatggcgtgaacccaggaggcggagattgcagtgagccaagatcgcaccactgctcccagcctgggcaacagagtgagactacatctaaaaaaaaaaaaaaaaaaaaaaaggccaggtgcgatagctcatgcctgtaatcccagcactttgggaggctgaggcaggcggatcacaagggcaggcgctcgagaccagcccagccagcatggtgaaaccccatctctactaaaaatacaaaaattagctgggcgtggtggcgcacacctgtattcccagctactggggaggctgaggcagaagaatcgctcgaacctgggaggcagaggttgcagtgagcggagatcgtgccactgcactccggcctgggtgacagagcaagactctgtctcaaaataacaacaacaataaaagttatacaagaattttcgactgcacgaggttcagtgctccacgttgtccaagggtcaattgtatggggtccaaaggtaagtcctgatggctttgaagcagatcaggagaaaatcatggtcatagttactatcttttgagcactttctaagtgctgatactgttctagtgcataatgcttattatctcagtcaatcgtcagagcagccaagcaagataagtgaggaggaaacaggcctaaaaacttaccaagacctctaaatgtgggtggcagaatgcagatccaagctcaaaacatcacccttgctattcacagtgtggcccacggaccagcagctgcatcttgtgggagctttttagaaatgcagaatctctgcctgaccctagatcttctggatcaagcctgcactttcacaggatcccctagtgatcccagtgcacactgaagtttgtacagcacagatggcgattcaccagatcggctgcacattggaatcacttgagggatttcaaaaatccttagtgcccaggccatacacccctagatcaattacatctgcatttctgggtctgtcacccaggcatcaggatttttcaaaattacccctctgttgagccggggagagcaggttaactcttgcagggagaactgggcttgcagggtccagccagctgccagcagctctgcagctttaagaactggggcgggctagctgccgaggagaccacgctgctgcatgggccacgtgagctcaggctgtgggagcggatggagctgctacagtcagcgcttggggctggcctcagcttgtagacccgagccctgcagaacaaccccccgtggcgcaggagagcagaagaaagggggcctttatgcccttttgagggaagcacacattctgcaaggccgtggaaacaaagggaggaactgtttgtagccctcgtccagacgccccaaacaaacagtaagtcagaagggaacagagcacagcacagtccctccctccgccccaggcagtatccaccttgccccgccccacctaaggagcccaagggtattctgggagcccaccccaggacaatggcagggcaaaaccagtgagcaaggcagaaaattcctgaaattctccactgaggcccagctgttcctctccttgaaaagtcaaggcttggttcaagccagatagcacctgaggacagaacatatcaggtattggtagtgtttctcctctgttctctctcctgcaaggccctttcagtccttgtcactgcccttgagaactcccaggtcacatgaaggcaaagaaagtaaaactgaaactgcctttgagccacaggcttgctggggatgaggtgacaaagctaatcgaggtggcaattggggaaggggttctgggctgccgcaggcacacaggccagagcttcgtggatacctgcagggcccaaaggtccctccctgttttgaagagtgagtgatggctatgaggtagcggccaggctgatcacccctgcgttggctggaggcagaattctgtaaatcctcgccaagtc

SEQ ID NO: 12874 - DNA, 2300 bp, Homo sapien
catgggagtcatcctgattggaccagcttagatctcaggaatccatccctgcctgccagggggatggaatgagctgactggcttagcttaagtggcatgctctgtccttggaagcacatggaccctcaaatgaaaattgggagctctcgtgggaagtggggtttgtcagggagacagccacaaagatcacaacaggaaagttgcttttgtgaaataaaaaggcaggaaggcacaagcagtatatgattgtagcccacagatttgtttggctagagcagagcattctttgttcttgaaagtgagttgtgagaaatggagcatttgggagggagttgggggtgctggaaggggccttgtggggagcctgcggggcctcaggctttgtgtgagtctgggagttttagtgcagcatttaccggattactagcaaattcaggaaatgagcctgtttcctcctattatagagcctaatcctttattcattaaatggagtatttactcagccttaaaatgttcagcgtggggggttagaaaagaagggagcccacagctgctgagagcccactgtgtgctgacactaggctggaggcttctcctacgttttctcttttaatgctcccaacctccctctctgccccatttcacagatggagaaggaaaggcaagtgacttgtccagagccactctgtcaaaaggggacttgagtcctcagggctgttgactccaaagctgacaagcaggtaaccacattggggttttctccaggacatgagaattcctttgtcctgtgtatcacatcgagcacctgggctgatgacccttctgcatggtgtacccacctcacagcctgagcttatcctcagctacatccactatgcccagagacactgatgaatgcatctgggagtctggagggaggggtccacttgtgagttgaggccccatttgtacccgctccaccaggactgaggacaggaagtcacgcctaggagaaccaagacggggttgacaccaatggtacccacagagcatccttgtcccaactgtcaccaccatccccctcctcctcctcacacctgcatctccagcagttattgagcgcttgcaacatacccggtgctctctcagcactttacatacatcatctcctggaactatcccaaagcttttttgaagcaggtgccattatcctccccattttgtagatgggaaagctaagaaatgaccatggaggccgaggtcacagcaaggggcttgtccctgtaaggtctatacactcatccccatttccttttccctctttaattttcttttttatttttggagacaggctctcaccctgttgcccaggctggagtgcggtgacgtgatcatggctcacagcagccttgacctctgaggctgaagcaatcctcccgcatcagtctcccgagtagctgggaccacagctaccatgcctagctaatttttgtatatttttgtagagacagggtctcaccatgttgctcaggcttgtctcaaactcctgagctcaagccatccaccctcctcagcctcccaaagtgctggaattaaggcgtgtaccaccatgcctggcccatgccccattttaaaaatgagtaaatttaaccttcgagaggttgcccactaatctcacatggctggcaagtggctgagttgggatctgaactcaagttctgtctgactaccatggatgggctgagcactgctgtgaaggataattgttgagttaaagaaaacctttggagaagtgatttggccttgtggatctttccctgagcacaatttccagcatgttcctgagaaagcttaggatcctctttgttggaataagcgcaggtccttcctcggggcatctatgcccactaacgtcacagtcatcctccactcccactttttcccctttcccgaaaacatctcatatggggctccgagcaagccctgggaggagctgcttcctgggtgactgtgtcccccggaggaatgtacacctgcagcaagacgagtgggacatttttgaagcctcaggccacacacattgtccccaagacaaggctgatgcggctagtaagcctcttgtttttgaaggtcacaaacaacaaaaacatggaaactcagaatggaagggggcccatgagagcaatcttgaggcataacaacagctgcagaaggtgactgcagggaagcggactgtgctcctattctttatgttctgtttttagctgtgtttttcagagcaagtaggtaccatggtgataggtaccatagaaatagatgga

SEQ ID NO: 12875 - DNA, 2300 bp, Homo sapien
taggaaaaaatatatatatatataatgaatatatatattgggttttgtccacaattcctggctcataactcctaaaattcttggaacctccaaaatgctgtattttgtctgataggttcagggtggggctggtcaccagaaagactaaggtaggattagagggttgggactttcagctccacccctccccgcaacctccagggaggaaagaggggctaaaggtcaagctgattacccacggctgatggtttaatcaatcatgctcatgtaatgaagcctccgtaaaaccccaagaggataggcttcagtgagcttctacatagctgaacacatgtaggttcctagagggtggtgcctaaggagggcatggaagctccgcaccccttcccccacaccttgccctgggcatctctatctgtatcctttgcaatatcctttatttaatttaattaaattaattaatttatttatttttgagacacagtttccctctgtcgcccaggctggagtgcagcgttgcaatctcagctcactgcaacctccatctcctgggttcaagcgattctcctgcctcagcctcccaagtagctgggattacaggtgcccaacaccatgcccagctaatttttgtatttttagtagagatggggttttgccatgttggccaggctggtcttgaacgcctggcctcaagtggtctgcccgtcttggcctcccaaagtgctgggattacaggtatgagccaccgcacccggtctgcaatattttttatgataaactggtatacataagtaaatgtttcctcaaggtctgtgagctgctccaggaaattaatcaaactcaaagagtttgggtataatcaaacccaaagagggttaatcaaactggaagccagttggtcagaagttctggaggcccagacttgcaactggtgtctgtaggggggtggccttggggactgagccctcaacccgtgggttctgatgctatctccaggtggaatggaattggagggcacccagctggtgcctcctgcttgatggtggggagaaacccctacaaatttggtcacaggagtcttctgtgtggatgactgttactgcggtgtgagagcagaggaaacacaccatttaggtagagtttttttctctacacgctcacccactggggatctttgataaatgtaaagctcctatgaacttccaatgaatctggggttggaggaagccaagggttgcagcagggctctttgtccggagatttgagctcgaagcaacgtctaatctgggctgctattctttggtatatttgggtaggagatggctttgttccatatgttaatttgagctgaaatccattgatccccagcgtattcactcaatctgagagtgagtgaacagatccaagatgaagagccaatatcaagaagctgtgcaggcctcttagaaggcctgatgagagtttgagactgggccttggttgagggtccaagtttggtatacctaaacttgctcaactgcataaccgacaacattagacagaacctagccttttgtgaaaatgcagtcagtacttgctagcttcatcacatgaggatgattcagggccacccaccaggatggtgtctgctgaggagttttatcattagcggggatggattgggcccagcacatccatctttgctgtcttcgggattaggttgctgctggtagtcaagcagctgaggttaggtgcatgagatgtgacccagcctggaccaaggtcaaccccccaaggctggctttggtagcaatctgcacaatgagagtactaggctcaatgcacccaaggatccttccagaaatcacgccacacagtttgagattctgttttctgaaaccaccatgccacatggactgtaaattatggagtagcctgagttgtcaaagccttaatccctattctccttcacctcttcctcaaataccatttacaataatcctgcaatttgagtttctgttttagagaaagaaccataaactactcaaccagttctaattggatgctccctgctgaggaaattacattttccttttccatctgcagaactgttgggaatcaaagagctttccaaacctgcctacggggatgccatggtgtgtcccccaggggaggttccagtgttctggccttctccgctgaccagtctcggagctgtcagcagctgtggtacgttgggggataatgggacaatcgatctgccctaggatggagcccagtggggtctagttcttgaaagcatattctcgtagtacaatgat

SEQ ID NO: 12876 - DNA, 2300 bp, Homo sapien
caatttatgaaacctcagtttcctgatctgtgaaatggagagaataaaactacttgttttggagatgaaaagagatcatgcacaggcactaaggacacaggaagcatttacaagataagagcaattgagcctgcagtgagccgccactgtactccactgtactctgggggacgacaaagtgagaccctgtttcaaaaataaataaataaataataaatgataagagctgcaaataagaggatatttggaatgtccaatgacagtgataataacagctaacatctattgaaccctcatgtgtgctgggccttgagctaagggctttacttggtttaactcatgtaatcatcttagccctcatttgaagatgtgtctccatttcacagatggaaacaggcacagagaggttaaaagacttgtccagggtcaccctactagcgcgtagtacaactggaattcaaatgctgacactggctttcaacgccaaactcttcacaactacattcagtttggcaacttttagaaagcagatgtgaatttttatggcatagtcaacccagaaaattccacttgtgaggactttctaaggaggaatttcaaaatgaagaccagcagaggaggcttatccagcctcttagcctgctgggatgttgctggggtagtgcccagtgagaaaagcaaatcctcccgcctccacactccctgtgcctctctctgcctcctcctgctccccggccttcccccgctagggcaccttctgtcctcttacccactgtccatccttctggagattcacctagaggctaagtcacaccgtgtggagcactgagccacctagaggggttagcagaaggtgagatgtttgctctctttctccttctacctcccctgcctgcagttccaatcacccttcatccctaacctgcaaccatctgtcctgacaaccgcccaaccttctgcagactcttgccgtgacagttccagacattcatttcacaaataggaatgggggcaccctgctttgagcaggataactgggctgagagcaagggccctgtagagagacagctgtgtgccagcgaccccagcggcagtgcaatgctgggaaaggggctaagggcacacagcagggttcagcacacattacctggggcaaccaagaatgctccctaggggaagtgacttggggtcttaagatgggggcaggagttcaggaggtgggaaacaggaggtctatagagtggggagggccacaggagccaaggtatgcaattgtgaaagagcagaaggaaacagccaagggtggcttgggacaggatgtgggtaggaggagggcttctgtacccaactgcctggatttgaatcccgaggcctctacgtaccacctgtgtgaccttgggcaagttgtttgccctctctgtgcctcattcccctatgtataagatgggaataacaatactgtctacatcatagagccctgaacatcaaatgagttaatgtaattaagtacttaacaacagagcccagcacacagctgtgctcaatagatgcgggctgggactattattactattatctgtgaggatgtggggcagaggggcctaaggcctccttgaattatcaagaaggtcagtaggaggtcctctaagccatccctgcggcagacaggctccggctctgaggagcaccgggcagggacccaggaggctgcaaacctaagtgcagatccccaggctgggctggacaggctgaggtcagggcaggtgcagagaggcccagagctgcaacaccgcacttcatttattgcgtggctactgatttgcccgtgctgggcacacggacgtggtaaaggacagaagggctactcctggactgttctctgggcttctcaccctgcggttgtggtgagaggctgctgacagccagggcacccgggagtgggcgtggctggagaaggacccctgtccttttacagctaggcccactctgagccccacgcagtgttctagagcctgtccccccagggcaggatggtagtgggggcaggggtccctgagccattgcggcccttcccggcaggcgccaagcctaggggctgtggtcagcgtgaaaggcagggcatggaccctcactcagggctgcgtgtgcccgacgtgggtggggggggcgtggaatcggagcacaacttggccctgcgttcccaggaagggacccgaagacctccccaggccaccccgccatctgcgtgcgcgctggcaagaggaggggcgcggggtaatggtggccggcgccacagcccc

SEQ ID NO: 12877 - DNA, 2300 bp, Homo sapien
gctggaggagtggcccaggagaggtgtgcaggccctggaagggatggcctgccctctgtagggaatggtgccagccttcctgaaagtctgcagtggggtggcatggcagagccacactcaggcaagcacctgttgtggccaggtgggcaggtgccctcagcaccataaaccttgatttttttcctttggggcagatgtaaatttgaggcaaatgacacaaagaagctgaagaatagcaaatgtccaggagaagggagtgcccccttccttcccaggcccctggcacctgctccctgtgggtcccctgacgtgacaccttcaggtgcgtgcccttacatgtgcgcacacatggccctgaacggtcctcatctctcttcccgtggcctcggcctcggctgtccacatgtgttccagaaagctctgtgcagtaatagaggagggccccccgcaacctcaacctctggttcacccagcacagccttttttttgtctgccctctatactggcgttctgtgtgagatttcctttgtgaagttgtttgaagctgcagccccaggcctcataaatgtagataagcagagtatcatctgttgatggctgcttgtgctgtgcccagcactccgttggtgaagtgaggcttcctcactggagcgcagagggagtcccagagctcctccttcctgagggcgttgggcttagctttggcatgggattgttttgctgcatcgtttttcttagatggctcatctgggatatacctggtcattggctttttaattttaacactgccatttcctttcagtgtcgcggccaagtagcttagagagcagtagaaacacatccagcaacagctcacctcttaacctaaaaggtaagtcttgtgcttctgtgtacttttaaaaattgatttgggccaggcacagtggctcatgcctataatcagcactttgggagggccaagcaggtggatcgcttgagcccaggagttagaaaccagcctgggaaacatggcgaaaccccatctctaaaaaaataaaaaattagctaggcgtggtggcgcatgcctgtggtcccagctactcaggaggctgaggtgggaggctcgctcaagcctgggaggtcaaggctatagtgggctgtgatcatgctactgcattccagcctgaaaaacagaagtgagaccctatctcagaaaaaaaaaaaaaaaaaaaaaaaaaaagtgtatttggtggtttggctctggggtcatattattataatttttaaaatacatgactaggggtttcaaatgcattctgacgcattcagaggccacacagtacagtttcaggcacaggctgggagttagaatgggttggggttcagctcccttctcccccgagcagcactgagaatgcaggcatgtcacaggtcccgagtctcatttacttcatctgaagaatggggagagtaacactagttccattctactgtggccacagaacaaatgtggaggattttgattctcggaacatgtatggtttgtgttagggacagaatgtggtctttcttcatgaaccttccctgtacatttagcccctagcacatagcaggtgctgaataagctttgaatacgtgcatgagcgagcgctgacaagggcagtgccttacagccagtaataacttaaacttcagcagaagctttccacttttatctcaaagtattttgtttttaaagccaaagtgaaattcaaaaggagtccagactttcagcctggtgggaataagccctgggttttcgggcaagggattttattctgatagtttgaagtgggcaaaggcagcacgaagcctctagaagccaccagagggctgccaagactgatgagggtcctctgtctcctgccctgacacccaggctcctccgagcagctccatggccggtctgagagcttcagcagcgaagacctgatccccagcagggacctggccactttgccccgggaagccagcacaccgggacgcaacgccctcggccgccacgagtaccccttgcctcggaacgggcctctcccacaggagggtgcccagaagaggggcacagcccctccctacgtcggagtgcggccctgctcggcctcccccagcagtgagatggtcaccttggaggagttcctggaggagagcaaccgcagctcccccacccatgtgagtgatccggacacggacttggcccgtctctcttccctctctgtctcttcctggctcaagatcatagctgcagaaaggatggggtgggggtggcgtggcctaggcacagg

SEQ ID NO: 12878 - DNA, 2300 bp, Homo sapien
ctttaagctgagtcctgtacgggagtccaacaccaaatgaaggtggaaatgggggacccattcttccttcccctccccagggggctgagcgtgtagcttctacttacatacctccagtggtggggaattcgctacctcccaagcatcacagttctggaagcaccgacctctcctcttcatgccttcaagcacccttccaggctggccaggaagttccggtggcccaggtggggagcgttcatttcaagaaggtcccttgctgtcctcacttggctgcagttgcccatagtagctctgaggcgtatttagtcttggaaattgttagaagcacttgtcattggattcgagcatgttataaatttctgcagaagggagacagtaaacagtacctgccttctcaaaaatcaaaagctgctttggtttaatttttgaaaagcaaccctacaagggtgagaaaataatcctaaaaagaccccttgaagtttacatcgatttcagtttacttgtgaaaggctcggtaagtgtaggagctggcatcacctcctacccctatccacggtctaaaaagcttgatgacattcttacagtcttctacttgagtaaagaactgtaatgaaacaattgaatgaatgggagtcttacatctttacactgagtggaggctaatccaacagaagaaatctgcctcgtgtgctgggtgcatctccctgagcagccagatttgcgatcagtcagctaaccataggaacttttttcataaatgttctgtttcctctagcttctcttaggaaaaagaagggaaaaggatttgcattgcagtacttgaataaacaatggtgcttttgggccgttgatcgctatcacggtttccttatactgaaatttacttatttttttaagagagatgtgcatttgtttatttcacattttcactgctcagggaggggaccgattctgtttttaggctattcgctatcaccaagtatgtttttggctcagtttcaaacatatttgctagcaggtgttttctggacatctgctgtttgcagagcacctcagcccttggaaccaggtgccctgtggacccaggaaacctgagtgaacttgccttggtggcacagtgagcagaggaaccccaggtgtctcttctgcaggctcctgaggtggctcagctcagcacctgctgggtgctgggggtggcagggacaactgaaatgccatccctgccacgggggttcatagcacagcagcgtagacatgtttgctctcgagatagggccgctggaggagtggcccaggagaggtgtgcaggccctggaagggatggcctgccctctgtagggaatggtgccagccttcctgaaagtctgcagtggggtggcatggcagagccacactcaggcaagcacctgttgtggccaggtgggcaggtgccctcagcaccataaaccttgatttttttcctttggggcagatgtaaatttgaggcaaatgacacaaagaagctgaagaatagcaaatgtccaggagaagggagtgcccccttccttcccaggcccctggcacctgctccctgtgggtcccctgacgtgacaccttcaggtgcgtgcccttacatgtgcgcacacatggccctgaacggtcctcatctctcttcccgtggcctcggcctcggctgtccacatgtgttccagaaagctctgtgcagtaatagaggagggccccccgcaacctcaacctctggttcacccagcacagccttttttttgtctgccctctatactggcgttctgtgtgagatttcctttgtgaagttgtttgaagctgcagccccaggcctcataaatgtagataagcagagtatcatctgttgatggctgcttgtgctgtgcccagcactccgttggtgaagtgaggcttcctcactggagcgcagagggagtcccagagctcctccttcctgagggcgttgggcttagctttggcatgggattgttttgctgcatcgtttttcttagatggctcatctgggatatacctggtcattggctttttaattttaacactgccatttcctttcagtgtcgcggccaagtagcttagagagcagtagaaacacatccagcaacagctcacctcttaacctaaaaggtaagtcttgtgcttctgtgtacttttaaaaattgatttgggccaggcacagtggctcatgcctataatcagcactttgggagggccaagcaggtggatcgcttgagcccaggagttagaaaccagcctgggaaacatggcgaaacccc

SEQ ID NO: 12879 - DNA, 2300 bp, Homo sapien
taacactgaagaccagcgacaggctaccctctgagtgtggtgtgtgcacaagcctttcagggggcacattcacaagtacctgttgtgtccccttcagatgcaaaaaaaaaaaaaaaaaaaaaaaaagacctggtgcagtggctcatgcctataatcccagcactttgaggggccaagacaggaggatcacttgaggccaggagtttgggactagcctgggcaacacagggaaacccccatctaccaatatatatatttttatttagccaggtgtggtggcacgtacctgtagtctcagctgctcagtcgacttgagcccaggaggtcgtggctgcagcgagctatggtcataccactgtactccagcctgggtgacagagtgacaccccatctctaacaaaaataatgttcacgcacattgttcagggactaacacactgtcattctttatggggataagattagatagagtcagcaccgtaagacagggtgagaaggaaaaaaattagaggcctcacatgcaagtaaatgagaagcttaactttttttaagctagaggggttctgttgcctcaggtttttatattggctcctgtttaatttttggacatttgtcatctcaacttgtattactctttaagtggaattaattaactataatcagtctgagttaggaaaactttcagagaaaaaaatgcttgactggtccaaagtgatccgtgagcaagcaggtctgtaaaccatgatcatgttcactagcagccaccatgtcttgggtgctccctctgggcccagcaccctctaactactttatgtgctttatgcatctcattgaatcctaacgaccctatcaaggcaggtggacgtggcctcccctgtgtagaggtgagaaagtgaggctcagcagtgtaaaacatttgctttgggtaagtgggacccaaatgcaggtcggccgcactccggagcctgagctcttaactgcatgcacttaactgcatggactgcctccagttaaagctctctgggtccctgaagatgccgaacaagagcctagccctgaactggccacaaggacaccagccttgaataagttggtcccttattctgtggtgtgagccactgtggccaccaggtggtgctgtggaggaagaaataatggaaatcctggtatcaactttaatcctacatcagaaattggttaggtcgattaatgttactataagacagtttaggaagttagcccaattgtctgctttgttaagacactagaggctaaggagtggaggattggagtggaggatgtatatagaagatctaaaaggaaatcatgattcttggtgttgaagggttttttttagtatgcaaaggaggtatttaaattattttaaaactcatcctgccgaaagattattttagagatacagaatcattagtgaatacttcaggtagagtatttgattacagcgccctgaaacggatcattgaatgttcccaaggtctttgagtgggaacgggaggattgtgtgagctgagctgttagggaccccatcattaaaatggatgagtaagagaagttgggccctaaattaataagcattagtgtttaataatttggcacactgaaaccgaaaaatcatccagaccattggctccttgggcagtatgtaattctcctcacacgctgaggaaataaattgttggcgttcaggtgcctttaaattaattgagtcagagcacagatgattactgagccctgattctgttcttgagtactgtgtactgttttcatctttcctgggcaagacgggattctgatttcttaagtacatttagctaatttcgattcatttgtcattattgttcatttcatttatttgtgttttctttttccttcctcctttgggttatccgattgataacaatttagcacctccgcgcaaaaagagtccctttttgaaaagcaaaaacaaggacaaagacaagtctccaacgacccacccagctctctctaaacgcctgcggttctggtcttcctccgacatcccatcctctcctaacgagcctctctctttctccgacattggagatttctaatccctttcctttatcatgtgtctgtattgtgtaccctccttcatttccgaaattcaaacaaacaaaaaaagccagcgtctaaaaggccagatggccgatagcggacccctcctcctgcccccaatttcaagcttaaagtagccagcgtggattctgatttcaaaatagaagatgagttgtcacactccctggaccatttcttcagca

SEQ ID NO: 12880 - DNA, 2300 bp, Homo sapien
gggctgggtcttttggttctgcagattgaaaagttacaaacccagctggagagagaaaagcagagcaaccaagatctggagaccctcagtgaggagctgatcagagagaaggagcagctgcagagtgacatggagaccctgaaggctgacaaagccaggcaggtaggtgcctccaccactaacgcctctcctagaacccctgcctgcaagacggagagccgggattacagccattcctggtactgtattgtggatgcatggattatccgttacctagcttagccacagcttaaatcagcaattctcaatttcccaactggcggtgggaaaaggtggggtgaattttgcctcccaagggacatttggcaatgtctcaagacatttttgattgtcgtgaccccggggaagagagggggtggtgctcctggcatggagtgggtggaggccaaggatgctgctacatattctgcagtgcgcaggtcaggaacactccatctgcaaatgttcttagtgccccagctgagaaccctggcaaatccgtgtggttttatttgcctcacacggcgggcagtccagggctgatgtagtggctcagggatgccatcaggaaccaggcctcttgcctacagctctgccagccttagcagtggctgctgcacatccctaaggtacaagcaggagaaaggtggagggcttagcatcacagggaaaccctcccaaggatgctccgtagacgtcacgttggccagaactaacgtgtggctacctctgcctgcaaagaatgccagggcaccaagtattttagttttttgtttttgtttatgttttcttttgtttaatagagatgggatctcacagtgttgcccaggccggtctcgaactcctgggctcaagtgatcctcccgtcttagcttcccaaagtgttgggattacaggcatgagccaccatcactggccccaagtattttagctttttggcatctgtagtagaggaataaaaagcccagagaagatggttagaatggtgcatggtaaacagacggacagggccctgcccagatgttgctcacagccaggaaggcacacttccaggtgacaggcaagatgatctcaggagggtgctactgagagaatagggtgctgagggagagaatactgggatacacggctaccttagaatcatcatgccaggatgttttggggaactgaccccaagtataagaaagagccagtgaggctgatagccagaggaaagtactccaggcagagggatcagcatgtgcaaagtgttcacagtcagctgggctaggagcagtgagcaggaggtggagagtagtgtaagcagaggctgcagaggtgggcagggcccggctaccagagaccaagagaaaccgctgaaacttaagtgagggagagagatgtatttacattttaaaatcatcctggctgctctgagtgtattctgacttgaaccatctaagtggtggtgtctgtgcccactcacctgtgtctgtcaagcctctggggaacgcacaggcagtgtctgagcacaggtaggacagccgttcaaggccttctctctcccatccccagtgtgagcccatgtcactgaaataggttcctgcagcagcctgggttgtgcctgttgtgttttcccgtagatcaaggaccttgagcaggaaaaggaccacctcaaccgagccatgtggtcgctgcgggagaggtcgcaggtcagcagtgaggcccgcatgaaagacgtggagaaggagaacaaagccctccaccagacggtgacggaggccaatggcaagctcagccagttggagtttgagaagcggcagctgcacagggacttggagcaggccaaggagaagggggagcgggcagagaagctggagagggagctacagcgactccaggaggagaacgggaggctggccaggaaggtgacctccctggagacagccaccgagaaagtcgaggccctggagcatgagagccagggcctgcagctggagaaccggactctgaggaagtctctggacaccttgcagaacgtgtccctgcagcttgagggcctggagcgtgacaacaagcagctggacgcagagaacctggagctgcgcaggctggtggagaccatgcgcttcaccagcaccaagctggcacagatggagagggagaaccagcagctggagcgtgagaaggaggagctgaggaagaacgtggatctgctcaaggcgctgggcaagaagtcagagcgcctggagctcagctaccagagcgtgagcgctgagaac

SEQ ID NO: 12881 - DNA, 2300 bp, Homo sapien
aaaacctgtagtgtcttcccattgtttttggtataaaaatcaaactccttgaaatggtttacaggacatttcatgattcacaactgaaactcctccacagcgatggcacacactcctctttgatctcaattcttctttcttgtggtctttgcttaaaccactgttctttaaatttcacagagcaaccatcagagttgttaaattaatccgcggggtcgagtgccatcgcggcgggcggagaagcaattaaggaacttctctaatgaacttctggtgcacaacaaaaccatgtagtctcgaaattttagttcctccgcagtcccccattgtgttttatgctaccccgccttccacagtctctagggacccctaaccgacccccttggctctcaggccataatctcacaaccctccccagcccaacggggtccgccagcgctgggctgtaataccactcgccaccagcagatgccgcagccccaacgctgcacagagccaactttcaaaattaccaccgagcctgtcggcagccatttagtgcctgctgtatacttgccaagcgccacgcagggcccttcgggtcaaccctgtaccagttggcccagctgcgaaatgcggcgatcgttagggttaaattagtaaaatggtctacagtgctttgaacaatgaccggctggtggtgtgaaattattaccaggccgagaccagcctggagccggctcctgcctcgtgccgtcccgcaaggaggtcctgcccccgggcttgccttccagccagttggggcctttgccctttttcctgtcgcctgccactaagctgctgctaggaaccccggctggaatttagctcgcctccggcaaagtggtgggggcgggcccgggtcggggaggccacatcacctgcttcctgcaggaacttttagaaggcaggcagcccggaacatggcacggtggggcacggtagggcgcgaggggccgcgcccctaaggcctaaactcaacataaagtttcttctttgccctccagcccagccccagggtcggggcgcgtttatcgcgccgcgcacaagcgtgaggagcgggggtttgcggggcctcttgactgtacctggggctgcacctgccaggagtgcggaaaggcgcagggccgaggtccccaagcccagagcgggcggcagctgcgggcgacctcggagggcagagcaacctcggagggcagggcgtccccgctcccggcacgcaccagtgcccgcgcaccccagctcgcacgtggcgctcgggccccggctgcacgcgcacgcgcgcagggatgcgccacgtgctggggccccacacgcggggaggctgcgctcggcgagggcgcgcggtcccacgggcggggagccgggccccgcgacccacccgcctcgggccaccagtcccctcccagcgccccgcgtagcctggtcccgcgcccgggctcccgggctcccgggctggcaccgcgaggcggcgcgccggtcgcccagggccgccgaggggcggggccgcccgtattgttcctccccgagcggctggccctccccttcccccagacccgggcggggcgcggggccgccgaagccgcggaacgtgggctcgcgcgccccgcctttgtctcccgggcgcgagccgccgcagccccgcgcccgctgctcgctgcggagccgttttgtgccgcggcgcgggggaacggggacgcggggcggggggcgcggagccggcgggcgcagcctcagcatggacgtgacagtctcggagctcctggagctcttcctgcagagcccgctggtgacctgggtgagtgcgcctggctccccgcccctttgttggtgcaccggcttctctctagcccggcgacgggacgccgcagacccgacacggccggggccccgggtggctccggggcgcgagggacgcagcaagtggctcccggccggggttggggccgcgtcctggagtccggagctttgtaactctggagccggcgcccccgttgtgcgtccggcgcgggaccccgccgcgctttcggccgggccaggagccgggcgggtacacctgttcccgctggggctctaggctggctgcctcggggcggaccgggtcccagtggtcactcctgtccctggggtttagccactcccgaaaaggaccccattcttcccaaccaaatatctcatgtagtttttctgaatccctgagaccagccggtggatggcggtgacgggtggggaatggggggcgccgaatgggaaagcgaacagactggggtgggcgcactgat

SEQ ID NO: 12882 - DNA, 2300 bp, Homo sapien
aagaaaaaaagatttttatttcagataaaattaatatttccataattaggatacacacataattagcaaacacacattcttgagtccattatttaaggtttattctataaacgacttccatgagtattagagatcctgaatgtcatctgaatatttgtctacacacttgtgggcagcttctgtagacttttctttgtagaaattccagtttttctgaattcttccttttccttcaggttttccactttgcattattcataaaaggctgggtcattatagtgagctgttaagacattctttcaatgcagaattttctttccagcattttactaccataaggattccagagttcttgcaacatttggtaaaatcttgaacttgtcagaagacctctctctggccttttctctcattattttagggatcaaaacatctttttcgacacgtctgagctgctgctccaaaaacctgtagtgtcttcccattgtttttggtataaaaatcaaactccttgaaatggtttacaggacatttcatgattcacaactgaaactcctccacagcgatggcacacactcctctttgatctcaattcttctttcttgtggtctttgcttaaaccactgttctttaaatttcacagagcaaccatcagagttgttaaattaatccgcggggtcgagtgccatcgcggcgggcggagaagcaattaaggaacttctctaatgaacttctggtgcacaacaaaaccatgtagtctcgaaattttagttcctccgcagtcccccattgtgttttatgctaccccgccttccacagtctctagggacccctaaccgacccccttggctctcaggccataatctcacaaccctccccagcccaacggggtccgccagcgctgggctgtaataccactcgccaccagcagatgccgcagccccaacgctgcacagagccaactttcaaaattaccaccgagcctgtcggcagccatttagtgcctgctgtatacttgccaagcgccacgcagggcccttcgggtcaaccctgtaccagttggcccagctgcgaaatgcggcgatcgttagggttaaattagtaaaatggtctacagtgctttgaacaatgaccggctggtggtgtgaaattattaccaggccgagaccagcctggagccggctcctgcctcgtgccgtcccgcaaggaggtcctgcccccgggcttgccttccagccagttggggcctttgccctttttcctgtcgcctgccactaagctgctgctaggaaccccggctggaatttagctcgcctccggcaaagtggtgggggcgggcccgggtcggggaggccacatcacctgcttcctgcaggaacttttagaaggcaggcagcccggaacatggcacggtggggcacggtagggcgcgaggggccgcgcccctaaggcctaaactcaacataaagtttcttctttgccctccagcccagccccagggtcggggcgcgtttatcgcgccgcgcacaagcgtgaggagcgggggtttgcggggcctcttgactgtacctggggctgcacctgccaggagtgcggaaaggcgcagggccgaggtccccaagcccagagcgggcggcagctgcgggcgacctcggagggcagagcaacctcggagggcagggcgtccccgctcccggcacgcaccagtgcccgcgcaccccagctcgcacgtggcgctcgggccccggctgcacgcgcacgcgcgcagggatgcgccacgtgctggggccccacacgcggggaggctgcgctcggcgagggcgcgcggtcccacgggcggggagccgggccccgcgacccacccgcctcgggccaccagtcccctcccagcgccccgcgtagcctggtcccgcgcccgggctcccgggctcccgggctggcaccgcgaggcggcgcgccggtcgcccagggccgccgaggggcggggccgcccgtattgttcctccccgagcggctggccctccccttcccccagacccgggcggggcgcggggccgccgaagccgcggaacgtgggctcgcgcgccccgcctttgtctcccgggcgcgagccgccgcagccccgcgcccgctgctcgctgcggagccgttttgtgccgcggcgcgggggaacggggacgcggggcggggggcgcggagccggcgggcgcagcctcagcatggacgtgacagtctcggagctcctggagctcttcctgcagagcccgctggtgacctgggtgagtgcgcctggctccccg

SEQ ID NO: 12883 - DNA, 2300 bp, Homo sapien
aagcctgcagtgagctataatcataccactatatctcaacctaggtgccagaacgagaccccatctctaaaaaatacacatacccagcccgcacatcagaatcagaatcacctagggcaagacctgggcatttactttgtaaagacccatagatagctgggtgcagtggctcgcacctgtaatcccagcactttgggaggccgaggcaggcagatcacctgaggtcgggagttcgagaccagcctgaccaacacggagacaccccatctctactaaaaatacaaaattagccaggcgtggtggtgcatgcatgtaatcccagctactctggaggctgagccaggagaatcgcttaaatccaggaggcagaggttgcagtgagccgagatcatgccattgcactccagcctgggcagtaagagcaaaactccatctcaaaaaaaaaagacccatagataaattggggactactatagtagccagtgtacgttattcccattttttattgtttggttatctctaagattatgtagttttattaaattaagctatttttggtgggtatgaattgattaaattaagcctcatcttgctaaaatgacattttcctatcattttttcattactattcttttctgtaggaagatataaaatcattaactgctcatgtaattgaaaattactggaaagcactggaagatgtagattatgtacagacatttaaaggattaaaactgagatttgaacaacaaagagaaaggcaagataatcccaaacttgacaggtaaattaccatatatttaaacctattcgttcagcatcaagtcgtatggtagtggctttattgtttatttgatattatttggcttgacaaggaacagggaaatcagcagatagcaaatagaaattgtagcttcctgtaagggtcaacataaatgtttccctgaagattaggctggttattagtataatacctcaggcatgtatcaggctagataagggaaaaaaaaaaaaaaagaccaaacagtggaagtgaggcttcatgtgttccaaataaaatcagaggattatattacttgctttgaatttacaagttactaaggttacaaattattatttaaaattttgtacattaatctaaatacctggatttacattgatactttaatatttgtaaatttcatgttaattccctatgttaacaagtttaataagtcatctgtaacagtacaattaagtccatatatgattgtatttactctttcttccctactcatagtatgcgttccattttgaggaatcacagatatcgaagagatgccagaacactagaagatgaagaagagatgtggtttaacacagatgaagatgacatggaagatggagaagctgtagtgtctccatctgacaaaactaaaaatgatgatgatattatggatccaataagtaaattcatggaaaggaagaaatgtatgttggaaaaaaatgggcaagagaaaattaaggctttcttactctagatttattcttatttcttgacaaaatgattatttgcttggaaggtgtgatggcatacggtttaaagactctattgctttatgggatgtgactgaatagcagtgttgtgtaggcataaacttaagttttcttaatttgagttgaataaggaatatactatttcaggaagggtagggatactaaatatgattctgaaggtttcaattcttctctggggtaagatccaatgaatggaattgtggttagtattttggtaagcttcttttataaattgaacttcaatgtttctacccagcgtagtaagctagttaaatgtgttttagtgttacctcatttggggaaatttaaaaaagaagtatgggggacgactattgacagtattctcatttttagtaaaagaaagtgaggaaaaggaagtgcttctgaaaacaaacctttctggacggcagagcccaagtttcaagctttccctgtccagtggaacgaagactaacctcaccagccagtcatctacaacaaatctgcctggttctccgggatcacctggatccccaggatctccaggctctcctggatccgtacctaaaaatacatctcagacggcagctattactacaaaggtacattcttgactcccattttgcccccttttttcccaattgaagctttctcaacaataattttgactaagattccctttggttactgccacctagaactgatttaacatccctgaactagaggatgagtcccccccaccgcttgaacttatataaaggttg

SEQ ID NO: 12884 - DNA, 2300 bp, Homo sapien
cgattcttctgcctcagcctctagagtagctgggattacagacatgcgccaccatacccgactaatttttgtatttgtagtagagatagggtctcactattggccaggcaggtctcaacctcctgacctcaggtgatctgcccaccttggcctcccaaactgctgggattacaggcatgagcctcttcacccggcctgtgacatgcttttaaaatacgcatggctgttgtgtgttctctcttgtaagtgggaactaaactttgagtacacatggaaataaagaagggaacaacaacagataccagagccacttgagggtagagagtaggagaaggtggggattgaaaaactacctattgggtactgtgcttactacctgggtgatgaaataagctatacaccaaacccctgtgacacgcagtttacccgtataacaaatacgcacatggaccccctgaacctaaaataaaaattaattaataaaacatatatgtccatggccagggatagtggcttatgcctgtaatcccagcactttggcaggccaaagtgggaggattgctttaggccaggagttagagactagcttgggcaacatatcaagaccccatctctacaaaaattttttgttaaaacttagccccgtatggtggtgcatgccgatagtcctagctgctcaggaggctgaggtgggaggattgcttgagcccaggagttcaagcctgcagtgagctataatcataccactatatctcaacctaggtgccagaacgagaccccatctctaaaaaatacacatacccagcccgcacatcagaatcagaatcacctagggcaagacctgggcatttactttgtaaagacccatagatagctgggtgcagtggctcgcacctgtaatcccagcactttgggaggccgaggcaggcagatcacctgaggtcgggagttcgagaccagcctgaccaacacggagacaccccatctctactaaaaatacaaaattagccaggcgtggtggtgcatgcatgtaatcccagctactctggaggctgagccaggagaatcgcttaaatccaggaggcagaggttgcagtgagccgagatcatgccattgcactccagcctgggcagtaagagcaaaactccatctcaaaaaaaaaagacccatagataaattggggactactatagtagccagtgtacgttattcccattttttattgtttggttatctctaagattatgtagttttattaaattaagctatttttggtgggtatgaattgattaaattaagcctcatcttgctaaaatgacattttcctatcattttttcattactattcttttctgtaggaagatataaaatcattaactgctcatgtaattgaaaattactggaaagcactggaagatgtagattatgtacagacatttaaaggattaaaactgagatttgaacaacaaagagaaaggcaagataatcccaaacttgacaggtaaattaccatatatttaaacctattcgttcagcatcaagtcgtatggtagtggctttattgtttatttgatattatttggcttgacaaggaacagggaaatcagcagatagcaaatagaaattgtagcttcctgtaagggtcaacataaatgtttccctgaagattaggctggttattagtataatacctcaggcatgtatcaggctagataagggaaaaaaaaaaaaaaagaccaaacagtggaagtgaggcttcatgtgttccaaataaaatcagaggattatattacttgctttgaatttacaagttactaaggttacaaattattatttaaaattttgtacattaatctaaatacctggatttacattgatactttaatatttgtaaatttcatgttaattccctatgttaacaagtttaataagtcatctgtaacagtacaattaagtccatatatgattgtatttactctttcttccctactcatagtatgcgttccattttgaggaatcacagatatcgaagagatgccagaacactagaagatgaagaagagatgtggtttaacacagatgaagatgacatggaagatggagaagctgtagtgtctccatctgacaaaactaaaaatgatgatgatattatggatccaataagtaaattcatggaaaggaagaaatgtatgttggaaaaaaatgggcaagagaaaattaaggctttcttactctagatttattcttatttcttgacaaaatgattatttgcttggaaggtgtgatggcatacggttta

SEQ ID NO: 12885 - DNA, 2300 bp, Homo sapien
gtttttccttgacttaatggaatttatttcaagaatatattctacttcgctgtgcttttcataaattaacctgtctgttaagctgtccctttccttctctgaaacatgaaaggactaacatttatatctgaataccatccatctttttagtttttctttgctttccatccaacaattatatttatagcatatgtctctagattttgtcttgtagtgttatcccaaagagagagaggtgacattaatgagttcaggctatgttaatagcatctgttattcagacaaatcttgttctcctctctcatctttctgaatcaaacacttccactctggatacagtcttcctttatgccaatgtgtaactcaaacctgaactcactttgtcattgtcatgcctggctctcctttaatattgtctgatctttacctttgtttggtctttaatatcataaagtttttcatcatcttaataattttatcactagctgctttaatattcttttctgatactccctttcaacttttatatagtttatgttcaaggtgtcatttctcagtcactctttttatgggttctgtctgaacttctcaatcattttctagatccaagaaagtcattacattttgctctctgagatattaaatgtttttctatttcttgaaccatgttcaccaatttgctcaactcaaaaagatggcattcttaatataataagggcactcctctcttttcatttggtttgctaatcaaaatctaacatttttctgtggataaagtcatagtttgggtatcaggaacttaaaactataatgagagcttacataattaacaaattcagagccagtgtgagaccatgcaggtacaagccatgaatgtgacttgcctcctttcagtgctgctgtccacttggttgaggtcaagaccatatcaccttgcagcacatttcaagaaaagtattccaggtcgtcatcttttctagtatctatcagtgcatctgttcattacgctaagcaatttaagtttcttggcttttccatataaggtctaatttttttcattgctttaccattctacttggccttctacttgctttagtgttcactgtcccaaattctagggccaagataacaaaatttgtttcatttcaaagtttatccttgaccttttgttaccaaaaaaaatgccttactttaaaatgtagtcaatataagttacctttttataataagagcccctccagtggcataaaattaggttttatgacagattttcaggctcctagagggatcatgaaggctacaggttagggtgtgtagaaaggaaaatattttcgtggtttggttacttaaccttcagcagaccttttttgggaataactctactacatataggttgtatttactttatatgtggcttcatttttatgtaggtacacttgtattctgcctagtgttttttaaatcctgtgtttgggctgtcagtatttatagaagatcagtgactcactttggtccaaagccagtttgttcatgctctttggcccttggtttctacaatcaattgatgttaaatattttcctttttgcttataattatatatattttctgtgatcataacattatgatatttggtgtttatttggtcttcacctcagagttaaatattgaagagtttggtggtggcagtgtcctttagcacagtcctaggactgtttctgagacttgccttggtctgctggaaaagagggccagggatatgagatgttagtggctgttttagcatcaggcttctatgttgtgggtctgcagagggctgtttcgtaacagtctcacttagtttagcctgtcctagaaagttgttcttgccagcagacctcatactttatagggaagctcattctgtttttgaactttgactaacttccttaaaattgaaagtatacatatttggagaaatgtaatgtagaaaagtaggcagttttgtcttgaaaatgaccattataggtttcttacaacatttctagtattcatcttagagtagcatttaggtttgctggtcacctgttatctattttgtcagcaattaaattttttttcataggttcaaggaaaggacccttccgtggacatcactcaggaccttgtggatgaatctgaagaggagcgttttgatgatatgtcatcgccaggcttagaattgccatcttgtgaattaagtcgccttgaagaaattgcagaacttgtggcatcatctttaccttcacctcttcgtcgtgaaaaacttgcactggcactagaa

SEQ ID NO: 12886 - DNA, 2300 bp, Homo sapien
gaaaattacttttagcctaaagatattttcggccgggcacaatggctcatgcctgtaatcccatcacttagggaggccaaggcgggcagatcacaaggtcaggagatcgagaccatcctggctaatatggtgaaaccctgtctctactaaaaacatacaaaaatgtagccaggtgtggtggcgggcgcctgtagtcccagctgctcaggaggctgaggcaggagaatggtgtgaacacaggaggcggagcttgcagtgagccaagatcagcaccactgcactccagtctgggtgacaaagcgagactccgtctcaaaaaaaaaaaaaatttcaattatagtttatctacaagctttacatggatgtttttgtgttgactgccagttggggtcagccattattgtgtgcttgctccattctccatcataggataattgatattttctttttgttgtcatgagcaaaatggaaagtatttctgattttccataaattgagtcatttgtccaatagaaacttaaaattattgcgcttttccatacttgggctagacctagtcattattgtgttgaagtttttcttttctaaattacttgtagcttttccccaaaaaaacttttgattttcagattatttctttagaacaaaataaatatttgattcttaacacttttcaagtatttattgtctgtaaaattaagtttttgtgatgtgttaatcatccaccttagaaataggctatcagctaatttggtggtcagtgctagagatagtgtgataggggcttttgcatacctgtgaaataaatggtgtgtgttttttttttttttttaggcagaatctctgtcatcctggctggagtgcagtagcatcatcttggctcactgcaacctccaccttccaggttcaagggattctcatgcttcaagcctcaagcctgggattacaggcgtctgccatcatgcatggctaatttttgtgtttttagtagggacacggtttcaccatgttggccaggctggtcttgaactgctgacatcaggtgatccgccctcctcagcctcccaaagtgctgggattacaggcgtgagccaccacacccggccgcgtttcttttttttaataagttctctcagaaaggatgacaacatgtccaaagtcattcatctattaagatggtatgagttgggattcaaattcaggcaattcattttaaactgtacacactacttagtaatgacaaagcgtttgggaattttataatgtatatagtgttagcatgggtatagaaaggctgggtagttttaaaattctctcattattgggtctatatttgtggacggggaagctataataatgctatctcaactgtaggctcagttcttgttaggggagcttatatgctcgtctaaaaatcacagaagagaatttctaaatggaagtacttgtggccttcatgttacagagcagatctgtcatggtaagtactgtatgccttcccttccaaaaccgagtaacttggcactcaacctaccttgctttagaggaaaagggatgtcccactaagcttctgggcccatttcttggattgcatctttatccagtaggtttctgctggcaaaataggttgtaagaacacgtcccttttgttttttgttttctttttttttttttgagtcagtgtttcgctcttgtcacttaggccggagtgcaatggcacaatctcggctcactgcaacctccgcttcccgggttcaagcgattctcccgcctcagccttacgagtagctgacattacaggtgcctgccaccacgcctggtgaatttctgtgtttttagtagagacgaggtttcaccatgttggccaggccgatctcgaactcctgacctcaggtgagccaccgcaccctgctctttttcttttcttttcttttcttttttttttttttttaatttttaagagctctgttgcccatgctgtagtgcagtggcaggatcatagctcactgtaacctcaaacttctgggctcagttgatcttcccacctagctgggattacaggtgcacaccactgtgcctgggtaattaaaaaaaaattttttttttcttttttttaagagatggaagggggtgggtcttactttgtcgcccaggctggtctcgaactcctgggctcaggcatgagccaccatgcctggtccaatttttgaattttttcaaaggttctcactgtattgcccagaatggtctcgatctccagatgtgaagtgatctttcccacttggccgcctaaagtgctg

SEQ ID NO: 12887 - DNA, 2300 bp, Homo sapien
tttaagacagagtcttgctctgacacccaggttggagtgcagtggtacaatctcggctcactgcactcaccgcctccacaggttcaagcggattctcgtgcctcagacagtcaagtagctgggactacaagcgcacaccaccatacctggctaatttctgtatttttagtagagtcagggttttgccatgttggccaggctggtctcgaactcctggcctcaagcagtccgcctgcctcagcctcccaaggtgctgggattacaggtgtgagccactgcgcccggccacattgcaagtttaaaagattcctggcaatgtcaagcactcgaaccttccaaaactagccactagccacatgtggctaccaggccttcaaattttggctagtgcaactcacaagctgaatttttcattttacttaatttttaaatttaaattgttattttattttattttttgagacagagtctcgctttgttgcccaggctggaatgcagtggcacaatctcagcttactgcaacctccgcctcccgggttcaaggattctcctgcctcagcttcccgagtaactgggactacaggcgcacaccaccatgaccggctaatttttttgtatttttggtgaagacggggtttcactatgttggccaggctggtcttgaactccttgaccacgtgagccaccgcgcccagctaaatttaaaaactgatacttgattcagcttttggaaaacttttaagtatgattggaataacagaatatgtgaatctacattttcaactgtaaatttaataaactctaccagcccgggcaacagtgaaacccgtctctaccgaaaaaaaaaaataataacaaatttaattaattaactggcagtggtgctgcgcacctgtggtcccagctacttgggaggctgagatgggagaatcgcttcagcccaggaggttgaagctgcagtgagctgagactgagccactgcacttcaggatgggtgacagagagaccctgtctcaaaaaaaattttttttcaataaaatctaaacgtagatatttctgatgaaaatttagtatcccaacagagacttgctggaaggacaaaatatatcacatttttaagacattgtacgtatatctcattagtaatttgattattgaaataacttttgaaaataccgcactaaaacgttaacactaatttcaccagtttcttcgtactttttgtggctactgcaaaatttaaagttatgtgtgtggctgcattatattccgagcggacaagcccgacctggcaaggcctggcaaatggtaaaagccaccaaaatggtggcatatgagctgcatgataggaacgagaatgatattcctttgtgaagatcaacaatacttgacatcaagtaggtcttcaaaacacaggactacctaatgctgagaattactcctcccgattacacagtgtcgcatttgtttttgtgagcgccttaagttccttttccgacaagaaaggctggcagacagttctgatagggatgaaggaatggagcacttggggcttgcctaggctgtaaggtgaagttttagaattgtcacttggaactcggtcccacgcccagaaatcgcaaacagtcccaagtttccacactggccacgccagtccgcgacccacggcggctcccaaggctgcgccgacctaggcgcccacacccgcgaccttccccggaagcgtttccatttcattccctcaagtccgcaaggcgccgggtgggtcccgagcgcccgactcagccataaaggcggccccgggaaaacgctctcggaagcgggtaggggcccaggcccacgctgcccggcgtccgcaggccaggggcaggggcagaggcagggacggggcaggaacaagggaaggtggcggcgggcggaggcgaggccgaagcgccggggcccgcgggcagaggccgcaaacgtatccacgcccctcgtgcatcctggagcggggctgatgacgaacacagggcgcgacggacgcacacaccgcccagcgctcgcacgacggtgcgtgcaaggaggcgggagggagcctcgggctgtcaccggcgcaatctgcgtcccgcctcctccgctccctgcgctcccgccacctcggcaactccgcgcccgcctcccgcctccgtcggaagcctccgccgcagtaaggctcccggtctcgctgctgtctctttaaatggtggggctacgagccgcccctgcagctgctccctgggtggccccgcgcgccgcttttgaggggcgaaccaagatgg

SEQ ID NO: 12888 - DNA, 2300 bp, Homo sapien
tgtttttaggtcgtaagtaatagatttttgtctaattaaaataacaagggagatgcactgaacaaacactacagaatgtcagataaacaaagcaaagtctaaacaatcagtttttgtcatgggcaggaatgaggaccattctggggacctaggaaacaagtgtttgtcaactcctccgagcttcccttggaccaggggtctagagatagagtatagcacagtggttaaaagtataggctccagaatctaaagcctgggttttttctcttaataaacttttaaaaatgttagaatagtttaagatttacagaaaagttgtgaagacagcgcagagagtttctgtgtaaaactcagaagactttgtaccgggcttgggccagttacaaactgtgtgcttgggcccactcccaccctgtggagtgctttcttgctttaataaatatctgctttcattgcttccttcccgtatttcatttctttgttactttgtgcgttttgttcaatgcaatgtctcactctgttgcccagactggagtgcaggggcatgatcacagcttactgcagcctcaacttcctgggctccaggaattcttacaaacttggcctgtaaaaatttccccagactttaggcaatacagtgaacacatttctataaactgcaattctacaatgtagctcttttctattctgatgcctaacacctttcagtttattttgatttagaatctaccacttgacaaacagtgggacacaggaaggattttgaggtttcggctgcaagggtagcacattaggaaatggcaaagatttcactgtaggaagaattcaggtgatacttggttggccaggcttattactcagtttttatagcagtaacaaccctcagatctcactctcagttgcttataacaataaacatttcttgcccactgttcagccgatcagctgtggtggctccatatgtctctcattctaggacacaggccaaagagcaggggccacttgggcagctgtacaacacatctgcttgtagtttatcacccaaatcaaatcatgtggccagccaggcttggtggcaaacacctgtaatcccaaaactttgggaggccaaggcaggaggatcacttgaggccaggcattcgagaccagcctgggcaacatagtgagacctgccccccaccaccaccaccaaaaaaataaaaaaataaaccaccaaaaaaaaaaaaaaaataagccacacacacacaaaaaaaattagccaggcgtggtggtgtacacccatagttccagctaatcgggaggctggggtgggaggatcactggatcccaggaagttgaggctgcagtaagccgtgatcatgcccctgcactccagcctgggcgacagaatgagtcattgctcgaacgaaatgcacaaagtaacaaaggaatgaaatacaggaaggaagcaatgaaagcagatatttattaaagcaagaaagtactccacagggtgggagtgggcccaagcacacagcttaagggcccagttacaaagttttctgggttttaagccctcctttggagattcctatcagttacccctgatctggatgaaggatttggtccgtggctaattacaggctggggtgaattagagccctaggcagatgaaggcatggcccctgctcggcccgcggccaatccagggcactctccctttccatctgagctgtggtggaagccggagggctgtagggagagtggcctttgatcctttgttactgggcgtggggagctggggttttctcttttggtttagctttaggaagttggcattaattgttctttggttccctgccccagacacaggtgctccccttttggtccagctttgggaaattatcgtgaattggcctcagagtcctgcccccagaccttggtgttttcccttgattcagctttaggaagtcggcatgaattgggcttaagttccctgcctccagaccctattctcctgcctcagcggtaaggagacttctatggcgatgtgcttccaccagaacacaaaaacgggagctgctggagtctccttaatgcctggtcttggctgcccccggaatgtcacctctgcctcattctactatcaaggtggttgcagggacagcccaggttcaaaggaaggagaagtagactccccctcttttgactggcaaggggacattgcaaaaaatcctgtcgtttgggggggattgttgtagtcatctttggaaacacaatctgcaactttgatgttcatcaaagaaatctgcttgagctgt

SEQ ID NO: 12889 - DNA, 2300 bp, Homo sapien
aacccagttttccatttgagtcaagctaaagaatttcatcatgccattaaaagattattaacataatcatatttgtattttagaaagatcatatggggaatatactggaaaatgtaagatttttggccaagtgatatgttgataagaggctattttaaaagctgaaatgtgatgatgagggtctggattagaaaagtggccacaagtatgaagaaaacagtggcaaattatgaatgaaaccagtgggagtttgtgaaggattggctgtgaaataggaggaagtgtgtatagtcaagagttacacatagggcaactggatgagtaatgatatgatgaacatcatccgtagaacacagtatccaagggacttccatttccaattgtggcttcagtttgctgctgagaataatttaacaaaatacttagataaattattttttaaattgataacctgaaaagctaatagaaacaaccaggccaaactctaagggaaaacaaaaccttggtgatatggtttggctgtgtccccaactaaatctcaccttgaattgtagctcccataatccccatgtgttgtgggaggtacctggtaggaggtaatttaatcatgggggcaggcctttcccgtgctgttctggtgatagtgaataagtctcacaagatctgatggttttataaaaggagttcccctgcataagctctcttgcctgctaccatgtaagatgtgactttgctcctcatttgctttcagccatgattgtaaggcctcccccagccatgtggaactgtgagtcaattaaatctctttcctttataaattacccagtctcaggtatgtctttattagcagcatgcaaacaggctaatatacttggagaggtaaagagggcacacagtaccaaagtccttttgacctgaagagatttacaaattcctgcaaacttagactttgaatttggtggactaatgaagagttatggccctgagtctacccaggtagtgagaatatagatggtgtgccccaccatacaccagaacccctgagggctctacccttacgataaagattaatcagaggtaaatccatacacactcacacatatccccaaggaatacaacaaagtcgtcttgttaagtgagtaggaaaagaaaaagagagaaaaaaacctgtctgagaggttatggccattggaaggcccctgtgagatttgcagccctgatttgcattgtctgggattacaggtgcccaccaccacacccagctaatttttgtatttttagtagagatgaggtttcaccatgttggccaggctggtgtccacctcctgaccttaggtgatctgcccgcctcagcctcccaaagtgttgggattgcaggcatgagccactgctcccagccattcatgattttttaaacaaacatttattaaagcatgaatagaatgtaacttcttgattaagagtatctaggggggaaagaagctatagcaaatatccaatcatattttctaataacacaccaaaagcttttgctatgtcatctaccactgcctctattcatcattgtattggagggctgaattagtctagacaggcaagaacaatatattaaaagtgtgagattggagaggaaggagcccagctattcctgtaacagattatctaattgtggagatagacaacctcaggctcgtgtagctgaagcagagtaagcattgcagaaagtcataggagataaggtcagagagggactggaattcataccacggtggcccttggagggcattgcaaggattttgactcttactgagagagaggttgaagccatggagagttttgatgaggagagtggatgaagtgacttaacattttgaaagtgttactttggatgcttttttgagaacagactgaagggagctatgggcagaatcacagagaccaattcggaggcacaagagagatgacagtggcttgtacagggtgatagtggtgacagaggtgagaagtggatggagtctacatatatcatgaggctagagtcaataggatttctgatggattcgatgcagggtatgagagagaggaattaagaatgacattgaggggaggagccaagatggccgaataggaacagctccggtctacagctcccagcgtgagcgacacagaagacgggtgatttctgcatttccatctgaggtaccgggttcatctcactagggagtgccagacagtgggcgcaggccagttggtgcgcgcaccgtgcgcgagccgaagtagggcgaggcattgcctcacct

SEQ ID NO: 12890 - DNA, 2300 bp, Homo sapien
ttgttgtttttgagacagagtctccctctgttgcccaggctggagtgcagtggtgcaatctcggctcactgcaagctccgcctcccgggttcacgccattctcctgcctcagcctctccgagtagctgggactacaggcgcccgccaccatgcctggctaattttttgtatttttagtagaggcagggtttcaccgtggtctcgatctcctgacctcgtgatctgcccgcctcggcctcccaaagtgctgggattacaagcgtgagccaccgagcctggacggttaggtaccatcttaataggtgaaggggaaagggagaaaaccatttatggaaaaacaaattgcttttaaaaaaaaagaaaaaaagataaatgggttttcaggacagcaaacaggagatacgatttttttttgttggttggttttttggggtttttttgagatggggtctcgctctgctgcccaggctggagtgcaatggtgcaatcttggctcactgcaacctcggcgcactgcaacctctgcctcccaggctcaagcgattctcctgccatagcctcccaagtagctgggattacaggtgcccaccaccacacctggtcaatttttgtattttttagtagagatggggttttgtcatgttggccaggctggtcttgaactcctgacctcaagtgatccacccacgttggcgtcccaaagtgctggaattgcaggcatgagccacagcgcctggccaggagatatgaaagtttttgataatgtttgtaaatctaggtatgagtggtctttccttctccttcaggggtataaaactcctctggagaagggatttgggacaggttttatttacattcttccttctaggagtagatctgccccaaggaggaatttctgtcagcctcatttcccagcagttcctgcttttagtcagacacaaaaggctccaaagttttttctctgcatctgttgaatctcaacagtcttcagcttaaaattatccttatataaaagtggcatttttttgttttgagacagggtccctgtcacccaggctggagtgcagtggagcgatcttggctcactgcaacctctgcctcccggtttcaagagattctcccacctcagcctcccaagtaacagaaattacaggtgtgtgccaccacgccagctaatttttgtatttttagtagagacagggttttgccatgttgtccaggctggcctcgaactcctggcctcaagtgatccacccagttcggccccccaaagtgctgggattataggcgtaagccactgcgcctggccaaaagtggcatattttgaggtttcatatctcttttttttttcttttgagatggtctcactctcactcaggctggagtgcagtggtgtgatcatagttcaccacagactctaactcctggctcaagcgatcctctgccccagcctgattagtagctgggactacaggttcatgccaccatgcctggctaatttttaatttttttttttaatgcaactgggtctcactttgttgaccaggctgttctcaaatgcctaggctcaagcaatcctctcacataggcctcccaaagtgctgagattacaagccacttttatataaagataattttaagctgaagactgcgcctggcctgaggtgtcatattctgatcccatttaaaataatggttgaatagaactggggtgtggcttaggcatccacacttttggcatgatagtcataagcatgggctttggagtctgtctggcaagttcagcagtgattctataataaacctctctttgctgttaattatagagctttcaacaagttatttaatctcctaaacttcattttcaacaactataagatgggtgtgtggcaggggccagagtggtggagtaaagaggtaacaattactgctaatccttctagttctatgttgtgttagtgattgtatctctctcttaatcaaaatgcaagtaacaggaaattctaaaatttgtaacacagactagtcttatgacttgctcattctttgtttacctaggtcaggaaaactgccattgcctctgtgagcaccctgagaaataatgaaccaaattcacaatcaaaatttccaatttttcggtttccttcatcattctcttctcccgttggaatggtatttcatccccgaagccactttttgtatgcttatggcaatcaggtgcgtacacatggaacttcagtctgtgttagagttaaatcatccacctactgtatgctgcatggctgtacattaagaacaga

SEQ ID NO: 12891 - DNA, 2300 bp, Homo sapien
gacagagatgagactccatctcaaataaataaattaataaataaaacaaagacaagaaaaatttataaataaaattgttacatgacaaattgagttaaatatttacattaaatattgcaaggggttattttaccatttcacaagcaaaacactaaatttcccgtagaaaatgtttaacaacatgcccagataatttatagaagaaaaaaatgtcaaacaagcatatttataagtgttcagttgaaccaatattgaaaaaagtaaaacaagattttttaatgtatcaaattatttcagattatatctaattttcactgctgggtttctggaaagcaatttgtcaacatacattcaagagtcttaaacatgttcatatcctaaggaaatatttttaaatgtaggaaaataattttgttcaggattattcattaccacatttctcaaaaaggaaaacactggaaatagaaaaatattttatgtttaagtaaattaggtaccgttatttttagatctacaactgcgaagacttaaataaaacacttgagttacacgagaaaatggtcagactaacaatgactgaaagaaggacatataaatgcagaagaaacagactcgagaaatgtcaaaatgtccacagtggttatatctggttgttgatttatgcgtaattgatttctctatacttgttttcatttttcacacataataagccctgttatagccagcaaaaaattacaaaaaaagtcaaagtcatccttctttcaatcagcccattgccttgccccctatcctcctgactagacggaagcccagtgcataatttgtttttcaggcagaagaacccctttcattccactgttacagatgaatcacctactgtgggagtagtcttggtactcacatcaaagtgtaattcatcagtgactgtgattgaaaacagatcctttactctttcgtaagttaggaaacaaaatgtgggggcaaatgaggaaaagaaaactaagaggttgctggggagaaagaaggcaaatgtcacctgcttcatcattctttttagagctctcaatgtgtaccttcagtattgctcagacttttttttaatgtgtagcagtgttgctatggtaactgaaagctacatcttcttccataaaagctttattgccttccctagtgggaaacaggcaacaaaaaaagagagctccaagtttctgggaactgagtctttataaggaaatatattttgttgtgttttgcacactgtttcaggttcttctttaggtcaaggtcaccagaaagggtgagagaaatatatttctgatgcgggctcttccaggaatagattaaacccagataccagacatatttcaggatatgagggtaaagcaggttttacatggccatgtgaagggacttctgaaggacaacctgagtataaaacacgttttattatcatgattatcaaaaagtatgtgtcagcctctgtgaccattcatgactagtcagggcgctgggtaagacagaaaggttcaagctcagctcactcggtactcagtcaaaggcagccttagtgagcacatacaaccacatcaaggacagtcacacaacatgaatacggaggacaaactggcatgccatttggtctcactgtttccatgcgtccacagctcatttctaactttgtgctttgtgtatttgcttgtcttgtttacctgtcaataaggccttctctattttttttaagtcccagtcttccttaaagacccagttatgaagctcctcccctttgagagattgcctccttttaaaccttattatatgcagttagcatgagcttttagcatttatgtttttccccaggcattcaatgatcgtatgatcattgaagtgttttatagataatcatatgtaggtttctgatccttcctagataaatgctatattaaagatggaaggtttggagaacctccacctctcatcggtttttaaagaaaatggcctgtggtgctctgaaagaggcagttagttggaaattccaactgcctgtcctttagattttctaagcatgcttctgtacttggtagctgctgattggctgttaccaaaggtgactagagtgctaagccagtcaacagggaaaacttggctcctgactttgggtctttcttctcagtctatatggaagaaaactgagaaaaaatataaaaaagaagaacacaactagttgcgcatctcctaaagaggtaattacagtaaaaaatattaaaataaggaccctgctggagtatgaatttataatgtga

SEQ ID NO: 12892 - DNA, 2300 bp, Homo sapien
gcactgtggctcatgcctgtaattccagcactttgggaggctgaggcatgaggattgcttgaagccaggagtttcagaccagcctggacagcaaagcatgaccctgtctctataaaaaaatttaaaaatttagccaggcgtggtggtatgtgcctgtagtcccagcacacttgggaggctgaggtgggaggatggctggagcccaggagtttgagacagcagtgagctatgattgtgccactgcaatccagtctgggcaacagtgagagcctgcccaaaaaaaaaaaaaaaaaggaacaaatgagagagagacagaatgaatattagtctaaaacgccttggagttcaaagttcagattcaaatcttgactgtatgtttgggcaaccactaactggttgtctgacctttaaatattttcaactgcaaaatgaagataataacagctacattgcaatttccaggattaaatgagatgactcatgaaagttttgtgtgaacagtgcacaactttgcaaacatttgtgatacattattaaatgtgaacgtactaggagttgaaagcagtggttttcaaagtgtttgttgaaacactaatgcccaagattggaaacaggcctttctcaagaaaagagttctatggtcaaacacatttgggagatgcaggatcaaagaaagtaaaacatggttcttatgcctgtaaaatgctagtatgcattgtgaatctcaaggaaaacaaatattttgtgtctctctcccccacattaatgtgatctggtgatctacccctactcccactgcagcatctctaggaccttgagatggacagaactcactctgggaaagactgctctccagaaggaaaagtatgaacctttctttcaattttacagtcccaccacccaggctggcaccgtggctcaatgcttgtaatcccagcactttgggaggtggagcactttgggaggcagaggtgggaggatcacgtgagtccaggagttcaagactagcctgggccatataataagacttcatctctacaaaaaattaaaaaattagcctggcatgctggctcgcgcctgtattcccagctacttggcggaggggctgaggtgggaggatcacttcagccccgaaggtcgaggctgcactgagccacgggcgcaccgctacactccagcctgggcgacagaacctctgtcaaaacaaaacaaacaaaaaatgctaagccattcttcatcagacagtctaggaaactcatttccaagcagtgttgagatttccaccaaggaagcccagagaaaagggccaggccccccgctttaccagggttagaggggatccctcatagaatcgggggtgtgaggtgctgtggtggatacatttaatattctttccaagacacccattgatggcaaggcagtagcagatagcaacaaaagcagagagcagggctgatcctcaaagactttatagactttttataaaaactctaaaagtcaagtaacaacatgactactccgcttctaagtaaagtgtgcataaacatcgccagaaagactgcccctgcctccccaagtcagagaagtttcctcaggccaatagcttcccctctcttccccctcctaccgcttgtctcccttcttctcccaaaacacaccccacacctggcggcattttacaccttcccaggaaggggctgccaagcgcggagtcgcggaggacgcaggcgcagcgcggctcaggtacgcgggaggccccgcccctccgcgcccagcccttctgcgccactccactccccgccctgccccgccctgcctcgcccctccccgccttgcctcgcccctccccgccttgcctcgcctcgccccttagcgcccgtcccgaggggcggggcggccctggtgggtggtgtgggagtgggtacggggagggaagtggaggggagggggtaagtgatagggtaggggaggccctgggaaaggcaggacctcgaggcgcggccgcgcgaggtgaccggagtcacagttcccgcaggcggcgacagcagagcgcccactgcctccagcaggtaaccggccgcggccgcgcggcgccggcccagcgcgggcgtgggacgtggagacccggaggagggcggcgggacccgggcggggaaaggcgcggcgtggcttggctcaggtgcgcttctcccacctggcagctcgctcagggctgtggggggtgcctgtgagggcggccccgccttgcgggctggaggtgagtgtcagttctgtctcttttgtctttaactttctttaaa

SEQ ID NO: 12893 - DNA, 2300 bp, Homo sapien
aatgacacttttgtgccctgcactaagtcaggtgctgcaaggaagtaaaagttatggtcttgcccttgagaagattcaactaacacatgaatctagtgatttctaaccaaggatgtgctctccttaggtatcaagggaagctgggcactgtggctcatgcctgtaattccagcactttgggaggctgaggcatgaggattgcttgaagccaggagtttcagaccagcctggacagcaaagcatgaccctgtctctataaaaaaatttaaaaatttagccaggcgtggtggtatgtgcctgtagtcccagcacacttgggaggctgaggtgggaggatggctggagcccaggagtttgagacagcagtgagctatgattgtgccactgcaatccagtctgggcaacagtgagagcctgcccaaaaaaaaaaaaaaaaaggaacaaatgagagagagacagaatgaatattagtctaaaacgccttggagttcaaagttcagattcaaatcttgactgtatgtttgggcaaccactaactggttgtctgacctttaaatattttcaactgcaaaatgaagataataacagctacattgcaatttccaggattaaatgagatgactcatgaaagttttgtgtgaacagtgcacaactttgcaaacatttgtgatacattattaaatgtgaacgtactaggagttgaaagcagtggttttcaaagtgtttgttgaaacactaatgcccaagattggaaacaggcctttctcaagaaaagagttctatggtcaaacacatttgggagatgcaggatcaaagaaagtaaaacatggttcttatgcctgtaaaatgctagtatgcattgtgaatctcaaggaaaacaaatattttgtgtctctctcccccacattaatgtgatctggtgatctacccctactcccactgcagcatctctaggaccttgagatggacagaactcactctgggaaagactgctctccagaaggaaaagtatgaacctttctttcaattttacagtcccaccacccaggctggcaccgtggctcaatgcttgtaatcccagcactttgggaggtggagcactttgggaggcagaggtgggaggatcacgtgagtccaggagttcaagactagcctgggccatataataagacttcatctctacaaaaaattaaaaaattagcctggcatgctggctcgcgcctgtattcccagctacttggcggaggggctgaggtgggaggatcacttcagccccgaaggtcgaggctgcactgagccacgggcgcaccgctacactccagcctgggcgacagaacctctgtcaaaacaaaacaaacaaaaaatgctaagccattcttcatcagacagtctaggaaactcatttccaagcagtgttgagatttccaccaaggaagcccagagaaaagggccaggccccccgctttaccagggttagaggggatccctcatagaatcgggggtgtgaggtgctgtggtggatacatttaatattctttccaagacacccattgatggcaaggcagtagcagatagcaacaaaagcagagagcagggctgatcctcaaagactttatagactttttataaaaactctaaaagtcaagtaacaacatgactactccgcttctaagtaaagtgtgcataaacatcgccagaaagactgcccctgcctccccaagtcagagaagtttcctcaggccaatagcttcccctctcttccccctcctaccgcttgtctcccttcttctcccaaaacacaccccacacctggcggcattttacaccttcccaggaaggggctgccaagcgcggagtcgcggaggacgcaggcgcagcgcggctcaggtacgcgggaggccccgcccctccgcgcccagcccttctgcgccactccactccccgccctgccccgccctgcctcgcccctccccgccttgcctcgcccctccccgccttgcctcgcctcgccccttagcgcccgtcccgaggggcggggcggccctggtgggtggtgtgggagtgggtacggggagggaagtggaggggagggggtaagtgatagggtaggggaggccctgggaaaggcaggacctcgaggcgcggccgcgcgaggtgaccggagtcacagttcccgcaggcggcgacagcagagcgcccactgcctccagcaggtaaccggccgcggccgcgcggcgccggcccagcgcgggcgtgggacgtggagacccggaggagggcggcgggacccgggcggggaa

SEQ ID NO: 12894 - DNA, 2300 bp, Homo sapien
ttgagtatttttaaaaaatatgtcgtagaattccttcgaaaggccttcagacacatgctatgttctgtcttcccaaacccagtctcctctccattttagcccagtgttttctttgaggaccccttaatcttgctttctttagaatttttacccaattggattggaatgcagaggtctccaaactgattaaatatttgaagagagcttgtgtttggttcattttgacatcatagacgagtcagcctttggggttctagttctgtttaaacctgtttattgtgcgctggcttagaaagctctccagagagctagggcattatctgtgactctggcaaattgatgggaggggggcggtggggcagagaaataggggtcgtggggaagttagggggaggcatcatccctgagtcctgtttcatctgattagaaaacaaccaacaatccttctcttacgtagattatttccggtgctcctgcagaacaggaatgtattcaagttactttaaaccagtggccttcaaccctggctgcatagacggataaccagtagaactttggaggaaagattgattccccgggacatgcccccagacactctgatgtcattgggcttaggtagggcccggccatcaggatttttgaaaacttgactatgtagccagagttgagaatgtattgttataaaccctagaaagagaggtggacagatggggctggagccctagctgccttgccctcaatgtcttttctgctcattgtaggatacattattcttttcctggtcagggcctctggacatccttcaagtcttagaaccctgtgcaggggccaagagagtcaacattgcaagtcacaggagaacaggttgggatggctgtctttatgtgccatcccaggaatcaacccaaggcttcaggaaaaaagtgcactccctgatagctgaggtggagtctacagatccatctgagggtgctcccatcctacctgttggtgaggtattcattaaggacccccacagtgcctatcaggagttgtgtcctggacccctagtcttagtaggcattccacagatccttgtgatatggacaggagacagggaaatactgggtagaagagggtggttccctggcaaaggccccaccctcaagcctgggtacccatggccctaaatgaggacagccattcctgttttcatccctaaaaagttgccttttggcctgccatgtcccctatcctgtacccatataaaccctgaaccccaggctccaggctccagaagcagacggggagacaagaagatgagcagacatgaatggcagaaaagcacggcaaagaaggagagaagagaaggaacattgggaggaattcgactggagacgatctgaaaactggccactggatggccaaactccaggggaagatcatcttcccactccatcccctgtccagctccccatccatcctacttagagccacctccaccactcaataaaacccctgcattcatcctgcaaatccatgtgtgacctgatccctccgggatgctggacaagagctcgggatacaggaaactgtcacactggccctctgccctggcaaaaagggagagggtccactaagctggttaacgcttaagctgtccacggatggcaaggctgaaagactgcactgtttcagtgcctactcgggctttggaagtcacagacaccgaccccgggatgctgtcatggggctggggcccaaaagtgctcaccctggttcctgcacctgcctgtctgcgtgctccccttcccataaggggttttagcttggggtggctgaagagagagccacacccctgttgcacatcctgtgagggggccagggaattctcctgttccacttagtagtatcttaggccttcagtggaaggaaacagcatgttccacgccctgtagcatccaagaagctgcaagtcctccctcctcaccccaagagcatttctcacacccacaccacacacctcactttgctgttggctgtggttatttttttctctaactaagcacatctaaaccatgcctagttgtggttcttcagtcagggtcaagtggtgttagcaatcacatcagcaccaaatggctcaggatgctctggtttcaaagcttataaaacagagggtgattcccttgggactcactcagctcggctccgaaaagcaaaggccagaaggcagcagtgagcctgggtccctgctgtgtagggagactcaggggctgggaagaaggatggaatcagaaatgctgaaggtttacgtgagc

SEQ ID NO: 12895 - DNA, 2300 bp, Homo sapien
ggtcgaagttgcagtgagctgagatcacaccactgtactccaatctgggcaacagagcgagaccccatctctgaaaaacaataaaaacttggtgacttaaggcaaaggaaatttattctctcatagttctggaagccaggagtctgaaatcagtttcactgagctgaaatccaggtgtcagcagggctgtgctccctctggaggctctagaggagaatccgttccatatctcttccagcttccgggggccgccagcacttcttgactgtggctgcatcactccaatatctgcctctgtggtcacgctgcctcctcttcctcctctgtgtgtatcaaatctccctttgtctccttcttatattaacacctgcgagtagatttagggcccattcaaacaatccagataatctctctgtccagattcttaatcacatctgcaaaaacccttttccttataacggaacgggttccaaggatttaggacttgcatctttttgggggctactacccagcatactgcacccaggaatctgcatttctaacagatgctgctgtgatcttccagggtcactgtggggagccatattgaaaaggtccatgggcgtttatatgctttcattagagactgggccctatgaagtcatgggccacaaggcaggaagacagaaatcttcccgataaggctggctttccgagggtccatgctgtctgaagctgcgggaccctccccgggaaaccactcagtcattctaatgtgagctctggagccatgtcttctacagtttaacaatttcacaattgtgtgatgtgacctaacacctctggacctctagatgagtgtttactttaggattagatgagattatccacttagtgccctatctggaatacagtttttatcaaagaagtggagtttggtggtgggggtgaaacagtcaatgactttttctttttctcacgctgttggatcaaacctgtgagcacctgggttacatctcacgtcaattccctaggattcacaggcatgttccatttctattggattgtctcattctctcacgtcaaaagtctgtactagtttaaatggaaacttcaacctctctgtctcttacccactgtgaagtttctccctgtctcctagttcagagcaggcaaggggtgtggttggcctctgccctgtcctcttgtcaccctcccggtaatggtagtgctggccctggctcctccagggctggcaggggaggagcaggtggtagaaagggtaaggctggaagagtgaggctcctccccgattgtagccattgtaaccaggcattggtattccctcaggagcagagcccccaaagctgttgctctcacagggtgcttttgtgggtcttttggagatttgcctgaggacttcacactgaccagtccctgatatgggcagtagggcctgtggttggtcacctgctactccaaacctctcagcccctaattctggggctatgtctcatacagatgtgccgtggtggtagtgaggtggagggtatcactgcatcctggcagcagaccttacacaagggcctttcaggatgtcaacatcagctccttgcattccccgttcctctctatggtgtggggcagctcagggctcacatctccagacttctcctggagacagtctggtaccactttctgcatccttgaacttcaggggcctgcatctctaaacagtttttctttttttgaaaacccctcttgattgagatggaggctagtaagtgtgtttaataaaatatatgtagagttgggcacaggggctcatgcctgtaatcccagctactctggaggctgaagtgggaggatccctggagcccgggagttcaagtccagcctgggcaacatagtgagaccctgtctctacaaaaaaagattaaaaaattagccaggtgtggtggcatgacctgtaaccacagccactctggaggctgagatgagaagataacttgaatccaggagttcaaggctgcagtgagctatgattgcaccactgcactccagcctgggtggcagagcgagaccctgtctctaaaaacaaaaacaaacaaacaaaaaagtatgtatgtaggctggagggggtgatggaatgagggaaacatctggctttggatcacagctttgtaagtcctgtataaccccaataactccacacacagcatcagcagcaagccgtgtatagtgcctgtatgtgccagacactattctaagtgctttctatacagtaaccctttaatcttcacaagaatcctatgatatag

SEQ ID NO: 12896 - DNA, 2300 bp, Homo sapien
gaaagggctggcaggaaagggcagtgagaaccccaggggggcagaatcattttggtcgccctgctcttcagaagcagctgagagcggtgagggggtggaatgagttcattcacctccgagtggccagcgcctggccagaggctgaggccaccagccctaacacttgccggcactgtcctgtctgaacttgcactcagtggcttagcacagtggacattttcctaccccctcctgtccccggtggggaaaccccaacctcccacgggcactggtgggggccagtgtcttgctagaccctctctctacagctgttcatttatttgttttctccctgagagctccagagatgctaggaggcaggaactttgtggccatgggattagcctcccctgtaagaaaagcctctcagtctgctcaccgtgaaggcttttagctctgaaaacactgacatctcttttcagaggcctaagaggtttacatggacttgggaagaggatagaaaatctctcagttggaactttggccattggtgtatggagcattgtgggatggtgcttacaatgggtcaaccaatgccagtgggaaagagactcttccctgccctccccgcacgatgagctgtgcagaatgaatcttggtttttgtggaaaaacccctgactcatgttccagttcccactgtgtgtccttgttagctggtggacttgggtacacctctcaatcttcaaaaacaattatatgtatatgtgtgtgtgtctgtgtgtgtgtgtatatatatatatatgtattttttttttttttttgagacagagtctagctctgtcaaccaggctggagtgcagtggcgtgatctcagctcactgcaacctctgcctctggggttcaagcgattcccttgtctcagcctcccaagtagctgtgattacaggcacctgttaccatgcctggctaattcttttgtatttttttagtagagacgggacttcaccatgttggtcaggctggtctcgaatgcctgatctcaggtaatccacctgccttggcctcccaaagtgctgggattgcaggtgtgagccactgcacccagcctataattttattttatttttttttgagacagggtctcactctgtcacccaggctggagtacagtagcatgatctcagctcactgcagcctcaatctcccaggctcaagtgattctccctcctcagcctcccgggtagctgggacctcaggcgtgtgccacatcacctggctaatttttaaattttttgaagagatggggtcccactatgttgcccaggttggtctcaaactcctgggctcaagcgatccacctgcctcagcctcccaaagtgctgggattacaggcatgagccactatgcctggtccttcaaaaatgcttaaacaatcttattgatgcatagtcagtgtataataaactgcaccatgattttattaattttgacatacgtgtacccgcatgaaaccaccaccaccacactcaagataatggatttcccattagtccttgtgtcccttggtggtcttctccttaacctacttaacctctaaagtgggccaatggtcctcgttgtaaggatcaagtgagtgcaggatccttccctaatgagcaaagttatttatgcataataaatatattattagaatcatcatggttatttgttaacctgaaacttccaagtcagtgagggtgaggggtgttcactgatggaatgcaaccggtgatggaaggagcaggtattgcctggaaattcctggttgggggggtgcgttggagcatagacttaccagcaggtgtatatgtgtatatgtttatatcatgtgtatacatatggtttccactttgcctgacttttgaccccagaagggacatgtggatggaggccccggtccttaagtgaacacttttggatctaagatcatgctcccaaaggtcctgggtggagagccttggtacctgggactctggtctcctggtggtggtagatttcgttgctggtgctttttctgcctagttattgtggctgttctgttgggaggacagtcagcaatgtgccttggctttccacagatgtgaacgagtgtgccaccgagaacccctgcgtgcaaacctgcgtcaacacctacggctctttcatctgccgctgtgacccaggatatgaacttgaggaagatggcgttcattgcagtggtaatgggctttcgcattggaaacttccacctgtacttggggcctgggcaggggttgaagggcaagggcttccttcataggt

SEQ ID NO: 12897 - DNA, 2300 bp, Homo sapien
gccgaggcccatggattgcttgagcccaggagttcaagaccagcctggccaacatggcaaaaccccatctctactaaaaatacaaaaattagccaggcacggtggtgcgtgcctataatcccagctacttgggaggctgaagcaggagaattgcctgaacttgggaggtagaacttgcagtgagccgagattacaccaccatactccagcctgggcgagagagtgagactccatctcaaaaaaaggaaccctagtctccctctctccatcatgtgaggacatagcaagaagacagtcatctgcaaccaggagaggaccctcatgagaacctggctatgcccacaccctgatctcagacttccagcctccagaactgggagagataaatgttattgcataaaccacccagtctatggtattctgttatagcagcctgagctaagaccaataatactcatggtttcttgtgcatccttcaggtgatgtcttttctgtacgtgtacaagcaagaacttatgtatttattttttttcccacaaatgatggcatgctttacacacagttctgcagcttactttttacatttattactatattagatcaatctatgtgaaattaccaatattctactgttttgacccacaaaatatattggaaacccttcaatagcagtgcatacggagctgtttcagtctttttttcaaaataagatataacatacataagacttcacaaatattaaatgtacacacccctacataaccagcatccagatcaatcattagattattaccagcacccagaaggggctgggctgcctcccagtcactatctgactttgaattttatataaatggagtcgtttgatgtggactcttaagtgtctaggttttaattggttgcacaatagtccctttggaagccccttactttatttaaccctattggtgccttgctgatcgaccttaaaggtgtttataatcttttgcttttacaaacaatggggggatgaacaaccttataaacataaggtatttaaaaaagtgttttacaggaaatttcaaacacgtaaaaggaaatagattagactagtataatggacacagcttcaacaactatccacattctgttattctcctttgggtagaattccatttacttacccccaaaaatgccttagggaaggctaaatatgtagactccagaggctcagctgtaccaatgaatagctgcgtgactatggggaggttacctaacctctcttatcttcacctctaataacatggagatgatcattcctactgcttagagtggtggtgaggacaggggacctggatcagggcttttcggctgcaggtaggaagatgcaggtggaagcagatgggataggccacagtccatccactggcgttttatagagtgagtgccttctgtaagatttcattgacaaaagtactccaatggcttaaaaacaaacaaacaaacaaacaaacaaacaggaaaaagaaacaggttgaagcctccactagaatgaatgcaaaggactcagcatgtcttatgtgctgtctccaccattctgcttttccagactgtcccttcttcaaatcaccgtttaacttgttaaaatcactttcgagccaggggacacttttccaggaaagcgagaaaatgccagggagaatcggggaatgagggcggggagagaaaagcgtcctaagacttgcattgcacaagctgaagtctggaattcgcaccagcgggattccatcctcttcccccccaccccaccccgctgctccccaccccttcttcgggaagatcgcgactctcccgtcgctcgccccaagcctctgcttcgtaggttctggtttcccaatcgatcgtgagtttctagtccctggagctgcgtgggtcgtgagttcaagtccctttccttccggaggcgacaacgttctcgcgggtccccttgccacgcagcgcgggcgtgcacgcccctccccgccgggccgcgctgccagccccgccccgcccctgggtgggaaggtcaaggggcccgggccctcccagcccccgcacccctgcgcgcgcccgcccctcgccttctgcccgggcgctcgcagccgagcgcggccggggaagggctctcctcccagcgccgagcactgggccctggcagacgccccaagattgttgtgaggagtctagccagttggtgagcgctgtaatctgaaccagctgtgtccagactgaggccccatttgcattgtttaacatacttagaaaatgaagtgttcattttt

SEQ ID NO: 12898 - DNA, 2300 bp, Homo sapien
aatataagaagacaggaatgtctggcctctgagccaaggcctgcatgtatacatccagatggcctgaaggaactgaagaatcacaaaagaagtgaaaatggctgattcctgccttaactgatgacattaccctgtgaaattccttctcctggctcagaagctcccccaccaagcaccttgtgacccccccgcccctgcctgccagagaacaaccccctttgactgtagttttccactacccacccaaatcctataaaactgccccacccctaacaccctttgctgactctcttttgggactcagcccacctgcacccaggtgaaataaacagctttattgctcacacaaagcctgtttggaggtctcttcacacggatgcccgtgacaagtgcctgccaccacatcccactaatttttgtatttttagtagagatggggtttcaccatgttggccaggctggtcttgaacgcctgacctcaggtgatccacctgcctcggccttccaaagtgctgagattacaggcgtaagcccctgcacccggccctgttttttttttttttttttttttttacatcccggagtcacactggatatctgaatgtgcttaaaataaaattcacatctcattctggaagtgtttattaaatgctgtccctgcattcatgtgaacatcacagcccagcggttagatgtgcagactccaacgcctgactgcctgggtctgtcacttactagctgtatgaccttggatgggttacttaacatttctgggcactggtttctcattagtaaaatgaagaatgggcgcctgtagtcccagctacttgggagcctgaggcaggagaatcgctttaacccgggagacgaggttgcagtgagcctaggtcccgccattgcactccagcctgggccacagagcgaggctccatctcaaaaaataaaatttaaaaaaaaaaaattcagctttcacggagaattactactgcctggtgccatcagatcccaaatactggaggcattcccaatgttctgttcacaaactgtgcaatctgtgatagcccctcttgtgaatataatcaaagtgaaagatgccagtatacttattgctatgcttaaaagaactgcagatctatcatatccttttgaaaccaaaaaatgtggaagtctccctggctagatgctgtgtgtccacgtatcctgcaccaattgcttgaaagtcacatgacaacctttcttcctttagggaaggaagcaagcaaggtaggactctgtgtgttacagccagtgtgggtaactaaggactgagggaggtgtgggcacttgcatagctagtgccgccaataccataggagcgttgacactaaacggcacttctctattaagttgccctgctgtcttctaacgagtcattttgaaaaacggttgtccgtttttcaactacttgggtgagggcagcttcatgaaaaaagctcatcgtatgttaaagaaggtagggtttcaattgtgagctataaagccaccagaggagatttctcctatagaaggaaggtgtgtttcctgcttggacacctgaatttgcaacccatcctttcttttttcctttttccttttttttttttgcaacccatccgttctatctttgtagcctcagctcctaccatagtgcctgtcacggagcagctaatcgacacagtgacgcgtgtaagttatttgaagccacttcctgcgcagtggaacgtccccgccaagtctcccggcactgctgggtgtagtcccaattaaaacactaggtttcaacaacacaaggagggtccgcagggtccccggactacccaccaagggtcggctctgctttgaaacgcagctgcaggaggccgaggagcgccgcgatgccccagttatccaggccattccttccccggccgaagctggccgcctgcatgcacctaaccttgcgctaggcactggctgcggttaatccagcccgcgctcggtcctccgcgatcccagcctcccttgcgccaaggacacgtccggcggcttcgcggggcctgtctacgccaccgcggcgcttttctatgatccgctgccgctttccgagcgagtgtcatggcggccggcgtcgagttggcaggagtaacccacggaactgaggaaagtcattagagctgagaaagaagtggcccaatctggacggtgggaattcgtgggaatgagcagaaggccctccgtaggtgactgtgtcactagaggcgggcccctggtaaaattccaggccaggcctctgcgtttctagg

SEQ ID NO: 12899 - DNA, 2300 bp, Homo sapien
ttctttgagatggagtttcgctcttgttgcccaggctggagtgcaatggcgctatatccagctcaccgcaacctccgcctcctgggttcaagtgattctcctgcctcagcctcccgagcagctgagattacaggccaccacacccagctaattttgtatttttagtagagacggggtttctccatgttggtcagggtggtctcaaactcccaacctcaggtgatccgcccgcctcagcctcccaaagtgctgggattacaggcgtgaaccaccgcacccggcgagagatgcgaacattttttttgttttttggaggatgacaagttgatgcaggaatgagcagaaccaggaggctgaatactgagtgttaaagagttcctagcaatatgcaggaaaggaaagcaacaagtatcctgagaggtgggggttagatgtagactgaaatcaggaggtgtggttaaaactctttgaaagaggctgggtgcggtggctcacataatcccagcactttgggaggccaaggcgggtgcatcatgaggtcaggagttcgagaccagcctgaccaacatgtgaaaccccgtctctactaaaaatacaaaaattagccgggcatggtggcgcatgcctgtaatcccagctactaaggaggctaaggcaggagaaccgcttgaacctgggaggcgaaggttgcagtgagccgagatcatgccattggactccagcccaggcgacagagagagatcccatctcaaaaaaaaaaaaaaaaaaaaaaaaaaagaaaggaaaagaagaaaagaaaaaagaaacagcagattccctagagaggagacattcatcactaaaaaaaaaaaaaaaaattaaaataaatcgcagaagtaaaagccctttttgaaagggctcagggtacccagcttaatgtatgaaacaaaagcaaacccacatcaaagcacaccattattaatttcagagcatcagaaataaagagaagatctgacaagcttcttggaagaaaacaaggcatagagaataatcagagtagagtagagcaggaaaacagagtcctgggtagagcgaactgagcctagccaatcgatagaattcttgatgttttgttgaaaacagaagcactttacaattctcttggtaagttttagaaagattctgtagtaatggaaaattgtacaaatttaaaaaatggaatctgttaacttcaggaagaacaaaaggtagaaaaatcaaggcaatataatcttggtacaacatttgacttagctgcaatgaataagacttacatagtcatagaaggtaaacactgattacttactttaccaaaaattatgatatcatcatattgaaagcccagaaggaagggaaataaagggaaatacaagagtgctaaatcttttatttttcaataagttggtaatgtctaaaattaataagaaaatggcaaccataagcctaatgcttagaaattcagaaaagtatcagactaaattttaaagtctactttaaactgagtctttgctttatagttgcataaataaattcattttgatggttttctcagaacagatgaactggctgggtgcggtggttcatgcctgtaatcttagcactttgggaggccaaggccgatggctcacttcaagtcaggagtttgagaccagccaaaaaattagccgggtgtggtggtgcacgtttgtaataccagctactcaggaggctgaggcaggagaatcgcttgaacctgggaggcggaggttgcagtgagccaagatggaacgactgcactccagcctgggtgacacagtgagactccgtctcaaaaaaacacaaagaacagatgaactgttttcctttgaggaatattgatgatcccactgcttgagtaatggaaaccagcttgcagctgatagttattttttgtcttttttcctgttctatccactgtcctaggtttggaatttcagctgggcagcttcgatcccaccacctgtagccactgaggttcacaggctctgtttgaggtgttgtgttagattgtgctgggttggttttgctgcttattgagtgatgaagagcaacatattagctactgagatattttgcagaaaaaggaagagatgtcttcagctcaaatgctatcaaacttgtatgtcttttaactttttattataaaaaatttcaaacatatgcaaaagcaaaagactagtttaatgaaccttatgtacccaccacccagtttcaacaattatcagttcctgacaattcttgtttcacctatcccacctctatta

SEQ ID NO: 12900 - DNA, 2300 bp, Homo sapien
ggtgaaacctcgtttctactaaaaatacaaaaattagccgggcgtggttgcacacacttgtaatcccagctactcaggaggctaagaatcgcatgagcctaggaggcagaggttgcagagtgccaagggctcaccactgcattccagcctgcccaacagagtgagacactgtttctgaaaaaaaaaaatatatatatatatatatatatgtgtgtatatatatatgtatatatatatgacttcctattaaaaactttatcccagtcgggggcagtggctcacgcctgtaatcccaacactttgggaggctgaggcaggtggatcacctgaagtccggagtttgagaccagcctggccaacatggtgaaaccccatctctactaaaaatacaaaacttaagccaggtatggtggcgggcacctgtaatcccagttacttgggaggctgaggcaggagaatcgtttaaacccaggaggtggaggttgcagtgagctgagatcgtgccattgcactctagcctgggcaacaagagtaaaactccatcttaaaggtttgtttgtttttttttaatccggaaacgaagaggcgttgggccgctattttctttttctttctttctttctttctttttttttttttctgagacggagtctagctctgctgcccaggctggagtacaatgacacgatgttggctcactgcaacctccacctcctgggttcaagcgattctcctgcctcagcctcccaagtacctgggattacaggcacctgccactacacctggcgaatatttgttttttttagtagagacgggcttttaccatgttaggctggtctcaaactcctgacctcaggtgatctgcctgccttggcctcccaaagtgctgggattacaggtgcaggccaccacacccggccttgggccactgttttcaaagtgaattgtttgttgtatcgagtccttaagtatggatatatatgtgaccctaattaagaactaccagattggatcaactaatcatgtcagcaatgtaaataactttatttttcatattcaaaataaaaactttcttttatttctggcccctttataaccagcatctttttgctttaaaaaatgacctggctttgtatttttttagtcttaaacataataaaaatatttttgttctaatttgctttcatgagtgaagattattgacatcgttggtaaattctagaattttgattttgttttttaatttgaagaaaatctttgctattattattttttccaagtggtctggcattttaagaattagtgctaataacgtaacttctaaatttgtcgtaattggcatgtttaatagcatatcaaaaaacattttaagcctgtggattcatagacaaagcaatgagaaacattagtaaaatataaatggatattcctgatgcatttaggaagctctcaattgtctcttgcatagttcaaggaatgttttctgaatttttttaatgctttttttttttttgaaagaggaaaacatacatttttaaatgtgattatctaatttttacaacactgggctattaggaataactttttaaaaattactgttctgtataaatatttgaaattcaagtacagaaaatatctgaaacaaaaagcattgttgtttggccatgatacaagtgcactgtggcagtgccgcttgctcaggacccagccctgcagcccttctgtgtgtgctccctcgttaagttcatttgctgttattacacacacaggccttcctgtctggtcgttagaaaagccgggcttccaaagcactgttgaacacaggattctgttgttagtgtggatgttcaatgagttgtattttaaatatcaaagattattaaataaagataatgtttgcttttctatttccttttgaatttgtgtttattgttaattcatagctattcaaagtgtgattagagctgggcttggtggcttgcatctacagttccagctacccaggaggcagaagcaggaggattgcttgagcctaggagttcgaggctgcagtgagctatgatcctgccactgaattctagcctgggcgacaaaacaggaaaaaagtatggatggaggaccagcagcatctgtatcacctgtgagtctttcagaaatgcagagtttcaggctacactcggacctactgaatcagaacttgcactttttacaagatccccaggacactaaagtatagagtgaagcttgagaagcgctgttgtgtggattgttcttaaccagctgcagtgatgaatatgaat

SEQ ID NO: 12901 - DNA, 2300 bp, Homo sapien
cggcagttagaaactgggtccaccaacacggtgattcccaccatcgtcctcttgcccttgttctcacaagtgcctggcaacatggccacccccacatatccccacatgagtagaacatcatagcgccctgcatttgcatattaaaaggctagggtggaatggccagttttattagggggctacatgaatgacatgcgtggtcaaaccagtcccctgagccctatgcaaatcagacaccgcctcctgcatcctcctcctataactggctggtatctcccacgcactctgggtctcctctctcagctttggagcacccatccctctgtctctgtacaggggagctgcttctttctttcttctcccttccttcttgcttattaaactctccgctccttaaaaccactccacgtttgtccatgtcgttttatgtaattcgactcaagacgaaaaaggctagtattcctccactcggtatcatcaccacattctgttgagtctctttacgtccaaagaatctctcaaaatgggctatttccatctttaagacactctcttaaaccaccatcgtctctcccaagattccttcaacagcaactgcttttttctgcagccagtgatctttctaaaaggcaaacatgaccacatgtcttcttttaaaatatttatatagctccccacatcctttaaaaggtacactttggccaggtgcggtggctcacgcctgtaattccaggactttgggaggccaaggcaggtggatcacctgaggctgggggttcgagaccagcctggccaacatggtacaacctcttctctactaagaatacaaaaatagttggacttcgtggtgcacgcctgtaatcccagctgtttgggaggctgaggcaagagaatcacttgaacccaggaagcagaagttgcagtgagcggggagattgtgccactgcactccagcctgggggacagagagagggccgtctcaaaaaaaaaaaaaaaaaaagtacaccttaatctggtttcaaggtgcaagatctgcacctatccttccatttaagtttcatcaaaccgctgctacctccccgtctcccacacaatttatgggacttctaagttccctctaaagggtccgaacacctacactggtaacaagccacctggatttgaatcctggcaagacaacttactatctgaccttggacattgtgctgttcttaacctctccgtgcctcggtttcctcatgtgtatgaataacatcaacacctacatcaaagtttgctgtattaaatttgataatatatgcaaagcatttagaaaagtgcctagctcatagaaagccttatgtaaatattaactatcattttttttcttttttggggtggtgggggaggggtttcgcttttgttgcccaggctggcgtgcaatggcacgatctcggctcaccacaacctcggcctcccgggttcaagcgattctcctgcctcagcctcccgagtacctgggattacaggcatgcaccaccacgcccgggtaattttgtatttttagtggagacggggtttctccatgttggtcaggctgatctcaaactcccgacctcaggtgatccgcccgcctcggcctcccaaagtgctgggattacaagcgtgaagcacctcgcccggcctagctatcatttttatacaagtgctgggttttgggagaatgtaatgatggcttttttcttactaaactttcagtgcaggaggaggagaaagaaagtaaatagttatatgaacacagtagaaagtcaaagtggaaaacaaaaagaacatagaacccaggtgagcggtccagacctccccccagaaacctaagaatccatagaaatgggtgggaagcggagaagatcctccagacagcaggtggcgatgtagcatcccccagaaggcccgctaacagaagctaggaggacgcgctaccaaggtcacgtgtccccggcgttcactcgctcttcgcttcacgacactcgcatcctcacgggtgattggtctgcgtgcggcacgtgggcggggtaccggggcgggccggggaggggcggggtgggcggaggagaggggcagggggcggagctggagggggtggttcggcgtgggggccgttggctccagacaaataaacatggagtccatcttccacgagaaagtgagtgtccgcgttcggtggggagctgtctgccgcgcggtggcgggcgtggagcgcggcatcaccgcctctcggagggctgggtggggcccgagtcgcccccatgccgatctcgccc

SEQ ID NO: 12902 - DNA, 2300 bp, Homo sapien
tccccagcccgaggctcgctcctttctcccgccctcacttgcctcgtcaggcctcccccaacgccgtccacagcccttcccaacccctaggcgaatccaggttcaagacgtagaaaagccgatgctgggtcagcagcgccagggactaccggccggcagaagccccacagtggcagccgccattttggagctggagactagcggcggagacgaggaggaaccagggcgagaccatctccggggggtgggcacggtgctgtcggaaggcgacggcggtcacgcctgcacgcctcgtctgtctggagcgaaattttattcagaaattattggtaatgtttggaagctaaaaaaaaaaaaaatgagaggagtcaaccctgaggaggaaaaagtagtatgatttgctggcgtcacccctctgctccgtgcgggcgcggcgaatggcaggtcccgaggtcgcagcttccactggcgcgggttgagttccctgttgcccttggtctcggggtcgctgtaggcgctgaggctgcaggtgggtttggggagcccggggggccgccgcgacgaggatcacggcgacggtggcggggagggttctaggcaagccctcggtgctgtgcatgtgtggaggggtggtctgggcttccccggggcttccgaacgaaggtgacgggaaaggaaaatggggttttcttcgggtggaggatgggatttccgggccggagcttttggaaagggttttctgaggctgtcataacaggaaaacgtccgtagagatgtgacccagtgaccgcccgctaaccggactggagagaagaccggcccggatcccacgcctggcctgaagcagggaagacgctgcctcccctccgcgagcagcttacattcgtccaagttccagccttctgtcttctcgctaacctcgctctcttccaaatcgcaaatcctcttgagccgacaccgttgcgcctaaatgatgtgcttacccttttactttgcttttttatttttgagacagagattcactcttgtcacccaggctggagtgcaatggtgcaatctcggctcactccaacctccgcctcccgggttcaagcgattctcccgtctcagcagcccaagtagctgggattacaggcgcccgccaccacacccggctaattttttgtatatttagtagagacgagggtttcactatgttggccaggctggtctcgaactcctgatctcgtgatccacccgcctcagcatcccaaagtgctgggattacaggcgtgagccactgcacctggcccaccttgccttttaaaagacaaaagtatggccaggcttagtggctcacgcctgtaatcccaacactttggaaggccgaggtggccggatcaagaggtcaggagtttgagaccagcccggccaacagtgaaaccccatctctacttaaaaatacaaaaattagccgggcgtggtggcacctgcctatagtcccagctactcggaaggctgaggcaagaaaatcacttgaacggccgggcgcggtggctcacgcctgtaatcccagcactttgggaggcctaggcgggcggaccacctgaggttgggaattcaagaccagcctgaccaacatggagaaacctcgtctctaccaaaaatacaaaattagctgggcatggtggcgcatacctgtaatcccagctacttgggaggctgaggtaggagaatcccttgaatccgagaggcagaggttgctgtgagccaagattgcgccattgcactccggcctaggcaacaagagcgaaacttcgtctcaaaataaaaaaaaaaaaaggaaagaaaaaagtatgaattgtataagcatgccagtgtaagaggagaggcagaaattcagtctacatagtcctagcacagcttagtgctaagcacttttgttggcaataatgtattgtctttctaggatgttgtcatatgtcttcttagtcattgtacatgatttattagtttagtccaaacgcacacaggtgtattttgaattcatctgtatgcacgaatttttacagaaaattggcaatccaactatgtttttattgaattgtgcaatttattttccacatgatgtctattacaggttcagtatccctgatcagaatgttggaaatccaaaatgcccccatatgtgaaacttggggccacaagtttgagaccagcctgggcaacatagcaagatcttgtctctacaaaaaaaaatgtttaaagaatttttttaaattagcacccgtagctccagcttctcagaagattgaggtggg

SEQ ID NO: 12903 - DNA, 2300 bp, Homo sapien
aatcttctgagaagctggagctacgggtgctaatttaaaaaaattctttaaacatttttttttgtagagacaagatcttgctatgttgcccaggctggtctcaaacttgtggccccaagtttcacatatgggggcattttggatttccaacattctgatcagggatactgaacctgtaatagacatcatgtggaaaataaattgcacaattcaataaaaacatagttggattgccaattttctgtaaaaattcgtgcatacagatgaattcaaaatacacctgtgtgcgtttggactaaactaataaatcatgtacaatgactaagaagacatatgacaacatcctagaaagacaatacattattgccaacaaaagtgcttagcactaagctgtgctaggactatgtagactgaatttctgcctctcctcttacactggcatgcttatacaattcatacttttttctttcctttttttttttttattttgagacgaagtttcgctcttgttgcctaggccggagtgcaatggcgcaatcttggctcacagcaacctctgcctctcggattcaagggattctcctacctcagcctcccaagtagctgggattacaggtatgcgccaccatgcccagctaattttgtatttttggtagagacgaggtttctccatgttggtcaggctggtcttgaattcccaacctcaggtggtccgcccgcctaggcctcccaaagtgctgggattacaggcgtgagccaccgcgcccggccgttcaagtgattttcttgcctcagccttccgagtagctgggactataggcaggtgccaccacgcccggctaatttttgtatttttaagtagagatggggtttcactgttggccgggctggtctcaaactcctgacctcttgatccggccacctcggccttccaaagtgttgggattacaggcgtgagccactaagcctggccatacttttgtcttttaaaaggcaaggtgggccaggtgcagtggctcacgcctgtaatcccagcactttgggatgctgaggcgggtggatcacgagatcaggagttcgagaccagcctggccaacatagtgaaaccctcgtctctactaaatatacaaaaaattagccgggtgtggtggcgggcgcctgtaatcccagctacttgggctgctgagacgggagaatcgcttgaacccgggaggcggaggttggagtgagccgagattgcaccattgcactccagcctgggtgacaagagtgaatctctgtctcaaaaataaaaaagcaaagtaaaagggtaagcacatcatttaggcgcaacggtgtcggctcaagaggatttgcgatttggaagagagcgaggttagcgagaagacagaaggctggaacttggacgaatgtaagctgctcgcggaggggaggcagcgtcttccctgcttcaggccaggcgtgggatccgggccggtcttctctccagtccggttagcgggcggtcactgggtcacatctctacggacgttttcctgttatgacagcctcagaaaaccctttccaaaagctccggcccggaaatcccatcctccacccgaagaaaaccccattttcctttcccgtcaccttcgttcggaagccccggggaagcccagaccacccctccacacatgcacagcaccgagggcttgcctagaaccctccccgccaccgtcgccgtgatcctcgtcgcggcggccccccgggctccccaaacccacctgcagcctcagcgcctacagcgaccccgagaccaagggcaacagggaactcaacccgcgccagtggaagctgcgacctcgggacctgccattcgccgcgcccgcacggagcagaggggtgacgccagcaaatcatactactttttcctcctcagggttgactcctctcattttttttttttttagcttccaaacattaccaataatttctgaataaaatttcgctccagacagacgaggcgtgcaggcgtgaccgccgtcgccttccgacagcaccgtgcccaccccccggagatggtctcgccctggttcctcctcgtctccgccgctagtctccagctccaaaatggcggctgccactgtggggcttctgccggccggtagtccctggcgctgctgacccagcatcggcttttctacgtcttgaacctggattcgcctaggggttgggaagggctgtggacggcgttgggggaggcctgacgaggcaagtgagggcgggagaaaggagcgagcctcgggctggggaaggcggcg

SEQ ID NO: 12904 - DNA, 2300 bp, Homo sapien
tgaatggatgttcaatgtatagaggagtaaaagtgatcatctttgtatatccaataccaacttcagtggtcaaggcagcataaatgggtactgcaagaaggaatgaagcctcatcatatcataaattccttcagagcactggttttgacagatactacttcatcgcaaatatctcacagttacttgccctcttaataataatcgtgcatgttgccgggcgcagtggcttgcgcctttaatctcaacactttgggaggccgaggagggcagatcacttgagctcaggagttccagaccagcctgggcaatatgacaaaaccccttctctactaaaaacacaaaaaagtagccgggcgcggtggctgcgctggtgaccccagctacttgggaggctgaggtgggaggattacttgagcccaggaggcggaagttgcagtgagctgagatggcaccactgcactccagcctgggtggacagagcgagacccggtctcaaataataaatcggccaggcgcggtggctcacgcctgtaatcccagaactttgggaggccgaggcaggcggataatcctggccaacaaggtgaaaccctgtctctactaaagctacaaaaataggtgggcgtggtggtgcgcgcctgtagtcccagctactcgggagtctgaggcaggagaatcacttgaacccgggaggcagaggttgcagtgagccgagaatcgtgccactgcactccagcctgggcgacagagcgagattccttctcaaaaataaaaaataattaccgtgcatgttgatgacaactaaggtgaactaagcaaaatccaagggaaaacagaggagtttgggttagccctggagctcactgagtggggaaggctcttctcggtcagttgagggagagccccagtttcatactggggttgcaaggccgggcatggtggctcacgcctggaatcccagcacaggccaaaatgggaggatctcttgagcccaggagttcgacaccggcctgggcaacatagtgaaaccccgtctttattaaaaaaaaaaaaaaagaaagaaaaaagaaaggggttaaaggggttgtaaaattaaaaattaggggatgggtataaatgatagctcaggttcgcctggtcacaggaagccagacttgccggggttcaatctgacctcttcttttctaaagagcacgtaaaatagtacgaagtcaaaaaagaattagaacttcgcagtgatagtggaagcgctggagggcgatggcgggagggcgcgaaggcccaagacccttttagtacagtgtggtacaaacaaccgaaaggtctctggagtcgaagaactaaaaggacgcctaagcggtgtccagagcttagcaacctcgtggtctctcaacccaaaacgacgggaagagcccgagcaggggaggctaagaacgccgtagccacgaagccaaggagctaaagctggcgtcggtttaactcttccagcgccaagagatgaaaggggaagcagagggaagcagaaaggagggaagaagatcccgggagggaaccgtacgggctgccgcaaaacagctgggagcttgaaacccatggagaagtcacttctctttccctcgctgaccacttctgccgggaacgaccgggacagtcgcagccgaagcggcgggggcgagtcctcgggggagaccgggtcggagtcggggccccgtgctcccggagggccaatgacgccgccttccccagcccgaggctcgctcctttctcccgccctcacttgcctcgtcaggcctcccccaacgccgtccacagcccttcccaacccctaggcgaatccaggttcaagacgtagaaaagccgatgctgggtcagcagcgccagggactaccggccggcagaagccccacagtggcagccgccattttggagctggagactagcggcggagacgaggaggaaccagggcgagaccatctccggggggtgggcacggtgctgtcggaaggcgacggcggtcacgcctgcacgcctcgtctgtctggagcgaaattttattcagaaattattggtaatgtttggaagctaaaaaaaaaaaaaatgagaggagtcaaccctgaggaggaaaaagtagtatgatttgctggcgtcacccctctgctccgtgcgggcgcggcgaatggcaggtcccgaggtcgcagcttccactggcgcgggttgagttccctgttgcccttggtctcggggtcgctgtaggcgctgaggctgcaggtgggtttggggagcccggggggccgccgcga

SEQ ID NO: 12905 - DNA, 2300 bp, Homo sapien
atttaaaaaactttagaacttgagaaaaaaaatccaaaccattttattaatttcttgtgttgatgagaacatatgcttccctgattaactgaagttttactattcaattagcaaaactgtctgtggttactatgcgaaaaagctgggacaaaaatccattataagtatgtggccatataaatatcctctccttaataatttctgaaattcttctcttttattattatttttttttgagatggagtttcacttctgttgcccaagctggagtgcaatggcgtgcttttggctcactgcaacttccgcctccagggttcaagttattctccttcctcagcctcccaagtagctgagattacaggcatgcaccacccggccggctaagtttttgtatttttagtagaaacagggtttcaccatattagccagactggtcccgaactcctgacctcaggcgatccacctacctcggcctcccaaagtgctgggattacaggcctgaaccaccatgcccagccaataataatttctgaaattctaagctgagttcttgaacttaaattaatagtttgcgaccaggcacagtggctaatgccggtaatcccagcactttgggaggccgaggcgggcagatcacttgaggtcaggagttcgagaccagcctgaccaagatggtgaaaccccatctctactaaaattacaaagattagccaggcatggtggtgcatgcctgtaatcccagctactcaggaggctgaggcaggagaatcacttgaacctgggaggcggaggttgcagtgagccaagatcgcaccattgcattagagcttgggcaacaagagtgaaactccgtctcaaaaaaaaaacaaaaaaaacaaaaagagttaagtgaggctgggtgcggtggctcatgcctgcaatcccagcactttgggaggtggaggagggcagatcacctgaggtcaggagtttaagaccagcctggccaacatggtgaaagtgtgtctctactaaaaataaaaaaattagccaggtgtggtggtagacacctgtaatcccagctactcaggaggctgaggcaggagagttgcttgaaccgggcggtggaggtcgcagtgagccgaggttgcgccagtgcactccagcctgggcaacagagcgagactacatctccaaaagaaaaaaaatagtatgcaggatagctattaaaaatcaacttatggccgggcgtggtggctcacccctgtaatctcagcactttgggaggccgaggtgggcggatcacctgaggttgggagttcgagaccaccctaaccaacatagagaaaccccatctctaccaaaaatacaaaataagctgggagtggtggcacatgcctgtaatcccagctactcgggaggctgaggcaggagaatcgcttgaacctgggaggcagaggttgtggtgagccggagattgcgtcattgcactccagcctgggcaacaagagcaaaactccatctaaaaaaagaaaatcaagttacttgtgtctactgttcttttttgtttttgttcttgtttttatttttaggcagggtctcactctgtcacccagactggagtgcagtggcatgatctcatcaaggtcaacctcctgtgcccaagtgatcctcccatgtcacccctcaagtagctgggactacaggctcatgccaccacccctggcttttttttttttttgtattttttatagagaacggtgttttgccatgttgcccaggctgatcttgaactcctgagctcaaacgatttgcctgccttggcctccctaagtgctgggattacaggtgtgtgccatcacacatggccttcttttctgtttaaaatgtgtgtacacaccatatatttaagtgtaccttataccacattttttgtagctatggagagcacaggtagtaataattgaaattcataggtaatcataattttagctcttagttttgctcttctgccccagtgtagtcttcaatccagaattggtgaataattttgaatattctgtctttacccttaaaaagattcaagaagtagtcctttggattgtgttcttgtaggcatgttcaccagattgatgcagtgctgttgtctcaccctgatcctctccaccttggtgccctcccgtatgctgtcggaaagttgggtctgaactgtgctatctatgcaaccattcctgtttataaaatgggacagatgttcatgtatgatctttatcaggtaatttaagcaattaaaaaaattttgttagcactccttcagtgat

SEQ ID NO: 12906 - DNA, 2300 bp, Homo sapien
ctgaagcagaaactctgtggggttggggagggggcggtccagcaacctgagttttaacaaactccaggggattccgaagcatgttgaagtttgagaaccgctgcctatccagggctgatggatagtcatcttcaaggcaaagtggaagttacaagtcatggagaaggtcattctagcaaagaaaactttttaaaatgaagtaagatacaaattaaatggtgaggcccatcatgtcacaggaagggattgttaaggaaaaataccatggtacccacctcccctgggctgagactgctgaacaaaatggcctaaactctggccatgtagacagttccctgcagtgtcatatcagaagacacaattgcagaggagatattccgaatccaaaggcactgaagccaggaccaggataaacccggcaacgcattttcgctttgtcccacggcctttgctggtttacaaaatgctcctgaatgccttgaatcccaaaggtacagaaaacccaattctctcttctgcagaatgagtcattagagctggagctgaggctatttggtaatgggcactatttaaataaagtgaaaagtacaatttcaaatgaattgctttttaaactgtcaaataaaaggaatccatttgtgcatgagaaattattccaagggttctaactattaactgaaagcaggtgaaaaatgtcaaagaaaacgtcctactaaagagctgactaaatgtctaaagacagacacctaatgactcctttgacctgttttggattcaaaaacatgtattttcaccagccccaggtgagctccgtggacaaaagttttaagaaaatattaaatgctagtagcaagatgccattttgtccatcggcatcgccttaaccaatgtgaccctgacactgttttagggacaggacaacagcatattatcactttaactttttcctttggcttaaatttgatgccaagggcccttggctagctctctaagtgtcatatttaacaatgttttatagtcttctatttgaatgcatccttgtacagtctagtcaatgtttgcagaagaaaattctgcaaacgtatgaaaagtgtcttttctgtcacaggcaggcatgcttggttgaggtcaccagtacggagagtgagcctcagtgttaaggcatctctgcagacaaaaacagaaccctggccttttccatttcatttcctctaggggtttccactgcaattagttttgtgttcatgccttcactctctttgttggtattgaaacagagctgctgaaaataatcagtgaggtttctcccttcctggccctctggcacctctaacctgtgtcactattccaggctaacacaagcaaaatgacccctgcttactcagtccagagggaaccgtgtgggtggtgactggctagaggcattggagcgggcttgaaaagggagcacttctcacacgtgaaggtgcacacaaatttccaagggatctcgttaaaaatgtacattctgactcagtaggtctggggtggaatcttaagagtctgtgtgtcgcataagctcttaggcaattctcatgctgctgaggaccacacggtagtgtagtgagctgtgagggaacaacgcacattctgcacaacagtgactttcaggaccctccttaatggggcatttatctaagggccttgctcccttttgatttagagttccttgaaagcagagactgggtctcatacatttgttattgttttgttctccggttggcacagggcctgcacacggtgggtatgtatttatttaattaaagagttggcctgttccaagaaggattttaacccctagcggcactgaacaggtggcgatgaattggccgggaaggaagtcggtcctaggggtagtcacagaccccctgggctggggtcccctccacctgcctgcacctgtatcacccctcagctgctgttctgaaattttccctcctgccccatttttaaagcggtttacaccagagagccgaccagaaaggagagatacaaaaccaaaccagcaagccctgggaagcggtaggcttaggaacatggaaagctcaaccgtcggttgtggggcccgcagatctctctggttcccctctctgccccgtctccagcttttttgcaggtcggtgtcgcggcctcgcagatccccaacagccccgagagccctgaaggagctggtcccagcgggtccaagctcgtgttggcttggtgcaagcctgtttgttagctctgcacgaccaattaattttctcctgcatcttcccccc

SEQ ID NO: 12907 - DNA, 2300 bp, Homo sapien
agctgctgaaaataatcagtgaggtttctcccttcctggccctctggcacctctaacctgtgtcactattccaggctaacacaagcaaaatgacccctgcttactcagtccagagggaaccgtgtgggtggtgactggctagaggcattggagcgggcttgaaaagggagcacttctcacacgtgaaggtgcacacaaatttccaagggatctcgttaaaaatgtacattctgactcagtaggtctggggtggaatcttaagagtctgtgtgtcgcataagctcttaggcaattctcatgctgctgaggaccacacggtagtgtagtgagctgtgagggaacaacgcacattctgcacaacagtgactttcaggaccctccttaatggggcatttatctaagggccttgctcccttttgatttagagttccttgaaagcagagactgggtctcatacatttgttattgttttgttctccggttggcacagggcctgcacacggtgggtatgtatttatttaattaaagagttggcctgttccaagaaggattttaacccctagcggcactgaacaggtggcgatgaattggccgggaaggaagtcggtcctaggggtagtcacagaccccctgggctggggtcccctccacctgcctgcacctgtatcacccctcagctgctgttctgaaattttccctcctgccccatttttaaagcggtttacaccagagagccgaccagaaaggagagatacaaaaccaaaccagcaagccctgggaagcggtaggcttaggaacatggaaagctcaaccgtcggttgtggggcccgcagatctctctggttcccctctctgccccgtctccagcttttttgcaggtcggtgtcgcggcctcgcagatccccaacagccccgagagccctgaaggagctggtcccagcgggtccaagctcgtgttggcttggtgcaagcctgtttgttagctctgcacgaccaattaattttctcctgcatcttccccccgtggtgggtggcggggtggggagggggtgtgtggcggggcctcgggtcggctcgggggtcggagagcccggacaggagcgactacactgcagaaaccctttttctaagagtccccagcggtgccataacctgtttctctctgcagcagcctcagagggtaaaggaagggctcgttgcagctccatatggaagaaaggagagaaaaagggagaaggaaggggattatattggtcagtagaggtccaactactgaagagaagagtgcacgggggagtgcgccctacgggacgagtacacgtgctgggaagggcggggggtgagaggcgggcaggaggggaggagtagggaggcgagagcagcgggcgggaggcgccacggcctctcagacgctggcgcccgcagccgagaagccagagagaaagttcccggggagagctcgcccctgggagggccgacgtcgagcctgctcgccgcgagggtctcaggtaccgcgcgtccagccagccttcccgcggcgcgcactcggccgcccgggctcggctcgtcgggaagcaggggaacatcgccggctggcagccggggcggccgccgccaaacttggaggaggaggatgctgcgagtgggcgcggcggcgcggggcgcgggggcgcactgagtgctccctacggcgctgctgccagggctgtggccgggcgagccggccgaagcggagcgggcaggtagcggctctagcgccgggactgcgccagccctgcgagcccgggccgccagcgccaccgtgccggcgtcgcctcctcgccacggagccatggtgcgcgcagcgcgcacgcggcgcgcgggactctgagctccggccgcgtcgcgcgtccccaccttcccaaggggctcccccgccgacctcgccctcgggccatgaggctttggcccggagctcctcgcctctgagtcgcgcaccgcctgctccagccccagcgccgctcggccactgattgcactctggccgctgaagctccccatcctctcccagagacggcacccaggcgctccgggatggcgctccgcgggaccctccggccgctcaaagttcgcaggaggcgagagatgctgccgcagcaagtcggcttcgtgtgcgcggtgctggccctggtgtgctgtgcgtccggcctcttcggcagcttgggtgggtgctggtacgggtcccctcttcctggggagttgggggctttggctggggagtctcggggcggctgcgagatgttttcccctccttcctcatc

SEQ ID NO: 12908 - DNA, 2300 bp, Homo sapien
gcagttttcacggctggtgttgaatgcctgtggcttttccaggtgcacggtgcacactctctgtgaatctgccattctggggtctggaggatggtgaccctcttctcacagctccactaggtagtgctccagtttggactctgtatgggggctccaacccaatgtttctcctctgcatggccctagtagaggttctccatgagggctctacccctgcagccgacttctgcctggacatccaggcatttccatacatcctctaaaatctagcggaggctccaaaatctcaactcttgtcttctgcacacctacaggcccaacaccatgtggaagctgccaagactgggggattacatcctctgaaacaggggcttgagctgtgccttggccccttttagccacagctggagctggagctgctgggactctgggtgccatgtcctgaggctgcacagagcagtgggagctctgggccctgcctatgaaaccacttttccctcctaggcctccaggcttgtgatgggggggtctctgaaatgccctggagacattttccccattgtcttggctattaacattcagctcctctttactatgcagatttccgcagctggcttaaacttctcctgagaaaatgggtttttcttttctaccacatggtcaggctgcaaattttccaaacttttatgctctgcttcccttttaaacataagttccaatttcagataatctctttgtgaacacatatgactgtatgctcttagggacagccaggccacatcttgaacactttgctcttaggactttcttttgctagataccctaaatcatctatctcaagttcaaaattccacagatccctagagtaagggcaaaatgctgccagtctctttactaaagcatagcaagagtgaattttactccagttcccagtaagttcctcatctccatctgagactacctcagcctgaacttcattgtgcatgtcactgtcagcattttggtcaaaaccattcaacaagtctcttggaagttccaaacttttccacatcttcttgtctttttctaagccctccaaactgttccaacgtctgcccattacccaattccaaacttgcttccacattttcaggcatctttatagcagtaccccactcttgatgccaattttctgtattaatccatccttatacagctataaagaaccacctgagactgggtaatttatgaagaaaagagatttaattgactcacagttctgtggcttaacaggaagcatgactagggggcctgaagaaacttacaatcatggcagaaggcaaaggggaagcaagtacctcttaccatggtggagcaggagagagagagagagagaagggggaggttccacagactttcaaatgatcagatttcatgagaactcactcactatcatgagaacagcaagggggaaatctgcccctgtgatccagtcacctcccaccaagccccttcctccaattcggcatgagatttgggcagggatacaaatccaaaccatatcacagggtgatcagatacactgcctacagagtgatattgtgtgtgtgtgtgtgtgtgtgtgtgtgtgtgtgtgtgtgtgtatttattttttggccaggtgtgtttccagtgtggattcagatagaaattatttccaataaccgaaagtgttgaattgtcatgggatgttcatatggttatatgtatgcttgttgctacagcagtgtgtgtgtgagtgtgtgtgtatttattttttggccaggtgtgtttccagtgtggattcagatagaaattatttccaataactgaaagtgctgaattgtcatgggatgttcatatggttatatgtatgcttgttgctacagcagtgtgtgtgtgtgtgtgtgtgtgtgtgtgtgtgtgtttcacatccacaagggggaataagtcaggatagaagggaaaaaaggggatgactaaattgacctggaatttgaatctgttattgtgtttgttgtggctaaattgagtcttctgggcctatctgtttaaggaaatggcttacttcattatttacttgaccatcccagaatagcaagcaataagtgcctgtgtgttggcaactgcagctaaagctctcctatctctgcaaacatgtgagtttattttaccttggaagccttcataggtgggctgattgttttaatgatggctgtgaggagtgagccaaggtagaaaacctcccgtggattggagccaggtctgtgtggcttggggatgggttctggctgtcctgttta

SEQ ID NO: 12909 - DNA, 2300 bp, Homo sapien
agattcatagaggtggaccagaggtcagtgcaggcggctggggagcaaagaaggaggaattaatgattagtgggaatagtgttgtttgggatgatacaaatggtttgggaaccgtgctgatggttgtagaacaatgtgaatgtaattaatgccactgttttgtgcccttaaaaagggaaagtagttagaatggttaatgttatgacatatatttttttcccactacatacacacacacacacacacacacacacacacacacaaatccctactcatgagctgagccatgttcaggttcatcttcctcctcataccgcgatacgtaattaaaaagacaacactctgggttttatgaggatataaatcccacatttatataaaacatttataatgttttataaagatgggtgataaactatcagactgcaagagcattgtccttaaatgatctccactctgagtgcctttcagcgagagcccgcctgaggttctttgagatggagagactcttccctcaggggtgatggcagtgctggctgtgagtgtgcaggaggtgcccgtgagcatcctgggagcaagatctgctgctgggggagaggggacaggcctggtaatgccccctgcgagcctgcccagaggcgaggccgagcttcctttattaggacaggctccagtaagtaggcctcagtcattttcttaggtgaaagttctctcatgcctccaggaagtccaccaccagctcaataggagcaggtgccaccagacaacacaatgctcccaggtccctgtcaggaaactgtcagcccagttgaaaagctgaggctccacacctcccctgccacccaccactcctgggctgtgctgactgcgtgcagggatggggtgtgatccacccgctgcccagttggtgggactcctttccattgccctgacctcctgcctcccctcgcttccaggtacaatgtgaagatgcaagcctttttcacagtcaaacaaaagagcattgcaaacggtaacccggtcaacagtgagctggaggctggtaatgatttctatgacggtagctatgatgacccttccgtgccattgctggggcaaggtaaggctgagcagacaggagtgggcagaaatgtgtcctggaagccactctctcctcttttgtgtacacacacacacacacacacacacacacacacacacacacaccctctcacaatgtcccccctctaaattgtcactctcttacctttgaccacaggtgccctaagagaggagggagagtcagtatgggagatggggtttgcttaggtggggcaggggtggagggaaactacaccaggaaagagaaaaaccacagccacgtttctgggcgctttcccatgccttctgggaaaggcgtaaggcctgcttggctcttcagaatgcagtggtatccctgacccctgtaagggcccacgacaggcagctgaggagctggggcagcagagccagcctgggcctccctgcggtttctcaaatgccagacccagtcctggatggagaacggctctggacaaagcatgggttctcgggctgggaactgttgcccggaggaagaacaaggccaggaaaggcagacatgaagctgagcaggcatccccaggccagcctcagacagccccgccggggagccccttcccctggggcagcagcctcgtctccccagcggctctttggcccccttgtccgggaactgggggtctgggcctccagagccatctgctgtcgtgtcttactgaattctctgaatcatctgggcctgaccgatggcttccttggaaacctgaataatccaagaccaatgaccaggcggctccctttgttggggcagctgccgggaaggagagagcgttcactctagcccagaccagtaggagagcaggggctggttcttgcaattggtatggaaaaacaggtctgacctccacccacagtgttgggcaaggccttcaccaggtgagcgccttgcactggtgtctgggggctctttcccccgctttctccatggcctggggctaatcacctcctcttttaggtgaactcttttgtgatgtcactggtgggatggagtggtctcagatgtgtctgggacatctggggtgcagaatctgtatttctgggccccctctccagtcatcatcctggagccgatgaaggcaggggcttcctcccatgtgcattttgggagtctgttctgccctgtctcaggtaacccccaagagggaggagtctctccgtatagaaggaggaaacctgccagg

SEQ ID NO: 12910 - DNA, 2300 bp, Homo sapien
caaccccatgccaggtactgctggaggaacaactgggctcagaaggagagagcctggagtctgtgagacaagagccaggcctcccccttctctaattccaggagtacaggcctgcacccccacttccttccacactctctaggtagtattctctcttggcccttatctaaatgcattcactctgataaaagctacaggaagatggaattctccttccttccccaggatgcctgcctcccgggacagcttgtcctggtgtcccctgaccaatgacagaacaagggtgtgtgcccatgcccggagtggctgccgggaaaagaactcaatgacagcacattctcccagcagtccagccccaggccaggcatcacccccaactctccccactccaaaccaaggctgtgcccagggccagggcagcctggaagggtccacagtgtgcctcctgggcgaggccggcaggcaagtggcccaggctgtgttcaaggccacctgagaagcaccaggaggctgctttggtgagccaagccacacagcctttaagaacgtttcagtactcaaacgccttttatcagtgtggtggggaaaaggctttctgcccacttttcctgtcaagaagctggaagataaaactttgggttttctatgggaaacccaaaaactgagaacagctcgatcgggcctgagagtgtgtgctcttgaagaatctcccagccagcaacccgtgcattcctttgggtggggtggccacacagcgacctgcttggagctgggcacagggaaagaaaccccaatgtcatctccagccaaaagattccatggcaccgcccttaggaaaggaaaagccccaaagccctggcctccccagtcccacccagggtgttaccgggggctccttcctcctgcttcagtcgagtctacgcaggggacagtgcagaacagtgactcacacatggccctctgggagcctcttatgataggggcagtaaaagtggggtgaagaaatccccacgtctgcctctccaggtctcccctttctccaattccaggcgtccaggcctgtaccccacttccctccacactttctgaggactgttttctcccttggcccttatctaaatgcattccctctgataaaagctgcaggaagatgggattctccctccttccccagtgcttgggggcagtcctgtgtccagtcttccagttttccagaaaatgtcctggacttaaagagatttgggagaaaataaacttgcaaggaagtgctactgtcacaggcacagagtgatggagacagtcacagcagtgccagaaaaggcactgtgtaggcgggggcctctgggagcctgggttgctctgggaaggtgaggagctgaggcccccatgctgtgaatgaggaatgtttcctgcagggtcctgggaggtctcctgggttggcacaggtggtgggtggctcttggatgggcatctgccactggcctgagtgactcagcacacaatacttctcttcttcaccatgaaggcccagaggacccagaagcaccatatatacgacagggcagcaaccagcctctgtcctgccagcctgtgtgtggggaccaggctgtgtgtggggaccgtctcggggccactgcgtccatagagctaaaatccgacacagccgccctcatggctccttccccttctgaggttgtcctggaaacgggcttcccctggggtagtctgctcagcatttatgaaacacgacacacgaatcaaactccatgcccatcagctcctcagctctgtcctttgtgggtgggcctcagcagccaggctgtggcctggaccgcaccccgccaccctggcaggtttcctccttctatacggagagactcctccctcttgggggttacctgagacagggcagaacagactcccaaaatgcacatgggaggaagcccctgccttcatcggctccaggatgatgactggagagggggcccagaaatacagattctgcaccccagatgtcccagacacatctgagaccactccatcccaccagtgacatcacaaaagagttcacctaaaagaggaggtgattagccccaggccatggagaaagcgggggaaagagcccccagacaccagtgcaaggcgctcacctggtgaaggccttgcccaacactgtgggtggaggtcagacctgtttttccataccaattgcaagaaccagcccctgctctcctactggtctgggctagagtgaacgctctctccttcccggcagctgccccaacaaagggagccgcctg

SEQ ID NO: 12911 - DNA, 2300 bp, Homo sapien
tggttcctgtggacttctggtttggaattttgcctcaccaggtcaagcgtggttagggtggaaggtgtccagtatcttgaaaacctggccctggaggaaggttctgggtcagctgcaatgagagactggtgattaagggcaccgtgggcaggacacagtcctcgccttacccaccccatccttcctgttacccacagtctgctggcctccatgcctcttccccttgtcacttgtgtctcctccttatgcacagagctgcctgcctttatgaattttcttttcttttttttttgagacagcgtcttgctgtgtcacccaggctggagtgcagtggtgccatcttggctcactgcaacctccgcctcccaggttcaagcaattcttgtgcctcagcctcctgaggattacaggcgtgcgccaccacacccagctaatttttgtatttttagtagagacgggttttcaccatgttggccaggctggtctcaaactcctgacctcaggtgatccacccacctcggtttcccaaagtgctgggattacaggtgtgagccaccacgcccagcctgcccttgtgaattttcacctgctccttacccctcacctgttaggactgtttcttgcttttgcccctgtcggtcccctgccttaacagacctaagcagctgataatgcaccaagcttccctgaccaggtggggtgtgtctatcacccaagggcagtcctacagaccctgaccaaaggccgttcctgggcggcccaaggtccaggtttcttccacctgctcttccctgtttatggggatttgcaagcctaattgcatcagcaggagcccatctctcagagaacccggactccccaagcagactgggattttgggaagggtgtggggggtgtcattgctggatacccgtctttctgcctgtcctttctcctctctgaatcctggggcccctctccctccttaaagctggagtggacagagggacaggagaggatcagagttcatcccccctgggaaagagcaagagcgaatgaatcccagcgccagcggctgaggctgccttccgtgccttccctccatgggcgacgggtgagtggggcttaggaaactggaacagggaaggttctgttaccacactttggaactttccccctgggattcagcagttgagaagcagagacctttctgccctgggtgaatgggtccttgggggaggggttggtcttttgtctcgcatccccatctttcctttccttctgggccatgctcctccctggctggaaaaaggtggctgtgctgtccctgtgatccactctcagcaaatgcgtgtggctcaaataaacaaagaacttacctgttagagtgaaaatcctcaggagattgtacccaaatgccatgctctaaatattcatggtctctctaatgccctcaagacgtgatttccatgggaaccatcctcccctgggggcagttagcaggagtacgtggggcacgtgaggtggtcctcctttcagcacaccgtgcccatagaaacttctagaaatttctgaaaatgctctgtgggcagctcttgggtggcagtaagtccatcaacccccatctaccccgggcctgaagcgctgcgcttgctctctttatgtgtgtgcacccgaaggatttcctggtctctgtagctgatcctgtgagcccctcaagcatgaagcctcccttggggcttctcaaagcatggagaggggcccttcctgtcctttgggaaaatcttccccactgtgtcagttatatgggaacaagagtgatggggtctttctctaggcctgtgccacaggacagagaacacgggattctgctgttcgctttgagccacagcctttaccagcccggcttgtgtggggggccccttcgccttgctgcaaagagctgttccccaaagggcatatccacagggtacaggttttaaaaaggcttttttttttttttttgagacagggtctcgctctgtcgcctagactcagtgcagtggcgccatgttggctggttgcaacctccacctcctgggttcaagtgattctcccacctcagcctctctggtagctgggactacaggcacgcgccaccatgcccagctaatttttggatttttagtagagaaggagtttcaccatgctgaccaggctggtttcgaactcctgacctcaagtgatccgcccgcctgggcctcccagagtgctgagattacaggcgtgagccaccgcacctggccaaaaaaaggcattttgatttaggttgctgtgtttgc

SEQ ID NO: 12912 - DNA, 2300 bp, Homo sapien
ctctggaggagaggaaaagtcagtggggggtggttatgacctaacgaagggaacctgtaggaatctgggcagagggggaaggggtgtgagctggagtagtcagggtggcctcctggaggctgtactttttcccccccttaaaaaaaaataacagctttattgaggtataatttgtatactgtacaattcacccacttacagcatacaattcaatggtttttactgtagccagagttgtgcaaccatcactacaatgaattttagaacattttcatcaccccataactcttagcagtcattcctcattttcttctcttccccaggattctgacaatcactagagtattttctgtctctctggacttgcctatactggacacttcatataaatggaatgtggtccttcgtgactagcttctttcactgagcataatgcttttgaggtttatgcatggtgtagcatgtgccagtacttcattccttttcatggcctaataatattccactgtatggatgtatcacattgtgtttatccatttgtcaactgatgacattagattgtttccaccttttggctagtatgaacaatactactctttatagtagtattatatactatatatatagtatatactattataaacttatacatgaacactcatgtataagtttttgcatgaacatgttttcatttttcttggctacataactaggaatgcaattactgggccatatgcttaacttgacgtttaactttttgaggaactgctagactcttttccaaagtggctgcaccattttacatcccagggggaaggctggacttttcgtgtatgctcagatgtgaattcttttctttctaacttctagaaggcaggctgatttggtggaaatccagggaagatggaggaggagggtgtgaggagagagcagcagggcagagaggcctggggatcctttcaccagagccctgggctcagtcctgtctggtcctcacttgccatatggccttgagcaagtcacctccactctctaggcctcagtttccttatctctaaaatgatggtattagacctcgacgattttgcccccggaggacacttgtgatatctagagacatttctggtcgttacagagagaggctgatgctatgggtattttatgaatcatggagaggccatggataccgttaaacctcctgcagttttgaaggaggtttaataacaaagcattagctggccccaataacaaagcattagccccaataacaaagcattagccggccccaaatggcagtagcggccaggtaaagaaatcctgcatgagactgaggtgacctaatagggtccagtcctgctcagtcactctgggaaatgctctgggaaaacactgggctcgggaggcatttttgaacacccaggcacttagaagaggcctcacggtcccacctggggttgctgtgggtcttgcatttgtgtcagctgtctggcgttctccatctgcggtacccggcacaggtgaattagatgccaggcttgatggacgagcagtccgccttgttgaggagtgagctccttgtcacgggaagcatccaagaggaggcggcgtgcacatctgtcaggaatgtggaggaggcgccctggctctggtctgaggttgcccttgaacgatttcgaggctccctcgggcaaggctgtggctccgagtgggacgaactccccgccagctctgggcctccccacctgccggcccgcggtcggcgccggcacaggcggagggcgtcttccttcccctgcggccccaagccaagtggaagacttttctctaagtttccctctccgaagccccgcgggcctcccgcgccccagccccagccacagcctgtggaggcggcaccccgaggttgggcgcccgtgcggcgccttggccccagcaccccccgccccgaggcccggccccgggggcgcggccgcccgggcctccgtgtgccccagggggctccgggccgcgagccgctgccgaatggcttttgacaaaaaaacccttgaccaccaaggccagcctcttcctgaaagccccgctcgctccgatacaggaagtagaagggagcgagagccccagagcgcggcggcagcggcggcctggcccttccagagggccagagccagggacatgcgggcgcccgggactccgcgttccgcgcggcccggcgcctgagcgcctccgttccccgtcccggagctgccggcggcatgatccgacacgccggggcgcccgcgcgcggggaccccacggggtaa

SEQ ID NO: 12913 - DNA, 2300 bp, Homo sapien
agagtggaggtttaaaaggtgtaagaacaagaaaagcactctcctgcagagagagggggtcctgaacaggtcttcggtccatggtgaagtgcaggaggttttatagatgagcttgaggaggcagtatctgatttacatagagtaccagagattggctggacaggtgtgccatttgcattgcatgcaaagaagctggcagccccaccctaatcttttattacgtagatggattctctacctggctatgttgcctgcttttctactgtacacatggtgacaaagaaaagggaagatgaagcctccatgttaaacatacctggcttccaggtagcccttttctgttggcacagctgccggcattcacccatgcaagcttccagcttgcttgtctatgtttgccgcttgagttttcaggctgttctttgttaaaaaagaaatgatttgggggctgctttttgttaaaagggaagctcagcagaggactctgttaccctcactatctgcctaaataatttctttttagctcctgtatcaccaggagtaccccttccatcgccccctattgctcctgcttctaattctctcttcatcctgctctgctggaggagaggggctgctaaaaactcatttccagccttggtttggtgactaatgattcattgtgctgctgctctggaagggccatacactcacggagaccaggatcttaagcctcagggccaccctctgtaagccaagtggaggcaaaattgagcactcaggatctagagttgaaggtcctgagtttcaggtctcagctccaccacctacaaccctgtgatcctgagcattacttgcctctctctgcctcagtgtcctcatctataaaatggggataactatagtgtttcccccataggtttaagaggagaattaagtgagatcatagaatctaatgcactagtatttgggtttgggccagactagggaggccattaattaataatattaatatggttatagtattttattaacaattatatataacaactatagaataacaatgattatgatgatacagcaatatagtaatattagtaatcaatacaatggcagcagaattgggatatcaccagagcaaggtcaggacagagggctcctcaggagcctcctgtgcttggggccgtatcctcacgttaccagaaagggctcccgatccagaccccaagagaaggttcttggatctgacacaagaaagaatttggggtgagtccaaagaataaggtgaaagcaagtttattagagaagtaaagaagcaaaagaatgggtgctctatcctggtacactgtctcatactcatgctcgactgattatgcttatggttatttcttgattatttactgaacaaggggtagattattcatgagtgttccaggaaaggggtgggcaattcccagaactaagggtccctcccctttttagacataggctaatttcctgacgttgccatgacatctgtaaactgtcatggcgctggtgggagtgtcttttagcaagcagatgcattataattagcacataatgagcagtgaggacgaccagaggtcactttggtcaccatcttggttttggtgggtttgggccggcttctttaccacgtcctgttttgtcagcagggtctttgtaacctgtatcttgtgcccacctcctatcttatcctgtgacttagaatgccctaacctcctgggaatgcagcccagcggggtctcagccttattttacccaacccctattcaagatgggggtcactctggttcagacggacactcagatatcccagtgtccctgctccacagcctttcttcagcaaccttggccagacacctagttttccaaacgctaacccagaagcttggggctggagtgggagaggcttaagctccaggggtggggtcaagacaggagcagggaggggaagacatggaccaagtccttcccctatggagggatgccccctcccccttcctggggaagctgtgccacaggaggctggggagattccagaaggtgtcacctgccaaggagggatgagcttgctgagacctgccaagactcaaaggacattttaaaacagcagagtttgtgaaaggcagcagaatcccgctccccatgcttgccttcgggaccctcactggagcagaaccattgcttagagcgtgagaaggagaagcgagtgtccgtcaacatgctggctctgggtgagacctcggttagtatttggtttctagagcacagctgcgtcctcacagcctagagccatg

SEQ ID NO: 12914 - DNA, 2300 bp, Homo sapien
ggtctgtttcttcagtccctttgtcctggaaaggcacctgcttaccctgattgcgttggtgaccccagccagcaagatggcaaatgcctacatccctgatagtgcccacctcttagagcgagcacacgcttggctgctccaggccatcttgtgaggtctcctttcaacatcaagagcctgttgtgttgttgccacatcctgagttctgggctgcaagccaccctgctactcaccgatgccgggagagcaaccaaaatatgggaagtgtcgcaagttcctatgaaggaaggccgcctaacacggaggctaaacacacaggctgtagaaccagcccgacctggtcaaatcccagcgtctcactccccaatccggtgacacagggcgagtgctttcatgtttctgagcctcttaccctcatctgtgaactgggggcaaggcctatgatcaggggtcggcaagataacccaggtaaagcaaggagcccgtgggctcacgcgcagcaagaacgccatggatgtttgctcctctgattatccttgatgttattttccatagttttcttaagggtgaattcctcccaggagtgaagagccctgggtgaaaggctggctgcaccaattcacaaggaactctgcatctgcctgggtcatcctctgtccagctccaaacctagcaggctgaacaagacctgggacccttgtttctctccaggaggaagcttgagtgaacgcagggtggcctatgcactgactgcaattgttcccaagatgtagcatccctgtgtgctctttggagggtcctgagcctccgtcagatgcttggcagagtgtggtccccacagatcaagattgcctgtccctagcctgctttggtggccacagccatgactgagcccctggggactgggtcggtagagaggcacgcactggaactcagctccacggtgcaggagccttggcttcccctgactggggcagacgaccagcttcttattttaagctcgaggttgactggagtcagaatcactttgtggtgggtggctgctccccgcttggacagccgggtctgatctcgctggccacaatccataggttcgtccttcccacatataataaccatggaggccaaaacaggcccaatgttccttcctcctcgtgtgcctgtgatgtgtgtactgttgtgaccccattttagggatgactagactgaggcctaggaaggtcaaaccacctgccccagagcacccagctggttggccgcaggaattccaggccttccgtcccctgtgctctcaccatgccttccccacggctccagagcacagtgttgtcaccccccaccctgtgtcatcaatgccctccaatgtgggctctcacaccaaggaagagaactgaagctgagcttatcacatcacccccggcctcaccctacactgctggggaggactgagtggggcttcccctctcgaggcaggaagtggtgggagaggtttgaaagcgtccaagaggggaaaacaacctcaacctcggagtagtgaagcaaatgccttgaacagccctcccacccgtggaccccgcccacagaccccgcccagcacagcaacacctagtccctggcacagactgaccccctgcccctctcttgcttccacaggtttctgggactcctcgctgaatcctccacaagaaagagggaagccagcagagcccccaagagaccgggcccccggattccccctagtctccagcctcaggcccacagcccatgacgcaaactgtgcctgtgaaatcgagctgtcggtaggaaatgaccgcctgtggtttgtgaatcctattttcatcgaggactgcagcagcgccctgcccaccgaccagccacctcttggaaattgccctgcacgccctttgccgcccacctctgatgccacctcacccacctccaggtgggccccacgccgcccaccaccccctcccccagtgctgcccctgcagccctgcagcccagcccagccccctgtgctccctgctcttgcccccgcccctgcctgtcctttgcccacctctcccccagtgcctgccccccacgtcacaccccatgccccaggtcccccagaccatccgaaccagccgcccatgatgacctgcgagagactcccatgccccactgcaggcctgggccccctcagggaggaagcgatgaagccaggggcagcctccagtcccttgcagcaggtccccgccccgccactgcctgcgaagaagaaccttcccactgcccctcccagacgccgcgtttccgag

SEQ ID NO: 12915 - DNA, 2300 bp, Homo sapien
gaaagccgtgagtgcagagcccacagtcccgtgaccgtcctccaactgtgggtgctgtgttttctagaaaggggatccttccaatccctggtttcccaggatgaggctttcggctttagctattagactggaatcatggagagcttgttaaaacagtgtgggcctcgcccccagagtttgacccagtaggtctgcggagggggcctgagaatttgccttgggtttccatgtgatcctgctgctgctggtcttcggcccacactttgcagactcctattcctaggactgtcctcaatttcgggcagctggggaggaaaataccactatcttattctcactttgagcctttctcacccctatagcaccctttatggaaactgtgcagggccagagtttttggctgggtgtggtggctcactcctgtagtcccagcactttaggaggctgaggcgggaagatcacttgaggccaggagtttaagaccagcctgggcaacatagtgagaccgtgtctctactaaaaaaacaaaaaaacaaaacaaaaaaaaacctgcatgggttgggtgatacgtgacagtaacgcagaaagatggcctgctgcactgtatggtctttgaaactcctccctgcactggatggtggaaccgttttccttagcatcccatggctccgttttctctgcattatttcagctactagacgattttattccattagcaatgaataaatttgtgtggcagcagcttccatagcttctggcagcagcctctttacagcagtaatgtctccagaagcaagcctggaggacttgttaggaatgggtagagagagtgggcagagctccagtagcatggctggaggcccgtacctggatggggtgagctcacctgccccgtctgcctcacagatggtgttctacattgaagcctgtgagtctgggtccatgatgaaccacctgccggataacatcaatggtaggtggttggggcgccggcctcgacctgggctggcaagcaggttgctcagacaccgctgacatggaactgagcattctccgtaagcaggggctgctgagggcagcctgggccatagaagtggggagatacttgcaggtagctctgggcttcctctgcttctgaagcactggtagtcagggaataaagaatctgtatgtgagcctcacagtgctcttccaggttctcgtaaaactactgaagctaaaactacatgggctttggactagcctccatcctttgcaatgtgttggttgcactctgacctcaaagcaggtgactgactctctttgaccctcagttatccccatctgtaaaatggggataaagatagtgtgtgtctgttgggagacttgtattttaaacactagcatttgtccagcacaattctaagcccatggtagagagatagtaagtggtagcttttgtataggttcagttaatctagatgtttcttcaataaatgtcagatctctctggaaaccaaagtaagcccatattgttcaagtttcctgtgctgtggaaatgtcagcattcttccagaatagcatgatgtcctaagcatgccaatttgccaattgctgcaaaaaacatccaccagctggctcctctttcttccgcatttaattttagatgagttattgtaatcgaatacacaagtctgggtatagttacgtgtccctgccctcctgtgtggatcataagtagcatgcttcgatttcaccgggggagaaagaaggactcaagcttcaagcgtaatccaaggcaggaataaaatgcaactaaaagatcatctttaattcctcgtagtttatgcaactactgctgccaaccccagagagtcgtcctacgcctgttactatgatgagaagaggtccacgtacctgggggactggtacagcgtcaactggatggaagattcggacgtggtgagccctttgggggctggctgttcagctggggtttaaccgtcagactctgattgtcaaaggtctctaatggtctcactttttgcaggaagatctgactaaagagaccctgcacaagcagtaccacctggtaaaatcgcacaccaacaccagccacgtcatgcagtatggaaacaaagtgagtcgggagcctcgcgtgctggccctctgttccttgtgtcctaggtggacttgcctggaatattgatctcttgctaaagagacatgggatctgagtgaggaatgcttgaggcagggatgcctctgcctctcatgccactccatcctggggacctgtgggctttggaatcagacctttc

SEQ ID NO: 12916 - DNA, 2300 bp, Homo sapien
ggatcataggcatgagccaccgtgcccgtgagttacagttcttaaagacggtgtgtctggagttcgttccttcagatgttcagctgtttcctgagtttcttccttctggtgggttcgtggtctcactgacttcaggagtgaagccgcagaccttggcagtgagtgttacagctgttaaaggtggcaggtccggagttgtttgttcctcccggtgggcttgtggtctccctggcttcaggagtgaagctgcagaccttcacagtgagtattgcagctcataaaggtagtgcagacccgaagagtgagcagcagcaagattcactgcaaaaaccaaaagaacaaacattccacagcacagaacaggaccccaacaggttgccgctgctgtctcgggtggccagctcttatactcttatttggccccacccacatcctgctgattggcccattttacagagtactgattggtccgtttttacagagtgctgattggtgcatttataaatctttagctagacacagcactgattggtgtgtttttacagagtgctgattggtgcatttacaaacctttagctagacacagagcactgattggtgtgtttacaatcctttagctagacagaaaagttctccaagtccccacctgacccagaagcccagctggcttcacctctcaataatacctaagtcaatgggtgtggctgtgttcttataagcttttatttacaaaaataggtgacagcagtgtgctgatctataacttactgtaaaaaaaagattgtagaagaagaccacatgagacaacccatgaaggtagcccgaactcttgtgctggaatgtccttgagcaggagtgcacatactacatcacattaattccatttaactcaattgactgagcctcactacatggcactcgaatggatcgtagtttgtttttctctcaagtttcttgggaggcaatgccaccaaacatttgagaagtagcattgtgaaggaagtaagaggttgggattctggaaccatactgcttaggtcatagttctggctctgacacttaagacatatgtgacctttgcaaaattaacttaacctccctgacttaacctccctcagttgccctatctgtaaagcttgggtgacaataactgtctttctctctcaaagggttgttatggggactaaacgggtccaaatcacctgaggctttctaaagattccaaaacccagaccacatacaaaccaacaaaatcacaattcctgggggtaaggcggaggtgtcaacctaaaagaagagtttatttaggcgtaaagtgtgaggatggaccacccagaaacaccaactccaaaggaatggatttggcattctaaaatagggaagttaaggtttcatttatataggtagagataggaattttgagcaggataacagtattcctacaaggttggcacacaggtacagcaatttgattggttattggtttctttttgggaagggaacattgaacattttttacatagggtgtaataatcataggttttatgtctctggtctaagcaaaacaggataacagagggaagaagttataatctataacaaggttcattacttaacaaggcaggagcttttgtccctgaagccgtttaattcttcctagacatcgttcaataaaagaaagcgagaatataatgtgggaatagaagttgtaagcatacgtgactgacattacagtcagttcaaggcttaaaatattttttcggtgggggggttccaacagcttttcaattttattttcacaggggcatcagtatttttgaggctttcctaagtggctccaatgtgcggacaggtttgctccaagagctggtatgatctttcggtagatgcttctggaatcaccgcgcccccagacctcaagtacctcggattccccacctcacttcagtgcgcaactactgcccctccacccccgcgcccagcccagaagcccctgcccatgcacactgggatttgtagtccctttggctcgccggcctcgtcctctcctcccattggttttggcagatgccacgccccatagctccaccagtcaccgcggcacagtggcccttaagcgaggagcggcggcgcccgcagcaatcacagcagtgccgacgtcgtgggtgtttggtgtgaggctgcgagccgccgcgagttctcacggtcccgccggcgccaccaccgcggtcactcaccgccgccgccgccaccactgccaccacggtcgcctgccacaggtaaccgcgagccccagcaca

SEQ ID NO: 12917 - DNA, 2300 bp, Homo sapien
aaaattagccaggcatcatggcacacgcctctagtcccagctactcagggggatgaggcaggagaaacacttgaacctggaaggcagaggttgcagtgagccgagatcgcgccactgcactctaggatgggcgacagagcaagactccatttcaaaaaaccaaccaaacaaacaaacaaaaaaaacccaaaaaaataggttaagtaatttgtctaagatcatcagtcctaacaaggagtccacattactccgaagcctgtgcccttagactcaaagttttgtctccagattaaatattgggagtaattacagctcctgcttttcttcctctcaggtcaggtttcgtccaatacagtggaagactggttcctcctcaacttatttcattctcatcccttcgacaattaaaacactgtttctagagtcacactgtcccaagtttgaatcccagttgttctacttttgcttctatgtggccatgggcaagtaactaaacctcactgaatctcagtgtcttcatctgtaaaatggtttaatatattaatagtagtatgattttattaggtagggctgtgtaaaaaacaatcctaaatctcagtgacttataacagcaaaagtttatatgtcactcatgtgacatctcaaatgtgagctgcttcacatcccctttttcttccaggaccaaggctgaaagagcagccccatctgacacagactattctcatgaaaggaaaaatttctctggttgaaatacgtaataactgttaatactactgctcagaaagaccccctgccaaaagaagatcatacaatcaagcctgacatcagtgaggctggaaagaatgctcctcctacaggatgcactgcagtcgcatggcaacgggcgatgatgtgtaatccttaactggaaaagcaacttaatagttaggaacaacaataccacctaccagagaataatagtaccttccttatgcatgtgagattaaaatgaagtgaggcacatgcaatgcttaacacagtattctacacttaataaaaggtttgataaatgttagatgccattattatgattaccacctcctggtgctgctgaaaatttttctcttcaccgtactgggctaaacctcacctgagagcaataaaagcaggagctgtaattacttccaatatttaatttggagacaataaagctttgagtctacgaggaataggctttggagtaatgtggactccttattaggacagatgatcttagacaagttatttaaactgtttgaaccttactttcctcaattcaaagatttgagacttggaactgtgttgtaggcttgtcattagggccaagttagcccaatcctgtacacatagtgggtgctgagtatttgaattagtgaatgtggattttagacttatttcagatagtcaatgaactgtatgcataacataaccacaatactgccttttccatcctttgggtctcagctcaaatatcatcttctcagagagaccttccctgaccacctgatttaaagtacctcccgtgcctccagtcacttttccccgttttcttgtcgttacaactctggtaacgccctgaaattgtcttgtccattcactgttacgtaatatctgtctctgccactagaaagtaagcgccatgcaatccggatcatgttttcttatttccaccttctgccgtggacctctggcattctcgtctgtaaaacttaggggagatggtgaggaaagggagaaacacgaggtctagccggtccacccgggtctcaagccccgcccaactcaggcctcgcgttccttccaggctgggcaccgcctttggtcacccacgtggcccgcagtaaggccccgccctttgtgggtgtggcctttcacggcgtgcgggccgtccaccggcggcgagccacgtcacacgcacgcaggccatgcgccgcgcctgttctcgccgcgggcggaaaaggggcgtggccatgcgcgaggaccccgtagccgccagcgccaccgcctgagtcgcctgcaggtggctgttcgcgtctccctgccgtgcaggcagctcgaaagccactctgttgtggggtcctcgcttcccttccacgtctcccggaagcggtagcagggccccggcgggtcggggaggaggtttactcagcttgggccccctccgggccagccgccgagggggcgcggcccaggacggcggctaggccgtagtgcagcctctccggagtcctcaggtgaggcggaggcgagggcccactggacgagacgggggtgttaacggt

SEQ ID NO: 12918 - DNA, 2300 bp, Homo sapien
agaaagagaggggggtggttaatgtgttgatattacaaatccaggccgaaacactcagattttaaaagtgaccaaaatatgttggcaatataaatttaaaagtcttaaaatgtgcatgtcctctaacccaacattcgtcaaggatgcaaatatgggtatataaagatgttcagactgggcgtggtggctcacgcctgtaatcctagcacttcgggaggtactagggaggctgaggcgggtggattgcctgagctcaggagtttgagaccggcctggacaacatggcaaaaccctgtctctactaaaaatacaaaaaaaaaaaaaaattagccgggtgtggtggcacacacctgtggtctcagctacttgggaggctgaggcataagaatcacttgaatccaggaggcagaggttgcagtgagccaagatcatgccactgcactccaacctggggtgacagagactgtctccaaaataacaaaataaaatgaaaaataaaataaaataaaagtttcttgtggcaatgtttatgaaagcccccaaatgaaaaacatccagatatctatctactggggatcaactaattcacatacataatggagtattatacagccatttggactaatgctttagaaatgtagcaacatggccgaacgcaatggctcatgcctgtaatcccagcactctgggagaccaaggcgggtggatctcctggagtcaggaattcgagaccagcctggctaatgtggtgaaatcctgtctcttctaaaaatacaaaaaattagccaggcgtggtggcgggcacctgtaatcccagctacttgggaggctgagacaggagaatcacttgaacccaggagacagaggttgcagtgagccaagatcacaccactacactccagcttgggtgacagcaagactccacctcaaaaaacaaaaagaaatgtaacaacacggtaaaatattcatgatatataaatggagaagacatgtatggtataccttcctatgtacattatatgtgaaaaatgtctgaagacatacatcatgttaacaatagttgtttaaggtggtgggtttatgggtgttaaaaatttttttctttatgcctactggtattttcttttctattttaattaattagtttatttttgtagagatgaggtttctctgtgttgcccaggttggtctcaaactcctcggctcaagaaatcctcctgcctcagcctcccaaagcgctggggttacaggcatgagccaccatgcccagccccagtggtattttgtttttctttcttttcttttttttttttttttttttttgagacagagttttgctcttgttgcccaagctggagtgcaatggtgagatctcggctcactggaacctccacttcccagattcaagtgattctcctgcctcagcctcctgagtagctggaattacaggtgcgtgccaccatgcccagttacttttttgtatttttagtataaacggggtttcaccatgttagccaggctggtctcgaactcctgacctcaggcaatccacccaccttggcctcccaaagtgcttggattacaggcatgtgcccccacgccaggcagaactctcatacactgctggtgggaatgtgaaatgctacaatcactttggaaagcaatttgtcagtttctttaaaaaatgaaacatatacctcctaaatgactcagccattccactcctaggtacttacccaagagaaataaaagcgtttggatacttgtacatgaatattcatgggaactttatttgtaatacccccaaaatggaaacaacccaaatatctatcaatagataaatgaataaacaagttgtggtatatccacataatgagatactacttagcaataaaaataaatgaactattgatatatgcaacaacatggatgcatctcaaaatagaagccagacaaaaagaatacattctggataattccatttatataaaattctaggacatgcaaatgaatctgcagtggctgaaagcaggttcatggttgcctggggatggagagggtggaacgtggagagagggagtgattgcaaaggcgcaggaggaagttttgggaggtgaggggtgtgtgttcactgttttgattgtggtgatgacttcacaggtatatacatatgtcaaaacttaccaaattgcgcactttaaacatgtacaaatgtatgtcgataaagctgtttttaaaacagaggctgccacgagcatagaggcaaaacagtcgatgcctcccagtttcaagctggtttg

SEQ ID NO: 12919 - DNA, 2300 bp, Homo sapien
ccagggaggccaggacacctgctctgccccctgctctctatcctccaggctagaaccagccaccttcttgcagtcaacatccccacaagacactgagagtgatttttttttattgtgataaaatatccctaacataacatttaccatcttaaccatttttaggggcataattcagtggcattaagtccaattatgttgctgtgcagccatcatcactatccatttccagaactttttcatctgcccaaactctgtacccatgaaacactaactgtttcctcctccccctcagcccctggaaaccagcatcctatttcccatttctgttgttgttgttgttgtttgtttgtttgtttgagacagagtttcactcttgttgcccaggctggagtgcagtggcatgatcttggctcactgcactctgcctccacctcttgggttcaagcgattcccctgcctcagccttccaagtagctgggattacaggcatgcgccaccatgcccagctaattttgtatttttagtagagatggggtttcaccatgttggtcaggctggtctcgaactcctgacctcaggtgatctgcccgcctcagcctcccaaactgctgggattacaggtgtaaaccactgcgcccagctgacccaccctatttaagtataaccccaccctgtctcagcacagccgtccccttccgtgctgacaaactgtgggtgttacttcttattcattgtctgtcttcaccatctagaatgtagggcttctgtctgttctgtttaatgctgtaccctcaactgtgtactgttctaggatgttctaagcacatagtaggtgcttagcaaagcaaatatgtaaattcatgaatgtggccatttcagtctcctttgagctcccaccaggttctcatttagggacaggcgtgagcacaggtgtgggaaaggaagtattagtagaaaacagcagccgcagatggagaggggtgggcaggaaggaggggctctggacgatgccagccaatgacaaaccgtcacccagatcccaggttccctgtgacagtggggtcaggtggcaaagagcttccaacacggcccccagagctggagcccaaagagctggagcatcaggggccccagaaataagggaagccaaccaggaaactgaccttttacacaaaatatccaggttttgagaatgctcaggaagaggtgagagctgttctcaaattcagatgggctgccagtggcaagaaggtgatgctaaggggttgcactagggctaatgggtaggtgttgcaaggactcctattttggcggatgtaataagaactggcccccactcctccctctacctaacaagaggtgtccaacagtggcttaagcttcctggtgaaagtgagcccctggttcccgtgtgtatgcagagcccaggattcactcacccatggcttgaacctttaatggatacattcatcagttacctgtcaagtgcgtttcctctgtgccagattgtgtggcgctcagcactgtgaaagtaatgatgactaaacattattcaaataaatacacattcaacaacaaagtgtgaaggcacaaaactagcttgccagagagagagaagcctcactcagacaggggatcaaaggcccctctagagcctcctagatattggagagagccatgagtgatgggcatgcctccagcctgtgagaccgggggagcataccccaggcagagggcacttaggaaaaatagcacggggtgctagcgctgccagggacctcagtacacatggaagaaggcaaggtccagagatccgagtgacttgcccagggacacaaggcaaatcggtggaatcgtcgaggggtggaggatcagccacagccccccgcctcccacgccacctcttggaaaccagatacccgcctcgcggccaagacccaccagctccaagcggcggaggccagaggtagcgaggggtgaggttagaggtgggggcgagcggggactggacacctggggagtggggaaaggggaagggggcggcaccgctgacgtcatttccggggtcggggtatataagcggggcgcgagggcgctgctgctgccaccgctcctgccactgcagtgctcgagccccgtgcaggggagcttgcgggaggatcgaccgacagacggacgcacgccgaggcactgcgcccccagccccgcgccggtgccaccgcagcccgaccccggccgccagtccagccgcccctcgcccggtgcctaggtgcccggccccacaccgccagctgctcggc

SEQ ID NO: 12920 - DNA, 2300 bp, Homo sapien
tctgtagttgtagttgtccacagacctgtaaaaatggcctttgcctgcctggctctggcctccccgctttgctctttctccctgaaaggctctgccagtaacaacccacacccagcaggctctccagccctggctgtcccaaaggaacacaagcaaaacatcttgatcatggctcctgcacccacggtcccaccaataggggctagttgtggaggtcacccaggaaagggccttaggagacactagtaggggtttctctggcagcaagagacacaccacgctgggtgtgtacttggaattcattcatggctgagctggggctgttttttccaggctctagtgctcatccaaatctctgacttgagggtcagagaaatttctactccccaccttcccagaaactattctcttccactagacaccacagttaaaatccaaaccatccaagagattccaacctctgtttgctcaattatatttcctatgttttagttgcagataggacagaatttaaacctctaccactcattctagctgtgtgaccttgggaaaattccttaatttctctgagctccgcctttttctccttttccttgaggggaggtgtaaagagtaggaatcatggatgtgaattgcctagcacataataggtcctcagtaaatgggcacttttattcctagagctgccttcttgatctccccatccctctccagaccctctacccaattcctgcctcccagaaaatgccctctcgaacaggtggttatctgatattcccaatgcaaggtccggggttgcagggagatacagggtacaggctgctgtgctctccttgctagatcccttatgggagacaccctggtcaccatattatacccagcagcctgtggtcaggggcaccagagcagctggctaagacctgaagattctatacgaggttgttgtgactacatgcattatacagcacttgccagtttgccatcttggatccttggaccggttgccttggcatcccgtagacacagcctcccaccccctcactccctgccggtgttgcctgatgcctgtctgacacctcctgctctctactcagctctaggctgtggaagcagggctggagttgtgaacccctccctgggcgtgctgacactccatgcttgaaagagtgtttttccatctgtacctcattaccctgggagagcagttgggaaggtattctcactcccgttttacaaatgaggacactgaggctcagagaggttaagtcacttctccaagatcacacagctaggataccacattacggtgggcaccatcatcaaagatcactcatttatcagatgcctaattatccacagcacctttgcaggcacaggataagactttcagaggcgtggctgtggttgacctgggatatgctcccaggtgtagtcaatgtgtgctcacatgccgcccagggattcacccatcccatgatgaacatggagtgagaatatgaagctgtgactccttgcatacgacaacaccatgggtgtttggagacagtaacctacatcctatttccaaacagggtagagccagggaaggtctttgtctcctctgggcagtccagaaggacttcctggaggacctgacctttgggcatcttcacgatcagagcacttttgtaagacatcattttagtgccctgaggcagttttctcatgtttagagaaatagcacttggggatgagaaggtaccaggtaccattccctacaccccattctcactatgatccaccttggaggggaacctgctggccatgtggttggagtggctgacacatggtaagcactgtgttaagggttttctattatcattgctatcactgtctggctaagaaagcagagctgtgtccctgagccagggatcatggactcccaaagacaaaagcaaataccctctgtcctcactagaaattcaccctagagcctccagggactgagccccatgctcaaaccagccccaacctgcccctgcactgtgttcccaggtgatgaaatgcatcgttgaggtcatctccgacacactttccaagcccagccccatgcctgtcagccaggaatgttttgagacactccgaggaggtatgagctggaggctaggggtgagggctgctgcctgctgggctgggaggctaggacatgggtgtgtggcttttggtggaattaatgatttaactcaacagtcactgactgagtgcccgtcatgtccaggcactgcaccagggtccaaggtgtacagacagttgaaggggtt

SEQ ID NO: 12921 - DNA, 2300 bp, Homo sapien
tgggctcagatgtaggcacagggcttggccttctccccgggcctggactcagcgtccaaggttagcagagcttgcctgaatcaagagctgtcaccattactgcctgctgcagggttcctggagctaccagccaggtcctgaggggttccccacccccaactcctgcccagccaggtcctgaggggttccccacccccaactcctgcccagccaggtcctgaggggttccccacccccaactcctgcccctgggatccttgctccatttgagcctttcttgctgtgtggccacagcacgcttgctctggcctcccagggagaagctgagtctggcgaggcagggtggctgcctgagggcccagctgagagaggtgagggacgccaacccttcaccgctccccaagctcacgccccatcagtgtctcattgggcaggccctgaacatgatgtgcccagcttacagatggggaaatggaggtcttcactcttatagacaaatatgccacagctgcacccaatgggacttttccctccttttctcataccaggcgccaaggagagggcacatcagcagaagaaacacagcggttttgaagatgaactctcagaggttcttgagaaccagagcagccaggccgagctgaaaggtctgtcccagccggtctggccggaggtggggaagggagggtggcagtgggaacagtggctatgatggacccagggttccagtgagtcgggagccccacccataatcccttatttccctctctctacaaatggggaaactgctgctcagagagactaggtcccttgcccaaggtgagtggcatgaccaggggtttcgatctggtcctgcctcacaccaaagccctcgctcggtcccgtctgcccagaagaggggctggcactctagggcaggagatctctggcatggcaggtggacagcttcaactctgggtctacccagtggccactgtagcagagcccccacccccagtgcctgtcctcctgggaagtggtggggcctcagaatagccaggatgcaggaggaccacagacagagtaggtgtgaaacgtgaaatgaacccagatcatctttcttgaaaccaaagagcttctaggagtctaagaggtcatgccttaggtcagtgcgacactctgagccatcctcccttcccggggagagccacaaactggccccgtggcgcttctgctctccatgtagaagatgggccggtaaggccggtgtccaggagctggatcctggtgtctcccatctggggctgaaagggaaagcccgcaagtgaagcccaggtgcccccactttggttgaagctttaatgaggcaggcagccatgtgtcagtgcaaagagatcccgagcttgtcatttggaggcttgggttccaggctcagctctgctgcccgcaaactgtgagatggacaggtcatcttacctttctgcagatcattttgggtttctgtgaaataggcataggagcacctttcaccagagtcctggtgaagctcagatggtggaatgtacttgggagcactttgttcagtggttatcattctaatgacgggaggaattttcacttgttcaaaggctgtctttaaggcagccacaataaaataccttttaatgaaaccctaaaatattgcagaattgagccctttcacaggatgctgaagacagagaagccccacatggaggggagaatgaagttgcagtcatggtgcctcttacacagagaggttaagcaacttgcccaagatcacacagctgacattaattttcagttcaggctttatctcctggattaatcttaaggtctggttttttgtttttgttctttgaataataacctgttttaaaagtcaggattaaaaagaaagaaacaaatccagctgtgctcagatcaagcctggacatggacagaggggtaaccctaatcgttgtcctgggctgggctcgctggaagccaagaaacataatgagtaacatctgaaattagcctgtggggaggccccacacgtggcccagtcctcagggcctgacttggctgtgctgtgtctgcagaggcggtggaagagccatcatccaaggatgttatggagaaaagagaggattccaaggaggcagagaaaagtggtgaagccacagacggagccaggccccaggccctcccggagcccatgcaggagtccaaggctgaggggaacaatcaggcccctggggaggaagaggaggaggaggaggaggccaccaacacccaccctccagccagcctccccagcc

SEQ ID NO: 12922 - DNA, 2300 bp, Homo sapien
attctaagccacagagctgaccctggaacctgtcaccacttaccttctaggctcccatggcctatgaaactcgcagtacccttgcctaaggcatgcagtgcccgtccctagctggccccctggaggagtcctgtttcccacccatcgtcttttccactctccatccatccgttttctctaccttgttaaagaaaaaaactaatcagattctcgttaaagatggcagggaagccaggcggggtggctcaggtctacaatcccagcactttgggaggcccaggtgggaggacagcttgaggccaggagttcgagacctgcctgggcaacacagtgtagtcccagctgctcgggaggctgaggtgggaggatcagtttagcaggggtgttcgaggctgcagtgagctatgactgcaccattgcactccagcctgggcagcatagagagatccttgtctttcttttttttttgagacggagtttcttaatgtaggccggccagggtgatcacataccaagcgtggagatattcttgacagcaggattctggctaaaactggactaagaaggccaaggacagagcccaaggtcggggcctggtcagaaagaggtctcggaggagcctgactcaagtgtgatcaagggaagtcttggtcacccgctggcaacttggctttttcttgtctcccagcctcaattcaagctcatcccccttccctgctccatcaaaatctccttgatttccaaggccagcttcagtgtctcctctcaaacttttctgagccttccctccacgggaatccatttttcctgcctgggcctggggagagaagtccatttctccttcccaaacccagagaccattgaggcaggaaagctccctggctgccccatagggcagggcagggtaggcggggtttagtgactccccggcgccgacgctgacccgcacccctgaggaaggggtctccggggacggccgctgttgtcgctgtcgcctccagtccccgccccttcccccctcagtgaaggggacctagagtgagaactggtggtcacgtcctacgcctaggagggcccctgggtgttcacccacccccccggggggccccatcctgggccagggtccgcttcctcgagggaaggggcgaattcctggaaggtctccttccgggcgcagttgcaatggattgccttgggggtgctgaaccctgctgggggtacagagacgtttccgaaactcagcggctcggtcgcccccaaaggccaggcggaacacacgcccacaccgcggctcccttcccgaagtaagaccgccgggccacggccgcccccaggaagccccgcgccccgcaccccacacccggggacacaaacaggcgccgggtagccgcgagggccggcgcggcgcctttaagaggcggcgggcggcgctgccccctggcggccgccccgccgcttcctcgccgccgcgggctcaagcggggcggccgggccagcgcggggcggcggcgggcaggggcggcgagtgcgcgggcgctcgccgccgcccttctcggcgggcagcgcgcgaggaccaggccgaggaggaagtggcggcggcggcggcgggtgaggatctctggccgggccgagtggccgcgtgcgccccgccggggtccaagcgcgcccaggggttacggcccggctgggaacatcagagggcgaggacccgggcgggaggaggagggaggaagggctcggaggccgcgcttctgccgccgcctgagggcgtgtggctcgggcccgcgcggcgggagggcgggcagggcgggggcggtgtctgcggaggcccggcttcccctcctgcgggccctggccccagctccgactcagactcaggctcagccgtgccccagcctcagccggcaggccgggcggcgcggcgctcgcgagccggtgggcgggcgggcgagcccgcaggcggcgggggcgtgggcggtggcagcttggcccagccagtggccttccgcgctgagcgccgctccctcctcccggccgcccgccgcgccccgccccgctccgctccgcgcggcaggactgcgcgccccagctccgatccccgttccgcgtccccgccgccgggaggaggtgcccactcgctcgcggcgcgcgccggccgccagactcggcctgtgggcgatttcctccggacccaggctccccgcccgaggaggaagatgcagacctttctgaaagggaagagagttggctactggctgagcgagaagaaaatcaagaagctgaatttccaggccttcgcc

SEQ ID NO: 12923 - DNA, 2300 bp, Homo sapien
cacactgggctctcgtgtgtttgccaaaggagtgagggaattccaggaaccctcctgaaccacccagcctcaactggtctttcagttcctaagaacagcaggacatttaaagtcgatgcctgtaatccctactgctgacttcaagtatcaagtttatagttgctgcccccatccccttcgtttttactcccttagccgccttctttttttttttttttttttgagacggagtctcactctgttgcccaggctagagtgcagtggcacgatctcagctcactgccagctctgcctcccaggttcacgccattctcctgccttagcctcccaagtagctgggactacaggcgcccgccaccacgcccggctaattttttgtatttttagtagagacagggtttcaccgtgttagccaggatgatctcaatctcctgacctcatgatgtgcccacctcggcctcccaaagtgctgggattacaggcatgagccaccatgcgcagcctcccttagccttcttttatccatcttgtgcctcggccctaggggtccttgctatgatcttccctttatccagctttccatgtcccccccaggagccaggcattctaagccacagagctgaccctggaacctgtcaccacttaccttctaggctcccatggcctatgaaactcgcagtacccttgcctaaggcatgcagtgcccgtccctagctggccccctggaggagtcctgtttcccacccatcgtcttttccactctccatccatccgttttctctaccttgttaaagaaaaaaactaatcagattctcgttaaagatggcagggaagccaggcggggtggctcaggtctacaatcccagcactttgggaggcccaggtgggaggacagcttgaggccaggagttcgagacctgcctgggcaacacagtgtagtcccagctgctcgggaggctgaggtgggaggatcagtttagcaggggtgttcgaggctgcagtgagctatgactgcaccattgcactccagcctgggcagcatagagagatccttgtctttcttttttttttgagacggagtttcttaatgtaggccggccagggtgatcacataccaagcgtggagatattcttgacagcaggattctggctaaaactggactaagaaggccaaggacagagcccaaggtcggggcctggtcagaaagaggtctcggaggagcctgactcaagtgtgatcaagggaagtcttggtcacccgctggcaacttggctttttcttgtctcccagcctcaattcaagctcatcccccttccctgctccatcaaaatctccttgatttccaaggccagcttcagtgtctcctctcaaacttttctgagccttccctccacgggaatccatttttcctgcctgggcctggggagagaagtccatttctccttcccaaacccagagaccattgaggcaggaaagctccctggctgccccatagggcagggcagggtaggcggggtttagtgactccccggcgccgacgctgacccgcacccctgaggaaggggtctccggggacggccgctgttgtcgctgtcgcctccagtccccgccccttcccccctcagtgaaggggacctagagtgagaactggtggtcacgtcctacgcctaggagggcccctgggtgttcacccacccccccggggggccccatcctgggccagggtccgcttcctcgagggaaggggcgaattcctggaaggtctccttccgggcgcagttgcaatggattgccttgggggtgctgaaccctgctgggggtacagagacgtttccgaaactcagcggctcggtcgcccccaaaggccaggcggaacacacgcccacaccgcggctcccttcccgaagtaagaccgccgggccacggccgcccccaggaagccccgcgccccgcaccccacacccggggacacaaacaggcgccgggtagccgcgagggccggcgcggcgcctttaagaggcggcgggcggcgctgccccctggcggccgccccgccgcttcctcgccgccgcgggctcaagcggggcggccgggccagcgcggggcggcggcgggcaggggcggcgagtgcgcgggcgctcgccgccgcccttctcggcgggcagcgcgcgaggaccaggccgaggaggaagtggcggcggcggcggcgggtgaggatctctggccgggccgagtggccgcgtgcgccccgccggggtccaagcgcgcccaggggttacggcccggctgggaacatcag

SEQ ID NO: 12924 - DNA, 2300 bp, Homo sapien
cgccactgcactccagcctgggtgacagagcgagactctgtctcaacaacaacaacaaagatattcacaaggatgaatttaaataggtaaatggcagtgtagaactacatccttcctagtcaattacacctttaggagactttaaataggcacagaaacgacaaagggcttatactgagaattgcacaaaaatgagttacttggcagcacaaggtagggattgtatgtgtcacaagagtatatagactgttctaccttcatgctctactcattgccatatcccttcgtggttccctgagactcaggtgaaattaccttccaatattgcctggagaagggcctcctcctcctcagctgcctcataatcctttattagtaccaataactgcaagaaaccaggggctgggccatcctctggcagattaagctctctgcgaattgttttgtggactgccccagcaatgacttggtctaggcgggcctgattcacagcatctctctcaattgctcctctctgtaccagcttctgtaacaaaggctccagccttagtacataagccgacaacttttcctcatccttctggtaagtggttagatatttgacctgcaactccctaggattatctgtaaccccaaatacctcctcaagagcctgcagacattcatcgacagtaattaaaggattgtttatcttgaggacacgaataacatcaagtgctgggcctcgaaggctctctagcaatcgccttctcttctctacatctggcacctgccacgcctttatcatctgagtagtatgaaacatccagcgtccaaattcttcttctcctggttctggagactccctgcccgagaacactctcagctttttatacttcaagcattgcagggcaggctgaagagcctctaatgcctgtgccaacataggggcccacatttccgggatcatgccctgctctgggtctaaggagccattttcatgtccaagagctctgctcaactcacccactgtcatgccctctcccgctaaaaattcatttaatctgcttaaaaatgtattatctgggtcagggggcttaaagatcactctccagatacccccttttcccggtatctccttagggaccagggcgtgactagtctccgcagtaagccctactaaggctactttcctgttctcatccctcctgaacatccttccaagcagtctgtactcccccaagggagctaaaccagcctgcagagcctcctcgatttctgccacactgcagctctgggagatgccggcaatcaatagcgctttccgagggttcatgtccatccccctgcaccagtcttctaaaagcctcaaagtcatggtgcccgaaataatagacttaagttctaaatatgccagaccacaggcgaccaccgaaattcaaagtaatcctccgcggtaccccagagaaatcttgtcaacgtgccgaggtccagcagcctgcaagacagagcagacaggttagctaaaggtgccaacgtccagggcaagcgtgcaggccccaagccccgcgcgccctgcccccagcggcgacgccagggcagccgcactgcggcgcgcgcccctcacccctcccagccctggtgcctggcggatgtcgggcctgcagggccgcgtcgggcccgcttccactcaccgtgatctagtgctcgtgcccgcgtccgtgcgccggcggccaaggtgcctggccgggccccgacgaggcgcgggagggcaggctcccctaggctctgacggacactcgggggccacagcgaccgatgccggtactccaggtgcctgtggtactgtctgcaacgagaagtgatggggcgatgacagtcgcgagcgggcaccagggggcaaggctgaggagcgctgagtcgccagacccagagagccacccacctggagggacgtgccgccacccgcgccgccggagctccggctccagcccggattccacctgttttggtctcgctcggggaagctgcgcggcgggcgggggcgatctgacgtcatgaggggcgggcctcgggggcggggcgcgcgcgcttccggcccgagccggaagctccgactgcggcggcatccgggacggcgggcgggctggccaccacgggacaggaaggtgagatccgggacctcagctttgcaagcaggctccgccggcgaccgctgacgggcgctgggctcgcggcgctgcaaggcggcgaggcccgggcctggcgccgcctgcgcagccttggtcgcggcgtgccggcgctgcagcgcggcagggggc

SEQ ID NO: 12925 - DNA, 2300 bp, Homo sapien
aaaaatttctgaatcatcactatgttgcacagtagaatagaaatatgaattcaggtacttagtcaagtttctaaagaatgcaaataacagacatgatttaacttccaaaatctgaagtcatcaacatgattttgtagtactctatctcaggttttacctaaaaattcgttattattcagataaagatagctccctaatcacatgtttttaaaaagcctctgccccacgacaacttcctgagatctgtgaagaaactgcagtcttgtgatcagactccatataggactggcagttttgtaatcgtagggaaaaaacggtgactgattttacgtgtcaatcagttgtagtctgctgatctgattagaagccttgacaaatgcctggtggcgattgcaaataactgccaagcatatagggatgatacagtagcccactgttttgggatcagctcttgtacaagagtataggaacaaaaacatctgtaagtaaggtaccagaaaaataactgtccacacccaaaaaggcaaggagagtaattgagctttcaaggagtgtgtccatgtggttccttcaaggggctcctcagggtgctgttgaatgtgttccaaggccagcctgttgtaagtctcactgatttcaaaaacatagtaaaatgctgctgcactggctaacagatacaatcccactccaatccatcccatccgctgacggaagttcatcattctccatgctctgtgccttcaaattaaaaaagaaaatacaattagggtctagtaatgctgtcacggcaactactccaaatgtacttgctttatctccaagaattctaggccgggcgcggtggctcgcgcctgtaatcccagcactttgggaggctgaggcgggtggatcacgaggtcaggtgatagagaccatcctggctaacatggtgaaatcccgtctctactaaaaatacaaaaaaaatagccgggcgtggtggcgggcacctgtagtcccagctactcgggaggctgaggcaggagaatggcgtgaacccaggaggcagagcttgcagagagccgagatcacgccactgcactccagcctgggcgacagagcgagactctgtctaattaaaaaaaaaaaaaaagaattctaaaatatcccactaacacacttaagatttaaaataattaaattaaacacctattaagaaatgtaaaacttacaggttgttttgtgtaatacttacaatcaagtaaaacaacacacacaaaaaaacaaaaaaccattgatttcagtatatactgagttctgctttttaacgggaatccctcagaataaatcactgcatcctacttaaacaggtccataatacccgccctccagaaactggaattaaactagtttctcacagcacatttcactttgacaggtgaaacactttctggcataacagtactgcttcagacgtgaacgcggggtgctacaagtcaagcccccaagttaagacagtaactcctaagcacttacaatggtcccgaaaatcttcctgttcccacggcaagcgttaaagagtcactcagctctgaataatcgggtggctttggcatttcagagaaagccaacataaaataaatcccctgggtcacccggctaggagaaaggtgagcgccgccagcctggagcaccagctactagtgattaagaacggcgtgactgcggcgggtcacgcgcggcccggcccccgtcgccgccgccggagacccgctctgagaacctgacccggcagggaggcgtccccgccacttgggcctccgggcggccggccccgccccctgccgcgctgcagcgccggcacgccgcgaccaaggctgcgcaggcggcgccaggcccgggcctcgccgccttgcagcgccgcgagcccagcgcccgtcagcggtcgccggcggagcctgcttgcaaagctgaggtcccggatctcaccttcctgtcccgtggtggccagcccgcccgccgtcccggatgccgccgcagtcggagcttccggctcgggccggaagcgcgcgcgccccgcccccgaggcccgcccctcatgacgtcagatcgcccccgcccgccgcgcagcttccccgagcgagaccaaaacaggtggaatccgggctggagccggagctccggcggcgcgggtggcggcacgtccctccaggtgggtggctctctgggtctggcgactcagcgctcctcagccttgccccctggtgcccgctcgcgactgtcatcgccccatcacttctcgttgcagacagtaccacaggcac

SEQ ID NO: 12926 - DNA, 2300 bp, Homo sapien
ccagccaattgttgtttccacgttttagctactataaatgctgctgttatcaacattcatgcgtaagtttttgtgtgaacatacgtttccagttttcttgggaggactaccagtggaactgctgggtcatatggtaacttcatgtcaactttttgaggagctaccaaactctttttcccagtggttacactgttttacatttccaccaacaatgtacaaggtctccaatttcttcacattccagccaacacttgttattgttctttttgattatagccaacatccatattatcaagatgtatttcccaagatggaaggaaagtacagtttaagctcttcttacataattgtaaatcctgactctaatatctagttcttgggtttttcagctcaggacggttaaaatgtacctgcctggccaggtgtggtggctcacgcctgtaatcccagcactctgggaggctgaggcgggtggatcacgaggtcaggagttcgggaccagcctggccaacacagtgaaaccctgtctctactaaaaatacaaaattagctgggagtgggggcgggtgcctgtaatcccagttactccggaggctgagacaggagaatcgcttgaaccggggagggagaggttgcagtgagccaaggttgtgccactgcactcaagcctgagtgacagagctagactccatctcaaaaaaaaaaaaaagtacctgcctatttctgcattcgaggcaattttttaaaaataatgcagttaaacttcatgtttctactttcaaactgcacctacaaaactggaaaggcaagggagtctctgggagttaatacgtgataaaatgaagtctgtcccagtctttggaacctgttcctactctgcgatagattgtactcttccaagtatgtctgtagtttcacacctgataaaactcctttttattcaacacccagctcaaaagtcttatcctttctgaagacttcctagggtgtctgggtttgcaacagttacagaggaccacagaaccactttcactttttttttctttttttttgagacggagtctcgctctgtcgcccacgatagagtgcagtggcgcgatctcggctcactgcaccctctgcctccagggttcaagcgattcttctgcctcagcctcccgagtagagtagctgggactacaggagcatgccaccacgcccagctaatttttgtatttttagtagagacagggtttcaccatattggccaggcttgtctcgaactcctgacctcgtgatctgcctgcctcggtctcccaaagtgcagggattacaggcgtgagccaccagcccggaccacttccacttttaataagagtgtctgcctgtctagtccccttgtgtttcacaagggcaggaactgagtcgcattcacctcattcttcctccagggctcagctcagggtttggcacataatagtaggcattcgacacgtttttttgtgaaataaacgaaatagcgatgagttgtggaaacgcttgagtagaagcagcccaaataaatatagtgataaatgccaacaatttttattttttaaattattttaaaaataataatagaaacggggtctcgatatgttgccctggctgttctggaactcctgacctcaagtgatcctcctgcctcgccctcccaaagtgctgggattacaggcgtgagccccacttcgcctagcccgccaaaaatttttagatgcaattcttctttcctcgaggctcactttgtccaagtctgccactctacacgggctccccaagccaatttcccctgggcgcccgccccgtcctccggtcactgcagcaccgtctcagagctcaccgtccaagtcctcgtctggagccgccgccacccggtgctgcacttccccctgtaccagagggtcgaataattccgttaccatgtccttcatctgggccacgccagacaacaggccctggaaagggtcgccgtcacccggcgcctcacaggacacccgcagcttctgcggcttcccttcctgcccgacgtactctcccagcagctccatggtgaccgctaagcttccagaacacgacaccgggaagcgccacccggaggcggaaatcagcccgcgtccggcgcaggcgggagaagggagaggagtgacatccgtttgtcggaagtcgctcctcccccttccttcgctttttttccttgtcattggttcctggcactcgggccccacctcctccggctacgcccctcacggccgcttttcccgcctccgccggggccgagccgc

SEQ ID NO: 12927 - DNA, 2300 bp, Homo sapien
gttcaaaattttaaaacagcaaattttaagtagaaaaggagataaaacaaatgtgacaaaatgttaaaaagtgaatatgtaggctgggcacggtggctcacgcctgtaatcccagcactttgggaggccgaggtgggcagatcacttgaggtcaggagttcaagaccaacctggtcaacgtggtgaaaacctcatctctagaacaccccatccactaaaaatacaaaaattagctggacgtgatggcgggcgcctgttatcccagctacttgggaggctaagacaggagaatcacttgaacccaggaggtggaggttgcagtgagcagagatcatgacattgcactccagcctgggtggcaagagtgaaattccatctcaaaaagaaaaaaaaagtgaatatgtataagaggtatagttaccttcctctaggaaggaggaagatagataaggaggcttccgggatgccagtaaggttctatttctttttctttcttttttttttaaagttctattccaataagccttttgcactcctaatgttctatttgttgatctgggttgtgggaacacgcacactttcctttcaagctgtgtacatgatttgtgcaaatttccgtatttttttttttaccacaaagaaaatattaaggaatccattttataaaggtaactacacttcaaaaatagtttacatatagacataacttttttcttttttttttttttaagtaaagcaggggaaaaattgttttagtggtgaccaaaggttttaaaatacctggggctatgtctggataccaggtttattcaacaatctagcactttgcagtgtaaactaaccttggtcaacaacgagaactggtattatgatctcagttcataccacataatgaatacaagtctctcccctcatctccccagtgttccaatccacccctcttcctaggtaacccttcttcctaccaattctcatcctttgtcagtcttcttcctacccatccttttccatttttgtacctcgaagtgtagggtgagtcactaaacaccacatcacaccccctcaaacacttgctcactcacaacgtcttccaaatgccaaacagatccttttctcctctctcccctcccttgccagagccacttgctgttctgtttccggtctatttccaggggaggggggcagactgcagatagacatgggtacttgcttcattttgccaaaaaaagaaagaaagaaaaagtactagctagcacttgtccaactaaattgcagaggaactagctgtcaaggagctcaccgcaaatgccctatggatttgaaaatctctttaacctgactctcccattcggtccctaataaataaataaataaataatcttaggatgggaaaatcagggacaaagatgtctggatctgagaggtcgcggggtggtttcgtgaaaagcagtggtgcaccaagaagaggctggagaggacggacagagcagctgctccagggcccttcctggcgggccggacagagttggagacaggggagaggggggcccctgctggacacaggctgaagggggcccaggaggttggggttaaaagggaagggtgagcttggggtgaggaagcggcagactaacggcggccccggaccaccactggggagacgactgcggcaaggcgggaatagggacagccgggccgggaaggggaggttcggcgggagccgggggagaggaggcccgggccgcgcgcccacctgagagtaggagcacttctcggagtcgctgccgcccaggacagcgcacgcctcattctccagctcctcgtcctcctcaaggacgtcgaccaacgataccacgggctccagctccgactgccgcccagcggcgccctcggctccggccatcctcaactgtcagccgaacagcggctcggccccggcggaggcgggaaaagcggccgtgaggggcgtagccggaggaggtggggcccgagtgccaggaaccaatgacaaggaaaaaaagcgaaggaagggggaggagcgacttccgacaaacggatgtcactcctctcccttctcccgcctgcgccggacgcgggctgatttccgcctccgggtggcgcttcccggtgtcgtgttctggaagcttagcggtcaccatggagctgctgggagagtacgtcgggcaggaagggaagccgcagaagctgcgggtgtcctgtgaggcgccgggtgacggcgaccctttccagggcctgttgtctggcgtggcccagatgaaggacatggtaacggaattatt

SEQ ID NO: 12928 - DNA, 2300 bp, Homo sapien
gattgttactaaatgcttttgaagtatagattctttcccatctacactttttcctaatcttgttttttcatgcaaagcagttgaacactaatgaaattaattaattaatttatttatttatttattttgagacggagtcttgctctgtcacccaggctggagtgcagtggtgtgatctaggctcactgcaagctccgtctcccgggttcacgccattctcctgcctcagcctcccgaatagctgggattaaaggctcccaccaccacgcccagctaattttttgtatttttagtagagacggtgtttcaccgagttagccaggatggtctcgatctcctgacctcgtgatccgcccgcctcagcctcccaaagtgctgggattacaggcgtgagccacctcgcccagcactaatgaaatttaatgtaattattttatataattggagagagttgtttctagagcctttaaaaacataatatggtacaaactcaaaccatttatctttccctgccatcattttacttgtgtgtttgtatgtgatataaatatttgcttttgtacatattaatttcccgaattgtgaagtcttactatgtgcttgaatgcttgaagaaattttaaattggattttgtaaaaagaaaaataaaattgttatttcctccttttttcagaaattttcgttgtgattgtggaaacagcaagtttaaaaatttggaatgcaaattacttcctgtaagtaagcactgtaactataaatgcatttagagcagctgaggttaatatttgccagagtgggtaaaaaaacaaatacctgtattttccaaaaaaagaagttcttatgcttattctttgcagatggccatttcattttttactttgttagaaaaactatataaactgttgagagcctacaagatagatggtaattaatatgaaaggtttgggggagagatgtacttgaaagtaattcaggtttaattatattggttgtacttattctctgaggcttttaaatcagcggatatgacttaaaaacaataaatagggtcaagagatcgagaccatcctggccaacatggtgaaaccctgtctctactaaaaatacaaaaattagctgggcatggtggcacccagtcatctactcggtcagctacttgggaggctgaggcaggagaattgcttgaacccaggaggcggaggttgcagtgagccgagattgcgccactgcactccagctggcaacagagcaagactccatctcaaaacaaacaaacaaaaacaataaataggccgggcacggtggctcacacctgtaatcctagcactttgggaggccgaggcaggtggatcacttgaggtcaggagttcaaaaccagcttggccatcatggtgaaacccccccgtactaaaaatacaaaaaattatctgggcatggtggtgcgtgcctgtaatcccagctacttgggaggctgaggcaggagaatcgcttgaacccaggaggcggaggttgcagttacccgagattgtgccaccgcactccagcctgggcgacagagcgagactccatctcaaaaaaaaaagaaaaagaaaaaccaataaataaggctgggcgtggtggctcatacctgtaatcccaacactttgggaggcctaggtgggagaatggcttgaacccagaccagcctgggcatcatagtgagaccccatctctatcaaaaagaaaaaagaagtaccttgaaattccaggccaatatcagttcacatagattgataattaatatttatgattaacttttatctccattttattgaataggtgtatttaatttctcctaattaccacaaaaaaaaacaaaaaaaaattattttttccctgtgtcctgaaaaaagtatccctttagtggtagtgagttttttttttcctactttgaaaattaaagatcagcctcttgggggaaataatgtggaaatgtattgaatgcataaattttataatgtgtgaaattatagttaaaattagaccatattattattgaaatcaatattatatttcaggacaaagcaaaggtaaattctggcaataagtacaatgacaacttttttggattgtactgcatttgcaagagaccttatcctgatcctgaagacgaggtaagagaattggaagttaaacctgggggtgtgtcccctctagccttgattcctcaactgcttgtcatatccgagcctctggctcttcaagaggcagtgtgggatggtgaaagggctctagatttatcttttcttatgaatctggg

SEQ ID NO: 12929 - DNA, 2300 bp, Homo sapien
cactgcctttggtgtctttgataacctgcaagtccctcctggtgagaggcagcgtcatggagtggactgagcagaggcctaggatgagaactgggtttaagtcccggctctgctgcttactagttggttaacttggaatgagttacttaaccaccctgggcatcaacagctcttttacctgtaatataaattgttatgaagatccagagtgctattgtacagcagctatatttctggtatgtagcaagcatacaagtggggactgctaaaaaaattccacagtgtgcatgcccagagatggcatggaagtagaaaagtctgaacttccactgctctctcttccttgtttggtcactaggtttgaggtttggtctacttcctcacttacacacctttcacatgcccactttcgtttctgttttccatcttataagaaatttctttcatgagggttcaaacccaagcatgagaatcaaacagtaagtgctttcttttttaacctaccaggaaaaaagaaaaaactcatttctagtaattattagatacaaaagcaatagcactggttttgcaattaagatagaatttgtaaactagtctgatcacagccactaaatcagagccttaaataaaatttaatttcatctggttaggtgattcattttcttgctacaaactccaaacccctttaatccgtaccctttaaaaggataggatgtggccgggcgcagtggctcacgcctgtaatcccaactctttgggatgccaaggtgggcggatcacttgaggtcaggagttcgagaccagccttgccaacatggtgaaaccctgtctgtactaaaaatgcaaacatcagccaggtgtggtggcgtgggcctgtagtcccagcctcgggaggctgaggcaagagaatcgcttgaacctgggaggccgagtttgctgtgagccaagattgcaccactgcactccagcctgggtgacagagcaagactccgtctcaaaaacaaacaaacaaacaaacaaacaaacaaacaaaaaagaataggctggacacaatggctgtaatcccagcactttgggaggcctaggcaggtgaatcacttgagctcaagagtttaagactagcctgggcaatatggcaaaaccctatctctacaaaaaatataataaattacccaggcatagtggtatgcgccagtagtcccggttcctcgggaggattaggtgggaagatcacttgagcccagaaggtcagggctgcagtgagccatgattgcaccactgcactccagcctgggtgacagaatgagaccctgtctcaaaaaaagaatgaatgaatgaatgaataaacatggcatagggttcttcagcaagtcagcaaaccacttttaggttctttttcttctttttccccctgctgtcctaattttctactgaacatttttaggttcttgttttagattgttgattttcattttttgctacagtttttctccttaaaatatatagtctggttttctactcatttcttttccctttgccattctaaattgtgtctgaatttggtaccttaaattgcatgacatattcttttataatgtttaccaaaatattggtcagacttagtcatgtataatgggtaatgaatagtattttgtagtttttatttcagacagagcaggcatagatgtcttgtcagaaagtttctagaacatcctcagttgtattcctttctccctttggcatttaatgttaatctcttagcaaagacatattagagtttggttttattaccagtttttgcattatcacataatctgagatgagtgacctgcttgaggagcattcgatcaagcagctttctttcatggctgtgtcctaggctgcactctgtgcctttgtactataactaaggtgatttttttcttgggcttctggcctagaaaaatatattatgctttttattcttgctgactgtggttttcttaagtacctcacttaattctctcagcctataaatttccacttatgaaatctgctaataaatgtcctttttttttttttttaatcttttttagaatcctcacaaattctttcctgatgaacgttttggggatgaaagtccactcttgacaatgagacagcctgggagatgtcgcgtaaacagtacacctcctgcagaaaccatgtttacagatctggactcttttgtggccttccatccacccttgccccctccaccacctccctaccaccccccagctaccccaatccataaccaactcaaagcaggctggaagcaa

SEQ ID NO: 12930 - DNA, 2300 bp, Homo sapien
agtagcttatatatatttagctttaattgtccacctttcctcctccctcttttagtaaaatgcctaattatacagattaaagattgatttttagcaactttattttaaggcagaaaaacaactaatcaattatgtgttatttgtatgtgcggtaccagtgttgacctcttaaatgtttgtaaattgcttacaatgttagataataatgaatggtgattgcctctaaggatttaaaacaaaaattaaaacatttattttcagtccaagtacttttccctgtgttttcaaatactcttcctgtaactatatatttaaattggtttgatatgttactttttactgacttagaaagtatataattggtacattttatggctcaaattgcagctaacacagataattcaagcttaaagatttacattttatgaaaatttgacatgtgaatttgacagcgtgttgttatttgtgaatgaaagcagttttcagtagctttttaaaaaaaactgtgatctgagatacacttgaaaaaatgaattaaattatttttatttcatatcaagaaatggatgaaaagaggctgctggatccagggttgaaggttcataaaggcctctgggattatactctgaagaacccgcagacggaatgcctgagtgactgaagaaaatgggtgctaatgcatctaattatcctcattcatgttccccgagggtagggggaaattcacaggcccaacagacttttataggtaactttcagtttttctaacttcattttcttttgtgactataatagaattgtgttttcggtagtctctgtagatgacaaaagaagtgagctgtagttattataataattctgcagcatctaggttttttcccccaacaaacgtaaatcttaagtctggtttgtatggtttttatcttaaaccacttgtagcacaattgagcttttctatgttttaaccataattgccaattaccttaggcaaactagcagtctccattggtgttaaaacagcgaagtacatatttcctgtgtcccatttcatttattttgcccatacaaatgcagacttgtgtaattaagaagaaaaagaaacatttcacaattatatacaagtaatgttcttaatttacaactctgcctatttttcattcctaaaaacccatgattaagatctatgacaaatgtcctttgatagccagggaacgaaagactttttctaaaaaaatttagactaatttgctctgtttgtccctatttcttatttaatataaaaaatgtaggccagtcacaatggctcacacctgtaatcccagcactttaggaggccaaggcaggaagattgcatgaggccaggacaggagttcaagaccagcctgagcaacattagtgagaccctatctctaccaaaaaaagaaaaaaaaatttttttaattagccaggcatggtggcacatgcctatactcccagctacttgggaagctgaggttggggagaatcccttgagcccaggagtttgaggctgcagtgagctatgatcttcccactgcactccagcttgagcaacacagtgagactccatctctaaaaattaaattgaattgaaaactaaaatgagttaattgaactttttgtcttcctttataaaaaacaaatgcaattttgagtggttcggtaatgtctgcttacagaatttttcaacatgaaaaatgttaaacgttgaaaatgaatgttaagaaaaaataaattttcatttgtttaatttttttcttagggacctcatcctattctcagcaaggctatggttgcgaatcaaagttgtatagccttgaccatggccatgagaaaccacaagacaaaaaaaagagaacctctggtcttgccaccctcaaaaagaagtttattaagcgtcggaaatctaataggtctgccgatcatgccaagcagatgcgagaactcctctctgggtgggatgttagagatgtcaatgcattagtggaggaatatgagggaacatcagcattaaaggagctttctctacaagccagtttggctagaccagaagcccggacattgcagaaagatatggctgatctttatgagtacaagtattgtactgatgtagacttaatatttcaagaaacttgttttcctgttcatcgtgccattttggcagcaaggtgtccattttttaaaacactgctttcttcctcaccagagtatggggcagagataataatggacatcaatacagctggtattgatatgcccatgttttctgctttgttacacta

SEQ ID NO: 12931 - DNA, 2300 bp, Homo sapien
ttcatcagttacttgaagtagctgtcagaatgagacagaggctctcattttcgctttcaactttattacaccaaaaccctatggataggggtaggtagtgaatggtgaagaatgcaatcaatgaaaagtaagcagctcagcagtgtagtaacaatgagctctctaaatggggtaatggggtgtagaggcctacatcttagttttggtctaatccatcgccagctgtaggatccacaacaagtcactcgcctctctgggtctggtttcccggctctaaaacaatattcacacctttagatctctaaaagtttttctgactccaaaattccatgacaagtctaataacagttgctattaacaacgtatgattcttgcaaagcaatttcaagtctttcttccacatttcaggaagaaagcaattcatttcagcaatctaaaggaaacagatgctattagggacaaaagattgttagttgaccagaccgggcgcggtggctcacgcctgcaatcccagtagttcggaaggacgaggcgggcggatcaccagaggtcaggagctcgagaccagtctggccaacatggtgaaaccacgtctctattaaaaatacaaaaactagccgggcgtggcagcgggcgcctgtaatcccagctacttgggaggctgagacaggagaatcgcttgaacctgagaggcggaggttgcagtgagtcgagatcgcaccactgttctccagcctgggtgacagagcgagactccgtctccccccccccaaaaaggttgttagttgaaaaagctaagtaattctgtaaaaatgtctactttctcattacagtaagatgttttcgcagagttaacagtgctctggtgtagataaccaagactgcttctgtaaattaggcctactccagagtacttattatctgtgctggtatgtgaagacgtgcaattgtagttcacaggagaaacaacactcctcagagtttcttgaaaaacggtgagaaagttctcaccctcggggtaaagctagcaaacactgtgcaaataaggtactgaaatatgcacactttttgccattcaagtagtccaacaagcacagcctcctcttctttatcaaacactcggtattgtctccctcccaacctgtcaaagctcaattccaggtttatcccgcaatagtaacttacccggacaatctaacttcccctgggagtagcagtcctcaggcctgctcccttcccagaccccgccggccactctcacgcccacccctggcggtcgcaaccccgcacccgggtaaacacgcgcccccgtctcgggagcggtttctcagcgtcctgggagcgacgggtcccgcccctcggcgcccggagcccaaagccggccgggctgccgtcgcgactccctcgggccgctctccccgccccgagcgccacacctcgcgcccctgccccagggacggcggcgcgctccagcccgcccctcggagcgcacagagaccggccagtccggcgccgccgcgcctcagccccagacggacgactggcccctccccgcccggcgccccagcgcctcccgcggcggcttggccccagccccggcgcccccacgcctaagaacagccccttcctctcccggacgccccgcgccacaccggacacagcctcggctccacagcctcagagacaccaagggacactcaccccggaggctcctcccgccgctgctgctgccgctgggaccgctgccgtcgcctccgccgccgccgccaccagcaccgccgtccgcaccggcgccagcacccccggccatcctcctcccaccgccgccgccgccgccctctcctctcctgtcagtggctcaggctccgggactgctccaggttcccctcgccgccattttgactcctagacggagcaggaggggctcggttcggcgtggccctggggcgcctgcgcggcgctgcggagccggccggagcccccgccctcccctgccgtcgtcccgctcagggtcacgtggcccgacgtcgccgcgcgagtcgggccgcgtgggggggcggtgcgttcgctggatccatgggagcggagtgcgcgcgcattatttttgctcgtcggctgggagccgggcgtcgggtcgctgggagtttgcctcttgtggcagcatcctgcttagtccagcgaattgtgacacattattaaatgtatcagaatataagaactgtgtcactactacgtcaccagatggccatttccacgaattcatgtttccgttcggcggccggcgtccctcgggtggtcgc

SEQ ID NO: 12932 - DNA, 2300 bp, Homo sapien
tactagaagtctccagctgtgcagatagacaaaaggacaaggtgcaaccagcagaccttacttggcttttcaaaaagttttagatttccacatcaaaggctgttagaaaaagtgttatcctgaaattacttagaattctattgttgttgataccattttaattttgttttttaaattgtggctaggaaatagaagcaaagtcaagtaataaaggttagtaataagtgtaaacagtggggactgatcttatttaacatttccataaattataaagaagcagtgtttacacaccgctttttagtttgctaatcatagctctttcagttaatgcaatacagtcatcccccatatactatatacgtgggattggttccaggacccaccacatataccccaatccaagcatactcaagtctgcctgtccgtcctgtggaatgtgagtataagaaaagtcggccctctcaatacggtgtttagaatcccatgtaccaggttgcattgatcgatccgcacagttcaaacccgtgttgttcaagtgttaactgtatttagcaaattaagacaaaggtaaaatgatggaaaataacagtaaatggcttgaatttagataaggttcacttacgcctttggggaagtataaaagtgtggaacaagaggtggacactcagaggtaatcattggctccaattagatggacctatttcttttatattttctcacttttccatgcatttcttgtctatcgccctgaggctgtatgttcaactgaagtgacccttaccagctagaggggaatttcaggcaagggactgctacaatctctgctacaatctccaaaccttcaaggattgggtaagagggtgaaaagggtgagatgggtaaagaaaatgaagtaatacaaattggaaagagctatccttttcaaggaagtaaggtgatgaagaatgagggtgaggaaaatacaaatctgaaggaagtccagaggaaaacaacaatgatattgtctccaactgaatatgaaaagcataaaataatggagggtcaagagatggttaaaaacacatcacaaaattccaaattgctcttatcctttgaagcttagaggtggtttcagaacaacaacaacaaaaaactgtgtgacacaaaacttgttaaacaatgggtagagattgaaaatgcaaatacaatactttcaaataaattcccagagttgctaatgtctatcagaggaaaaggaggtgtaacggtgcctcctcactgggttcagaatgcctgggttctgatcttggcttgcctacttgttagtatttctgagcctgtctccttggttgtaaaacagcaataaaaacacctatcctgactaccacaaagggtggctttggcgttcaaatgaaaccatggatctctctggaaaacgacagtgccccataaatacagtatttttgttattgcatcgctgaaattattgcaaacccccaaacaaggggcatctagggaagagcgacttggctctcccacgtggcgactgtgtgttttcatcaattttgtcctttgtttacaggggtatcttgttaaggaaaacttttcagtgtcttaaagattattttttaacctactacacaagtagcaaggtggtgcctgtaaaagtaccatgcagacaagtgcttacgatagacaagtgctcactgccaagaagcagccaccggaatgccaggactgtcagcaatgactttccgcggaagagttgttctcgagaaagatgcactcattgcatgcgaccacccgagggacgccggccgccgaacggaaacatgaattcgtggaaatggccatctggtgacgtagtagtgacacagttcttatattctgatacatttaataatgtgtcacaattcgctggactaagcaggatgctgccacaagaggcaaactcccagcgacccgacgcccggctcccagccgacgagcaaaaataatgcgcgcgcactccgctcccatggatccagcgaacgcaccgcccccccacgcggcccgactcgcgcggcgacgtcgggccacgtgaccctgagcgggacgacggcaggggagggcgggggctccggccggctccgcagcgccgcgcaggcgccccagggccacgccgaaccgagcccctcctgctccgtctaggagtcaaaatggcggcgaggggaacctggagcagtcccggagcctgagccactgacaggagaggagagggcggcggcggcggcggtgggaggaggatggccgggggtgctggcgccggtgcggacggcggt

SEQ ID NO: 12933 - DNA, 2300 bp, Homo sapien
gattagtacccttataaaagaggccctagagagctaccttgttgcttccatcatacgaggacacaaccagaacaaggaagtgggccctcactggacatcaaatctaccagcacattgattttgaatttctagcatccagaactgtaagaaatacatttccgtcatttataagccatccagtctgttgtattgtaacagcctgaacagactgagacagtaacagaaaggaacaaaagtaactgacctgcttcttcatattcataagcatgaaatgacaaccaaggatcataagatacttgaataaaactggcaagttcaaaataaataaatagaatgtacgctaaagaaacacagttcatggaatagagataactttttaaaagttcagattaatattctgaaagaaatctaaagtgataatatctataaaatactaacaggtgactgtaaaagcaaaaaatagtatgttttaaaactataattctaaaataaaaaatcatgggctagaagaaaaagtcaaggaaatcctgcaaaatgtagaacaagggacaaaacgttgatgagtgagaaaaaggttgaaagacagaggtgacccgctaagaagggccagtgtccgtcaataagaattttaggttgagaacaaagaaaacagagaagcaaataaataggaatagtgctcctatggctaaagaaccatgacttcagatagaaaggtcttacccactgctaatccatatgaatggaaaaatacccatatctaacagtatcctggaggaacgtcacaattccaaagacaaaaaggaatgcctaaaagattcccaaaaggaaaaaagagggtactcaaaggaatgacaactatattggcattatatttatcggctcactagatgctggaaaagaaaggaacaatgccttttgaaaatctctgaaggacaatgattttgagcccagagttctataaccattcaaattagcatttaaatggagaccaatatatatatattttgatttccaaggactgaggaactttatcacctacaaacccttcctgaaagaacagcttaaggatgtactacagcaaaacgaaaagaaatctaagaaagaggaagataccaggctgcaggaacagaggaatccagagaaaccctagagtgttactcgtgcaataggcccccaaaagaaataatgtgaagacacaggatcattgtagtggataaagttttattacagtactaaatttaaaaatcacagtatatttacttttccctcaagagggtctgggcacagtgcctcatgcctgtaatcccagtactttgggaggctgagacaagaggatggcttgagcccaggagtttgagatcagcctgggtgacacagtgagacctgtctctacaaaaaaataagaaaattagccgtagtgacagataattacatcactgtttctactgggtccaaacactctatttgaccctgccatgaatattttttatatcatcagccgactatagaaacttgttcttggttttcagtgttaagaattaacctatagacattttatggaagatttaatttgcattagaaacagtgtgctataaactctgccaatgccagggcatgttaagaggtatataaagtataggtagagaggaagacaaaggaaaggagtaggggtgccaagtccctcaccttaccctgcagaaaagagatacttagtgtgaggtggggttggggctcaggggagggtggcaggagagtttaggagaggataggacacgtgggtggaaagtgaggtgaatgagggctgggaggttgcagggagccctgagtggaaaaggcggggcagagcagggggtactgaactgaagagagtggagcagagcaggggtgtgctgggtggaaggggtggtgcagagcaagtggtgctaagcagagggggtggggcaaagcacggactgctgagtggaaagggcagtacagagaaaggagtggtgagcggaagaggcggggcagagcaggaggtgctgggcagaaggggtggggtagggggcgagggcagagcgccccctcgtggctggggcgcctgcgcaaaccagctgcctcacgagcactggagcttgcgttacttggcctcacctcacctgtgctgtccacgcctggctttgtctcacctgacgcgatatgcctctcctgcgtgggcgctgtcctgcccgccgccactaccgccgcttggccctgctcggcctgcagcccgctccccgcttcgcccactcggggcccccgcgccagcggcccctgtctgc

SEQ ID NO: 12934 - DNA, 2300 bp, Homo sapien
tctgtgttatggtgaatgtaaaaggtatagaaattcgtaaagttgctttttgtataattctgtagccgtcttaaatctagccacttctgctgtgatcctctgccagctctgaacttaaatgagaggattcttaacataagactgccagagcttactatgctgatgagcttgtcagtgcgtctccttcgtgactactagtcctgaactcacctgggacttgcctggtcctgggttggtccactgtgttaggggagctgcccgttatcttcaaagccccttgattaagataaagacattaaatttggtaaattgcaatctgtgtaattgcaattaatgtgtaaattgtgacgatttcaggggagatgatttgtatttttgctcttgtacctgcggctgttttgtgactttgtgacattgttatttagctatcgtgttcttgttctgcatgatagagcttagaaggtaggaaaaaactcagtagatcaatctaatgaatggttcagagaaacaatacggcattgtttcttgaagcatggtctgaaaaacatcggaatcactgagggagtttgtaacatggaattctggtcccacccggggactagttactaagaatcactgagaggtggggcctgaggatctgaatttttagcaagatccttgtggacgcttcttttgcatagactttgagagccgctgcactaagaccggaggctgtgtcttgctgctgggtctgggtggagcacaggaagagcactaggcaacggttttgtcgcagttcaactgctaactctcaggtgatcctgaacaatcacctctctccggacctcagtttccttatatgaaaaatactccagttgggctcctttcagtgctaatgttctgtaattaggctaaaaggctcagcaaaaggagctgaggtgtcttgtatgcacagcttcggttaattcttagtaaaacacctgtggattttccatttcattcatttgagctcaaggttgactgactctggccctctagtgtgcactgtggccacatcctttctgttgttagctgatgtgcctgttaagatggcatattaattctaacgacaatcagaaataacattaggaatccaaagaaggttcatctgctgcaaaacaaagaagagtctagtacttttctgttataatgaatacaaaagtgatccaagtcttcatcatcaaaccttggctgatggcctatattttgggaagtccaggaatatacaaatgtacatttagtgtaatgggatttggcctacatgcattctaaagctaaatagttatggttttgttgcatctcctttatttttattcttgtgcaggtaataataatagtaactgttaatattagtaataacagctaatatttgtggagcacacagtatgtgctatgctaaggactttacatttatctcattaaaacctcctaacaatccttctaatgaagtgaggtaggtattgttatgatccctgtttaaagatgttgttagaaagattattattaggtagcacttcctcccatgatcattgatgactcaatgcacatggtcatgtagcaccagcttacggcttcccttgtttggtgcttgctgaaattgctgctcggctgaaggttgcaaattacctcattgcccgacactccagatggtttgattgatggagcagaaatagcccggttttatttctgatactgcccttgacttttctaaaacttccattgggcaaatcatctaacttcttgtgcctcagttatcttgtgtagaatgtagtaatacaaataccaagtattattgaagattgagaaagtgtggaggaaaaatgcatgtaatggatatttatatttcttaacatattcattcatcagtcatttattgaccaattactgtataaatagtaccctatcaaacattatgtttcataacacttaatagagatggagcactagttgcttataacttaaaccagttcattaaagcttaaaatgtaaagttagcctattttgttaattgcaaaatattcagtgactgattactcaattttgttttgtagatcttggacagtcgatattttatacaactacatgtttgctaccttttctcaatgatgatattctgagtactttgccctacacgatgatatcaacgttggctacctttcctccatttctgcacaaggatatcattgaatatcttagcacatcttttctaccaatggctatatgtaagtccaatcttacctaatactagattatttttatgtatgatatgaatggaaattgct

SEQ ID NO: 12935 - DNA, 2300 bp, Homo sapien
atatattcacttctcacaatacctctgttaagatactatccccattttacaaatggagaaactgaggcttggggtggtgtagtacttgctcaagtcacactactaagtggtaaagtcaaggttgaacccaagattcttgtgactctcaattcattctctttttaccacatagcatcgtttaattaccttgagcatcagtttcctcatttgaagaacgaatctaatcatctgtaccttgcctgactgttacgagggtttgatcaaaaataatgtacgtgaagagactttcataaactgtagcacattatgcaaacatacaccatgtattattttttgctccattgaagctgttttcttaaaatccttgatgaaaggggatagaacaaaatttaatttgcatatggacaaaatcccagtgaaattgttgagattattgagtttttgcagggtggaatgaattgctgatgcaggtccactttcctgctgtgattcaactagggagctaaaagatgaatagtttgagagatctgaggaaggccctagacagagggcagaagagaatccaaacatggtccaaggagcagccaaattgcaatctggtgctagatgattcctttttgataattaggagctagtgatcccagaagttcatcagccaaaaatatcatcccttaatcactgaactgttctctggctctgctcagacgatcaaagtggtttttggtacagtgatagatttgcaaatcccaggcagaaagtagaatcaaaatgtaaactgagaatatctcacgatatgtaaacccattcatttcttaatgagctcccctgtcgttcgctcctgtgccggttactgcttgctgaatctgaatacccatacttaaatgactttgatgtacaaagaagaggaaacaattattacctaaacatgtttaggttgttttgcagatgctttcgaaaaataataagtaggaaccaggatcatcaaaaggttggaaatacagacataatctcaccctctgattttacatattgggaaacaaatcagaaggatcaagtggcaagtggcttatctaaggccatgggactagctaggacagacctgggtctagaacctaggtctcaatgcctagttcagtgcccttcccactgagctcacactgagcaaagaaatctttctaaattaattcaacaaataggtatgagcacctgtaatgtcgtggcactgttctaggcattggggatgctgtgatgagcaaaagcggacacagtagctgctctcatttaatttatagtctggtagtggaggccacatttagtgaacatttcacacaaactacagtaaaaatgtgtctctcacaattgctatgaaaaagaggcagaaggcagcacggacctggccggggaggtcagggaaggcttcccagaggaagttacatttgagctaaaacctgaacaattaggtgaagagaggcaggaatggcattccagacaaagggaatagcagcaggggggaacacagagagccaacacagctggagctgcaggcagaaggggtaagttctcagtggctggatctttctggctttgtaggctagggaactttccctccttttatcctaagaacaatgggaaggctctgaagaagtttaagcaggttgtttgctcagagtggcgataagcggggtggaaatgacaacctcttcttttcaaagaatggcctggaatgaatccaggtgtctgccagagttacaaaataccattcggttttgtagagccacatgaagacatgttcccagcctctgcatgaagatacctttgggggacatctcaaagtggggctggcccagattgcagccatggacatctcacggggcaaccacagagataacaaagctgtgatccgctatctgccttggctttatcatcccccctctgcaatgcagcaagggtaagacccttactattccgggaatgagggtaaagaaggcaggagacacccctgagtttcctcgggctcagctagagttaaggagtacaccgaagatttatgacagtggaatatacttggttaggaagatggaaatcagatcccatctccttacgtacttgctgacccagaatgctctttgacatgctgccaaaaaataaacctgtcctcccacaaaaacctcaattgtcctttcatgaagaatgaaaattttgagcttagaattaccactttaatgcttgatttcaactagttaagtaaattaataggtatgtatcaatatatttgccttcaagcagcttagattgtagct

SEQ ID NO: 12936 - DNA, 2300 bp, Homo sapien
tgtaaagattgtgctgagcaaaataccacgacttgttttagccggacaggcattaaaatatccagtgttattttgacctcagctgaccaatagctgctccatttctccaaactgtagatgagtcacctaggaagtccctaccccttcatcttcttgccatcctccctccatcctatcccacccccagtgagatatcctcttgttcccttttctacccagcatccagagttctgtctggcccccagcaggtgcccatggaggctacatatggaatgaaggaatgaaggattgaataaatgtctccatttctttgcacaaagagttaccaatgcttgagatgttcccctactcccaggaagtcaccctctcctgggagcctttactcaacccgccctccattcctgtcttcccctttctcggggcagctgtgtgtgacatgccagtgcacagtggaatggttggttttatccatctccctgacaggcccctgaattcttaggggggaaggaacaaggtctcattcacatttgtccctgcatcttgctggttgaggtgcaatctgcagcctcggggcggcgctctggcatgaaggaggccgctaagacgttgttctgaaagctggcttgcaaggtagtttatactctgcaaaccagcgtttatagtgtgtgtttacatgagtggcttaagggtgtccaaataccgggaaaaggtgctcagtaaatgtttcttccatgcatgcactgtagtatctgaccctcagctctgtgtcttaagcccctggttctctcatccaacctaaaaataggattgtccaggccttgagggccttctggaaggcgcccccatcagtcaaagcgcttgcaaagtgcttccaccacaagagcagagaggccgcgccatgcctgtgatgctgctaggcacagcttgtctgaaagagatgcaaccaggctacctcccgaagaaccgacttgttgataatcttgcctcaaacagaggagtttgcagatggttgaggaagagcagtggtagaaatgttctccccagggccgtcacaactccttcccagccgcagcctagtgttgcaagagagtttctgctgctgggactacaaaggagaggacaaggcccatggccgggagaggggcggcctgcacctttcagccccggcgcccgggagagcctgcggggagtgcggcggggagagtcctcaaggatggagcgcaaaaaagggtctcaagtcagtcctcgccacctttccgcagcctcgggagaggcttgggggaagcgcaggcaagggccaaaaccccatggaagtgggaatcctcggcctccagggtgaataaataattaagcgcccaatacacaatagcctcgctagatggagacgaggaatcactgcagcggcgctggcggcggcggcggggggagcgcaaccccgggcgggaggcgggagaggctctggctcggctcacgtctgttttcctttttcgtggattatttatttcgcctccacccacggctttgctgccccagcgggagctccctgccggcgcctcccgccgctgcctctcgcgggccagcgtgagggtagtagagagctcgggcaccccagtgccccgggcagccgcgcggcgccaccaggaaaggcggggagccaacgcgggcccggggagggctcgcgcggccggctccaggcggcgtggaggagactttccccgccctctgcctccgcctcggcggccagccctggccctgggagcggggtgccgcccctcccgccccgcgcgcggctaggcgcagtccggagccaccgcgccctgcgccccgtgcgaggacgccgctcctggtcctctgctcagcggcccgggaggcccaaccggcgcgcaaacttttgctccagcgccgggcgctcctccccggcatgtgaagcccccgggcgcccgcgcagccgccaaggtgaggacggaggccccgcctagagggcgggggactggggaggcggctggctttaaatgggggctgtccggctgctgggaaacagagctgccgcggggggaacgcggacctcttttccccgagcccagggtcggctggggccgccgccaggcaaggtagcgtgaggcgttggaagggtgcgggcggagatggaggcgtgggggaacccacgcccgggagcgggagatcggggctgggcggaggcgtgcaaaggggcagcgcacggaggtgcctatgttgcagtgtgcgcaatgaggccggctgggcagtgtgggtgcaggcagcgtgagatttcttggggccgt

SEQ ID NO: 12937 - DNA, 2300 bp, Homo sapien
cctggaggataggctgatggggcagaggctgggacagaggaagggagggtggggtgggcttcatcctgctggatggtggggaagggacgctatgaggatgagagatgggcttaacaaggggggatcgggcaccagaggcctcacaacttattcatgtcagtgccatgatttgcgcccaggttgttgagcctcagcctctgggcatgactattgcactacagtggccggggagggacaggaaggatgggtttctgtgcccattaggaaatagactttatagggtcagaaatgggggcacaaaggagaagaaaagttcagggagacttgcaggcttgggcaagcaggcaggtggtggagtcacaccctaagaggggggacctgggaggagggaccctgccatgcccttcaggatgatggtgaccatcagatgagatggggacactaggaggtctgtgctgtcatagcaaagacataacagttgaagagcacttacaggtttttcctcatctccatttccatgtcaaaatttaccagtcctgtgtcccgtttcctccagaccattgctaatctgataaaaaggcttccctatggaggtggcattggaaaaggctgggttcccttctaaccttcccctctctttttgccagggtccttcctgaggcaaatcctcagccgctgttgcacggggtaagagggaagggcagggtcagcctggggaggatgtggtgggatgagtgctcaggggctgagcacagcacatgtaccagccatcttggaagccacctcatgtgccagaccagatgggccacacccctgtctccactgagagtgagcttgctgtctccagaggtaatcgagcaagaataagactgacagttggggagaagatagtaatgcagatttaagcatcagtgtgtgcactggggaagttgcctgaggtgacctgtaaccttccatgtccagagtcaaagatgctgggatgctgagaattggaaactcctgggagtacccgcaggaaagagggtccattcgaggcatctccctgtctttcatctccagtttgtccacaaggcctcacctctggcatggccacccctcagactagccagtcctttttccatccagtacatctccatctctgtacacctcatttccaggtgaagaagccagatcctcagaatgtcagggctgggcaggacctcagagctcagccaaccaacctttgattttcaggggaggaccccgaaagcccaaagtacaaacagacaatggcctgcctgtgtaggaaaagagaaccttggcccacaatttctgcagcaagcagcacatgaagccaaaccaaacctctgtggcaatgggcccagaatggtcagggctctgtcaatcctggtcagcttccctattgttgactactgcttccaactcaacacccatgaaagaaagccaaatatgctcctaatgcaatcacataagatgtcgggcttccagctagccacctcccgcttccccatgcaacaacctccagtcagggcacacctgaggcctcccccttttcactatgatgcttcccctcaccctgcctgcctgggagtctctgtcaaatgcaagtgacagtggcccattcccttgccataccaagcacacaataaatggcctctgtttgatctcctttgggtggtcccaatttatttccacaacacagagacccaggaagggatggtgggttgtttaaggtcacattccaggtctaggacagaactcagctcattcgttatcacctcgttagaactttacttctctgactccctctattattctaggtagaattgaccacgttctccctcttgcctctcagtatccttcacactctatctcagcaccttccacacatgcgatgattttaaagtatgtcgaaagctctgtgatactcatccctttaagaagtggagcctaatactcctccccttagtgtggtctggatttagtcactcttctagtgaatagaatgatatgaagtgaccatctgtgacttcagagatgaggtcataagaggctcagcagcttcctccttaatctcttggatcagctctaggggaagccagctgccatgttgtggggatgctcaaggagccctgaggagaggcccatgtgatgaggagctgagaggacttgggccaaaagccagtggagaattgaggtctcctgtcagtagccatataagcaagtattctggaagcacatcctccattcccagtcaatatcttaacttcaacctcatgaaagaccttgagcctagctca

SEQ ID NO: 12938 - DNA, 2300 bp, Homo sapien
aatccttgttacttgggtgtggaaagatggtgttttccttttgattcagttctaggaggtccgtgtgaattgcctttgggtccctgcctccagaccctattctcctgcctcacgctcttcctcccagtctcccctcctccccagaccagcagagctaaaacaacccctattcatcctttagcctgctgaaagtgaccccagcccgggagctgggcactgtttccaccaagcttatcagatgaggagtgtgaggcccacacagatgaaatcactgcccagatgagcgaggcaggaacgaaatgcaattgtctgactcctaaggtgtgtgagtgacctctgtgggtgacaaacacgcttcaagggctttgccatgtgccaggcactggaatgccatccaaggggccaacgttggtctaggagagctcaccttggtgctagggtggaggtatggggggccgcagcgctcacagcagtaactcttcatagtcccagcacgccccaccaggaccaagtcagggagcacgggaatggaatgctgaggcaggtgaaaatggcccttttgctgatgatgcaaatgcccctttcctgagagatgatggcatattcagagaaatttgaaaaagtctgttatgggctagatttgggctacagacagagttgtgatcagaggccaggaactaaatgatagatgccgatgaagagtcttctattactcaagtaggacaggtgctccaggtggctggggtgggggctgggaatatgtaaggcaagagggcacaatgcccaccgccaaccccaccttcccctaagggcactgtagacactggctgagcccaaaccccagctcctctgccactaggggagagttctatctccctggtcctagtttctgaatctgtcaaatgggaagaacaatacccatctcgggttttattgactcattttgactcattggtttgtttgtttgatgaggattaaatgagatgacaaatatctaactcttggggcattgcagtattcagtgcaagttagacccctgccccatcacttttcccttggaagctcccatcccaggaggcaagggatcctctctgacgacgaaggtgtgctgtttgtgcaacatacctgagggacagtgtggctggaggggtgggagccaggcactgaggatgcacttgctgtttacagattgttttatgactggctgttggagctcctaaaatggctcaggagccaaccaaccattttactctatgttctgatttgtttattcattcattcattcagtcagtcagtcattaagcatgtattatgtgcctactgcatgcaaagatacatgggggattcaacctttctacttaaccttatctcacctcactccctgcagcgaactctcttcgccgctgcactgagcttctcactgtctccgctctccaaaatgcctaacactctccgtctcagtgccttgactcaaggtatggctgtagccatcactgctgcctctcacccctgaaacaaagcagcatgttagaaggatttgggttcagagtcaggaggtaaggattcaaatcttggctctgtctctcactagctgttaaggtctttagtctacctgagccccagtttcctcatctgccagatgggaatgacattaggatctatcacagaaggttgttgtgagaataaatactatgagatgtgtaagatatctattatggctaagtcagtgcctggcctggagttgaaacttagtaacaaatgtctgttgaatggacctgatgaattctggcctgggaggtgggaaacttgaatcttggtcacaggaatatgtgcttgaataagtcactgcttttctcaaggggctccaatcccttgattaaaatggcaggcttggatcaccagaatgccaagtattgacatccctggcttcccatcctgtgattctgacctggatccagggacacttggcacacagccggcttcatctccatcctccctcagggaagacatcactagtagatcagagtgttctgtctactgagcccttggaatctctccacagggcacctgccagtcatcgccaatcaaacccgagatgacagttgagatcaaacagacttttcattcctggttggtgcctgggagagtgacgaggcctatcagtactggaggacacagtcaaggtgatgggtgtgtgggggtgggggagcgtgcagagcaggggcgtgaatgtggggcggtggtccatctgggatgccccgcagggcagagacaccactaccatgtcacttttgtcccac

SEQ ID NO: 12939 - DNA, 2300 bp, Homo sapien
agagaagatcttctggagagaggaatgatgcagcccccacaaatcacagaaggcctggggagaaaagggcgagcacagcaaagcaggtggttacgtagtcagatgccagctgctggagaggttcaaactgttggctgtgcacaccagcctcacacagtaggcagcagggagctggccctggtggccacaggccctcagggcgctctcttcagccacgcgtgccagatgttttggagcagaaaggatgtttcctgcttgtaccagtcagggtgggctgggacgtgctgcagaaacacatagccctcaaatctctggcacttaaaatgatgatggtttggctctcacccatgcaaaggttgccgcaggcaggagcaaccctccagggcacgtagtggccaacaatctaggatgcgtcagtccagcggcacttccatctcggtccacacttccccgaccccgcagcagggtaggggcatggagaatacagtgctggctttcaaggcctaaattgagtcacagcttgtcagcaccgggccatctcctccaaacccttcattttgcctgtaaggaccctcaggccaggggtaggggagatggcttggagtcaggccacagcagctgtctattggccagtgggaaggagcagggccatcacttctggatggaggccctggctctgccctgccaatgcccccagtctgggtagggagactccagggaggagtcctgcaacctaagatgccaaatcttaggttgtagtacagaggtgtgggttggcgcacaggccaccagccatctggctggtgagggagacaggaggagaaggcagtagaaggggaagagaaaaggaaggggaaggagaggaggagggaagaggaggctgagtctgggcagaaaaatgatgaggcgtgaaaggggcccgtgagctgggctggcacggaggcacgaccattagcatttcccaggcggccgccctcgccttcagcctcaccttccctctggccagttggtgggcagggccaacagcggctctgggctcccttgcttgctcagagtggccctgcttgcagccccgccggcgttggcacggtgacagtagccaagtgtgcaaacttgtcccattgtccgcaggccagggggagccatggaaactggctaatatgacacaggaaaatgtttgctgatggcaattctatgggctttgtccacctctttctccatcatgacgactcgatttaagtccctaactgtttgactacaaatgcaaggggaccgtgcaacgccaaccttttgtccggctgcgctgaatgggcaattcaggctttgtgcagctcaattgaggaagcaaacataaagacaagattcctgagagctccagctcccttcccatggatatcccagcacctcgttagagagtccttcctcggccaccttttccgacaggcatcagcgcacctcctgaccttgaaggccctccatccccgatccctgggggatcctggcagggagggtggtgggggtggcagggggagacagagagagagacagagagacaggagaagagagagtgagagcgagagagccactcaacactcaaggacagcgggaaaagcagcccgccccggcttaccccgtccgattgtctgtccgcactggagcatggcagctgtaggcctggagtctttgggggaggtttgcaagcctgtctccactaggcccagccccttctcaatcctggacattttaaacacacacacacacacacacacacacacaccccacccccttgagaaaccagggaactgaggtcaaggggaggaggggggtggaggctgaggagagtggggctgaagggtagaaatttaccgggaaatgattgcatttgggagctgtcttttttgtgatggtccccatggtgacaatttgtgacggcaaagaatgtgggaacggggcgccgccgcctgattgggatgctttgtatctggagaggcgctcctgattggcctgaggggccccccagctccggggagttgtcctccattcagcccactcaagggttgcacaactgcttccagccggacggagctcggccggctgcgccggggcctgtcccaggtctgcagtggggaacctgccgggccacgttggtggggcctgggccgcaccttcggtcagtgtggaggcccggtggctctggcccgactgggtggcgggtgtgggggcaggctggggcctgggggaggggcgaggtgccgtgggtggcggccgaggaggcatgaaattgctgcagatgcttcttc

SEQ ID NO: 12940 - DNA, 2300 bp, Homo sapien
ctctgccaggaaggccccgcgggagccgggaatacttctgggagaagcgcttgagctgcttctgcaggtacttgcgatggtccacggagcggcggcagggtgcggacttatccagggctgccttgatgtcgctggacgccaggttcacgaagttcagcagcatcttcacatcactgtcggatgccatcaccagggggccactgcacgaggctttccatgaagagggtaggctctgctggtggccggcagctccaaggaagggcaccgagctgacctgggggacaaaacaggccatcggagtctctccaagcaaccacacccagccctcccaaaagaccacagcacctgtctacaaacagtctccccaccccagcacctctcagccctaaacagagtcctgggtagagggatgtgggtgcaagtggctgagcacttcctgcacacctgggatgcggcaggcaccagcagagcctcgcccagcctgcttgggtctggtgccccttcttgcagccaaggctcagaaaggtcaagcaagtcgcccaaggtgacccagctacaggtggcattgctggggctggcacacactcccagcctgccccatctcccacacaccacgctgccaacgtgtgcaacttgccagcgaggtgtttattctctgagctgaggcaactgttcctctttaaagcaaggccaagcccccttcctccctggtggtagcctccccctcccaccactcctgcccccagcacgaggagcaccagcccccctcctcagtccccacgctccacccccagctctcacgcaggaccaggcaggacccctgtctggcacttaatcgagacctgccttgcgggctgatctcaggctgcgggcagcagggattcccccgaagaagcatctgcagcaatttcatgcctcctcggccgccacccacggcacctcgcccctcccccaggccccagcctgcccccacacccgccacccagtcgggccagagccaccgggcctccacactgaccgaaggtgcggcccaggccccaccaacgtggcccggcaggttccccactgcagacctgggacaggccccggcgcagccggccgagctccgtccggctggaagcagttgtgcaacccttgagtgggctgaatggaggacaactccccggagctggggggcccctcaggccaatcaggagcgcctctccagatacaaagcatcccaatcaggcggcggcgccccgttcccacattctttgccgtcacaaattgtcaccatggggaccatcacaaaaaagacagctcccaaatgcaatcatttcccggtaaatttctacccttcagccccactctcctcagcctccacccccctcctccccttgacctcagttccctggtttctcaagggggtggggtgtgtgtgtgtgtgtgtgtgtgtgtgtgtttaaaatgtccaggattgagaaggggctgggcctagtggagacaggcttgcaaacctcccccaaagactccaggcctacagctgccatgctccagtgcggacagacaatcggacggggtaagccggggcgggctgcttttcccgctgtccttgagtgttgagtggctctctcgctctcactctctcttctcctgtctctctgtctctctctctgtctccccctgccacccccaccaccctccctgccaggatcccccagggatcggggatggagggccttcaaggtcaggaggtgcgctgatgcctgtcggaaaaggtggccgaggaaggactctctaacgaggtgctgggatatccatgggaagggagctggagctctcaggaatcttgtctttatgtttgcttcctcaattgagctgcacaaagcctgaattgcccattcagcgcagccggacaaaaggttggcgttgcacggtccccttgcatttgtagtcaaacagttagggacttaaatcgagtcgtcatgatggagaaagaggtggacaaagcccatagaattgccatcagcaaacattttcctgtgtcatattagccagtttccatggctccccctggcctgcggacaatgggacaagtttgcacacttggctactgtcaccgtgccaacgccggcggggctgcaagcagggccactctgagcaagcaagggagcccagagccgctgttggccctgcccaccaactggccagagggaaggtgaggctgaaggcgagggcggccgcctgggaaatgctaatggtcgtgcctccgtgccagcccagctcacgggcccctttcacgcctcatcatttttctgccc

SEQ ID NO: 12941 - DNA, 2300 bp, Homo sapien
tggtatggcaaggctgctgctctgaggaaactagaatcctggagtgggagcccagacctggggcaaggatgtcaggcttcagatactggtgggtcctaggaacaagacaagagcccagtgattcggaatgaggtccaaggtcagagacagctcagcacctgccacactgctgcactgggtcttcctggaatgaccctgagctggatctgctccggtctcagggcccagacaggaaaggctaagctggtagttgtggcctctgcattggggaggggacaaggaaggggtagggggccattcttccagacacctacggctctatcagacaatagtcacctttgttcctcttcatgaggtgccgcttgagcaattatactctgagaatccaaaacgtgcctgtgggagaagtgggaagagtcagactgtttggtggggtcacccccttgtcctcctgtcctctgccccacaaaatgggctgggaagaggagtgatgatgtgcagtggggctaccaacgtggccgctcccatagttgggaggagaggggcatcgtagaaggcttggccctggacatccagagacctgtattttgctcttgtgcaccacccaccttctgtccaacctcactctgttccccaccccaagcctgggcttcaggtttactctgtgtaaaatgggaaagctggacgcactgatctccagagcctgtccggcgttacacattcactttctgattggcagagtcctgccgcagtaagatgattcaccacataactgagacaatgctcaagttcccacatttctgccactttcccttggttcgtggagaactgccggagaccagctgtgacctgccagagataccagccccatctgtccagcggccccggggcagcccctctcactgttctttcccgttcttgggcacgttacagctgttagcagagcatttgttggccgtggccgccatccagggtgaggcccaggcctgcctttgaccagcacctctgcagagcaaagtcaggcctcctgtgcctacacaaatagaaattaggaggcaattagccccccgggtgtgtgaatttccttttgaggttttagagtcagattttagccaaacacagcatcactaacaatcataatactttccactgagatcccagcaggaggtcgctggcatcagatttccaggaagcctgtgtgccaggaggccagaggcgtgggaatgggcctggtggcacctgcttctctccccttcccccaccgccccaccccctgtaatggccacctccttggagtcccacaggaggctgtgaggtcacctgtcagcagggattggatggattagggtctggaatcatattggtgcaggagcttgttcttgcaggtggcagggctgtaggagaagagagccaagagaaggggtaaagagtcctggggttgagcccccagaattgtcttatgacccctgattagtcacttcggctctctgagccacatctgttaaaaagaaggccacaggcctgctccggccactcccacccagggctgaagtgaaggtaaaatgggcaggcaagttaacacattatgaagactgcaaaaccccgggatatattaactgtcaccctgactgctacacaagaggtaggggcattgttaagagtgtagctttggggtcagactgcctgggttcaaatcctggctccatcacttactggctgtgtatccttggaggagtcacataccttctctgggcttatgtctcctcatctctgaaatgaggatattacagtactcacttcagagggctactgggaggatttcacagatgaatagaggtaaagtgctgagatcagtgctcgtgttttagggaagagaggaactggtggttgcagggagctcaggcttccgcagtggctgaccaagttctccacacccagaaggtgaggcagagagactgggagaagctagcgtcagccttcggggaggaggcgttgagactgacaggagaggagtgtaagtgacctcatggtcacaatgggctggttggggcctggggcagtagtagttggggccaaattagttggggccaaacacatttgtccccttttgtcctcaggatctcgtggctccactggggtcccaggacagcaagatagggacagctcagccctggagtcagaggagggcacacaccctggttcccctattctgactgtatgactgggcaagccccttaatctctcagagtcttgactcttctcatctgcaaaatgggaatgatgagccttgctttaggggt

SEQ ID NO: 12942 - DNA, 2300 bp, Homo sapien
gagtacatgtggaacaccctctgtgcctcacactccactaagctcctcacaccattcacttactcaggcctcaccggccctcgagcacaggctgttttcatgccaccttgcaggagcggggactaaggcacagaaaaggtcaacctgtctcacgtcacacagccaaggagtgccagagcccagatgtgaacctgtgtctgtctgactgcagccctggttccgacgcccttcctcatgcatcctataataacactatagaggttactatagtgtctgctcctacccctgggacaagatcccctaatgagctggcaggtgggcgtggggggcacaggtacagcttggcttctcagctttgctcccctatcctctgctttgccatgaatctctcatccagccccgcagggatctgcctggccagcagtgagcctgagcccctttcatcctgggacctgccgaccacggctcacatcctcctgggtgaagaatgtcaccttgcttcctatctgcctctttcgtggttggctggggagggggaccggggggtggggtgaggttaacctcattgttgtcttatatggtcatttaaatctcccagggcttcctccaagggccaaaaataatccggagacacagcagctgtgtccagcacacagaggacccggccatctgctttggttcagagccctgtgtctgtcagtcagtctctccctggctctccctccatcctcattcctgcctgaagccatgacccgcttctcctatgcagagtacttttccctctttcactcctgctctgcaccctccaggtccactgcacctcctgagagttcgccggcccgggccccaatgggcttgttccaaggggtcatgcagaaatacagcagcagcttgttcaagacctcccagctggcgtaagtgactcctgtctggccccaggaccatccaagttcactccgctaactgggatggcagggagggtgggaagcaggcccacagcccccaggagggcagagggcactatggaggcacctgccaggcacgctccttctaggggtgcccccctggggccccactgctcctgctgagatgggcttggtggccacagacttcagtcctcaaggaacttccagccaggcatgctggtgatccccccctcagatgcccccagcatgggacctgagtgctggaggagccccatggggctctgaaactggggacccagcacgagggaaattggggagatggccttagaaccccagaggcccaggagagcttggagttgaacttgatgagttggctgcacccttctgtttgtcccagtctcactttcccccatgccatcgctgtgggtacatccaaaatgcccacacccacagcctttgttttgtttatttgcccttatttgtgaagtgccaggtgctaaaatccagaaataatctaagctgcaggggctctgtttgcctggcaccagggggcagggctaatgcgctccttagaaaataattctgcctccctcccctctctgtacccctggaatagtgaccccggaagcagccaaaagcaaaagagggaccctatcactggaactgcatttcctcactcagttacgttgtagagaagggaggaggcaattggccaatattttctttctccttcccagcctttttcaaatcctgtcgccctccacttccttggtgtggtgggtgtgtggagtggttgacaatctggaaaagggagacccagagctggtctcagctactgccacctcctgcatgactgcctgagagtcgctgtcccctctgagtctcccttctctgcaggacacggctggagagggcaacgtgacctctagggtcccgtccagcttactactctgatggcctgacacccccagaaccctcccccactcatagggcggggactttgcctgaggtcatggagaagctgtgaatatgtgggctgagggctccagggtccttgcatcacagctggagagacccaagctgggcggcaggtcctgaaagtgttctcacgacactgcaccacgccctgctcgccaaggccacgagaaaagccagccctcctcccttccacttcagctggggtccctttggagacactccaggaaaaggggggcacatacccccactgggcttttcctgatgctgacaggggctgctctggctgttcctaagtggaactcgtcaaggtggcagtgacggtgctgatggggacctcaggacttatctgatcagtttcccatcgtccttgctgggtctgttgcttcaccggcatct

SEQ ID NO: 12943 - DNA, 2300 bp, Homo sapien
cccctgcttggggcccgaggggaaatggggcctccagccttgattggcgagagcacgaaacccagccaggggccctggctccccagccagccctgagactcacgactcagtaactctgagcggtcgccttgcccagttgccagccccaaagccagtggatgcactcggatctcagtgctcccagaatgagcccttctgccccgatctcagcccgtcctctgtgactctgtggctgtgtgtggccttgtctccctctctgctgacttccaaatatcctcaggatccacaaaaagataaattttaatgagctgcatcaccacccagagtgggcctgggactgagccagagctgggaactctttgttgaatggaactcagtctgtctgtttcctcatctgcaaaatgggaacagcacacccgctgcttccatcaatggtggcaggagaatggaaatgaggagaggctcggcatgactttgtgaacatttgccctgcacagttgttagaaactgtcatcatcaccagctccctccacctccatcaacctcaacatcccggccaccattgctgctgccattactatgcagagacaggtcctcgtttagatggtgcagtgggctttttcccagtgctttattatcctgctaaaaacattctaacaatggcaggtaactggaggccacacatgcactaagtatgagggtggccgtgacccaaggatcctgggaggtggaagcccagggcctcatcaagacgacagggctggagacagctgaggtgagcctggccccaggctgcctccacctgccggctgtctctccttctcaggaccaggcactaatgcaaaggacactgaacccagcagctgtcagggctgaggaggggccttggctctgggatctgttggacactgaatctctccacagctacagaaacagtgtggacatccccagtctggtcctggtcccacttctccattttgcaaataaggaaactgaggcacagagcggggatggggcttgtccaaagtcacagggacagtcagtgtggaggtcggagagctggagagaggacgaaaaggcaggaagaggccaggccttcagaggacagggtggcatcaggagctgggcggacagtggtagtctgaacctctgctccactcgctgtcatgctgaaggtgaccctgcacagttaagtcccctctcacagcctccctgtcctcatctgtaaaaggcacccccatctacggttgatggatgtggataaatgaggacacatgcaggcggtgtcctgcccaccccagtgcgggtcagtagaaggccagaagcaggggatgggagaaggcaggtgggagggcgtgacagcggcgaggatgaggaaggcagccaggcctgcaggcagccctgagagcatgaagcagaggggtgagcaggttcccctcctcctgccacccttgctcctctctaccaggctctggccttgctggggtgtacccacagaatctgtaggctctggcctagccagaaagagtgtgggtgcttctcagggtcataattaccccatgccccacagggtgtgagtcactggtagcagagtcctccccaatcccccccagaagagtgtggtgaaaggcccgggccactggggtgtcgagagtgccaggcctgacctactgggggtggtgtcagtaggggccatataccctgttctcacgacaaccccaggccaactcagatttgtggagcggccatcccacctccttccggctcttccaccctcacaggagcctggtgggtcgggaaaactgaggcctagagaggcaaaatgatgataaaatgaagagtgagtacatgtggaacaccctctgtgcctcacactccactaagctcctcacaccattcacttactcaggcctcaccggccctcgagcacaggctgttttcatgccaccttgcaggagcggggactaaggcacagaaaaggtcaacctgtctcacgtcacacagccaaggagtgccagagcccagatgtgaacctgtgtctgtctgactgcagccctggttccgacgcccttcctcatgcatcctataataacactatagaggttactatagtgtctgctcctacccctgggacaagatcccctaatgagctggcaggtgggcgtggggggcacaggtacagcttggcttctcagctttgctcccctatcctctgctttgccatgaatctctcatccagccccgcagggatctgcctggccagcagtgagcctgagcccctttcatcctgggacctgccg

SEQ ID NO: 12944 - DNA, 2300 bp, Homo sapien
gaaggcacagaacctcttggggcctgaactagtaaatgagggctctgaacaccaggatagccaagagtccctccagttagagggaccacaattcccctgtaagacagaatctcagccaaaaggagcttctggtctgataaacccaagaactgggaaatgacttgggactacattcttttgtaaagagtgaggtaaaaaaaaatttagtttgaatctgtttttcttcttttaaatggaaacaaagacaagtggaaagtcagaaaaaagttcacgggtagcacacgagagctgaggagcatgcagctgagaccgcagtgaatatttggtgagtgtctgggttgattattactacatatcaaactacctcaatccccagtggcacgaaacaatccttttatcatagcttgtggtttatgggtcaggaagttgtgggtggtttgtctctgctccacgtggcattagctgtggcagctgcaggtgaaggatccacctccgagagggtgtcttcacccctctgcctggtgctagatgctctgggggccctgggtgttgcttgcttggacttcctcacaacatggcagctacaaagcatctcatgacctagccttggaagtctcaggacatcatttccactgcattctattgttaagtccatcactaggccaccccatattcaaggggagggaaggaatagacacatcttggatggagtttggggtgtgtatgtgtgtgtgtgtgtgtgcatgtgtgcatgcccatgaggcagagggcaacctaggaggggcctggcctggccacagcccaccttccaggtcagattgggaaggggcaggtggtgggcaggaagtagaggaacctgtgttttgcctccagcaaggagcccaggaaagcagcccggcctcggggagccgtcccacagagacgtctctcggggaacatcctactgggtagcagagtctccaaaaagtaaaaagaatctgacagccccttctctgcccttctcctacactccctccatagcacatgggtctggaaggggctgaacttgagctaactttgagggccacccagccacagtggcctgggaagactgacccagctggggtgatgagcaatttggcaggtaccagggaagctgggggactgcctggggaccactggtgtccttcccatctttagcaccagtcagacctccagaaccttgactcaaccccgtggcaccttgtatactgagatgtatttccttgtggaatattcgaagtgcgtgtaaaggcatcctgaggtttcctgagtttgaatcagtgagaaatcatgctgtggccatcataaatccacatcctccaaggggaatgggccactgaaacaaaaatgattctccccttagaggaacagaccaagtcatgtttctggacccctaactctgaggcatgagatgtgaacacacgggtgggagagtaggtgcctggccatgtcctgtcacatcccggatgctcagtgcatgtggctgtgtatgtgttgtctttgacatttgacctattccagaaatgggacgttcttccctagaccaggaggaagggctctcttctgttgtatatctctgcccagggcttgcccgcatgcctctgtgtttgtttgttggctcatttgtaccctggccctttgtatccccagccccaccccacagtatccagcagccagacacctgctatccccaaatgctgccacaagctcagcaccaaaccttgatttctccaaagcccttttacgtcaactccttcatctcctctctccccttcttcccttctctttcactccatcctcttccttcctgctgtcttgccttccctcctttgttgcctttacttctcctcttcccctttcttcctcctcccttgctcctcactctttgtctcccaactatgcgtctcctcgtcctcgttccctgcctctgtctctgacccactgcatctctctcctgtctggctctcccctgggtagttccagaaacatacccatatatggcctccatgtcaaggatcacaaatgatgacatcacgtgagggccaaagctccgggatcctctctgaagtgagagtctgtattcgatgcacccggaggaacggaaggcaggattgcagcttcctcagtgcaacctccaaacaggaaatctgagatgtataacatcttatagtttggcttgtcaacgttggtcatgcggtggccccaaaataaactccctgcttcaaaggacagcgtttcagaactgcctggcagagcagccagaagcttggggccagggc

SEQ ID NO: 12945 - DNA, 2300 bp, Homo sapien
cagaaatgctctgaccatttctgagtgggcagagatgatgatgaagctgcctcctccctaagcaggctgctttctgaaccagcttcggctctcaccctgtgactccttccagaacttgttggaagccagcacttactgaaagttcccaggcatcacggtggccaggaactgaagacttgggggtgatggggttgtaccagttatagggctgcgagggaaacaaggcccctacagaatggtaccctggacctatccggagctggggatgcagcccagttgtccctgagcctcctcagcctgttgtccctgagcctccatggaggagcacctgtgggttctgttgctcagctgtcccgattccttgggaacagcgccagggtttgcactgggaaacttccgggccccaatgcgggctcttaggatatgactgtcagtcaagccaaggggtgggcacatggcccaggctcagccaattgggcaccctctcttgattcttgagaatggagaggatgatgaaaaggggttgggaaggattcattctgggggcgcctccctgagttcctgccgcatggatctccagggctgccctgagcccctgtcctctctggattttcagcttttcttctgattctgcacctccctacagcctcccatgcatctctccttgcccagagtagcccggacagtctctgctgctggctgataccctttgactcctgccaacagcttcaccagccacggtccaaaccactcccaccctgatcgcccccttctgctttgaaggcgctgcctacggtttgcgcaggatgtgcaagctgttccgtgcctccgaacctttgtccctgccattccttctgccagaatgcccttcccaccttctcctttcattcttatcctcgtgaaacacctcggacactgctgactctgggggactcccccacccctccttgaactgggctgactccttctctgggcaaccccagcccctgagctcctctccctctgcatccacgtcccccacacctgcatccacctccctcctgagtctgaacccaaggccagagcaaggacccttcaccttcattctcagtcggtgctcagcacataagcgaggggctctaggaccatggagaggcagccctgggcacctgtcagggactcctgggctggctggggctgatctcactgcctgctggtaaggggttgtgagggggatgagtccaaacccctgcccctgcccctgagcccagccccgaccctggccccagcccgagcctttgatccagatcttgctccagccgtgccccaactccagccacagacctgaacccccagcccttgctctgcccctgcagagacccccgccctccctcattcctggcccccactctggctcaggccctgccctggctcctgcctccttcaccctctctggggaccttccccacccacaacgttcctcccagtggagcccacactgagctgtggcttcccaggagccatctgaggttgcccagctctgagccaatggaagcctttgagggggaaggccaggccagccggcagggtggtgcgtgtggtgggggtggggtgtcagggtgggcaagaggcccagccctccccaccccaccttccccggtggcacaggtccagtggctccaacaggaggttcaccgccaagctgtaggcaggggcagttcccagacatgggtccttcagcttgctcccaccccctgcacggaaccaggcctggtcctgagccatgggtggggctgagccttgggggggctgatggagaaatgcctgagctgcagccaccaaaatcaggtgggatggggtcaagggagagtcccgggacaggtcaattggaactgggcagcacataaagcagaccagccttgacagaaaggacaaaaatagcccaagtctcacatggggttgccagtgccctttctccccatcttcttgggaacgggactgggagttgggggtgggaggttttaggaccatggagaatctggccctccacccacaggtggatcctgcaatggacacatcataaggacagaagccagcattgtgatgtcacagcctggctgtggctttgtgctcctggagctgtaggtgagtcagctaggccccttcctcctccagtgcctgtctacctatgtttgatgcttggggctagaaagactgaccttgtagcccctcaccttctctccccaatgcactgggctggttcagcagctgaccaatgagggtcatgcttgcatactggccttgggtgagtggctcaggaa

SEQ ID NO: 12946 - DNA, 2300 bp, Homo sapien
aagtgatccacctgcctcggcctcccaaattgctaagattacagatgtgagccactgcatccggccgagaatccaacagttttactttgggtatgtgtatgtatttgtcctttaggagtcatatctaaaaagccattacctaatccagggtcatgaagatttacacctgtttcttgtgagaagtttatagtttttgctctactgtttaggtctgtggttcattttcagttgattttttaatatagtgtaaggtaggggtccaatttcattatttcgcatgaggatattcagttgtcctgataccatttgtttaaaaagttctatttttcccctttgagttttctcaggacccttgtcaaaaatcaattgaccgtaatatgaaaagtttatttctggattcttgattctattccattcatcgctacgcctgtttttatgccagtaccatactgtctttattactgtggctttgtaataaatattaaaattgagaagtgtgagtcttccaactttgttcttttctgaggtcatttggctcctctaccagggcacatcttgtgtcatgagtggaagtttggtgcctgggtgggtttcaggcatggtgtgatcctaggctcagaggcatcatcaaagacccatcctttccatactctcctgtcttctacctttagcactgacttcatcctaagtcagaacttgcttacctcatttgaggcaggttccgtgcagatatccaaacacgggatacttagctccccaggaaccctgaggggcaggtctcttccctagtgtccagtgcaacagtcagcagtgagcaagcctgtggctcagttcagaaggacttctccaggagcctcacaggcagtaccgaggctgctgcatggcacaactcagtgggcaccattcagttgaagtctgtgtaattggcatccctagttatatacaacttggaacttattcatattgcaaagaaatgagatttctgagtaaggacatgtttgtctaaatagtcacagtgtattaatttcatcttcttcccaagaaaagggaagaaattatgtggtgatgtcacagggtcccaagcaacaatcagattgggcctctggattgacatctgtcagtcactcagccaacatgaattgagccacctgaatatgctcagcattctgctaggcaacaggagatggaggcccatctggtccttaagaaacgaatgcccttcagagagggaggctggggacagtcagggtgggcttcttggaagaggcagtgagaagaggcaggcaaccactttcaggaagtcacaccaggatctggactcctagtcatccagctctgtcactcctggctgtgccacatcagacaagtcacctaacctctctgagcctctgtttgctcatttacccagtggcattgataccacatcctttgcagggcgcttgtgagagttaaaggagaagtaggtcagcctttgatgatgctttggtacctagaaagcagcgtccagaggccaaaacactgtcaggtgagagatttattttccctcccaggagttcatgttggacaaaatggagactgtaagactgatcgcactgctcacggaacccaaagtgtgctggtcatgggacagcttcggggaccagtggctcagaagacaccccaaacccttcaggaaatgtccaaggaggcgggtttccacccccaggaccccctttcccagcccccatgcttcagagtgctccggcctgtactgaccagcctgcgccttgcaggccccatggcatcacgacctctccttacctgcctgcctccttttctcaccaccaacatctctaagccagtgggagagagtctgggggcattgagggggtggtcagggtcctgggctcagctagggttgggggtgctgctccccatcctgggggattggcagggatccaggtaaggcctgcctgggatccgggagagagaggcaggttcccgagttgggggcagcagccaggctggaagatcctgggctgaagactccctcctgggagccggggctacatctctcactttcatggtgggttcctgagactgaggagctttggacggatgcttggctgttgggaatgtcccagtcacaggacactgtaaagagccaccagggccatgggatcgatgggagttcaccttgcccacagcagtctgcagagctaatgggggtgctgaatgtgtagggggcatctcatcactttcttccagaagttgagtaccaggttggtaccttctgcccatcctgcaggtgtctgagctgc

SEQ ID NO: 12947 - DNA, 2300 bp, Homo sapien
gccattccccgatccctccacccagacacctggacaacagggagaaggggtgcaggaaggttggagcaaattcattccagacagaacacacggatcccctgccatgggcggcccctaacgacgctgtctgcattttcgatgcagacccagcttgaaaacccactgaacccttctgcaacttttttccttctaaccaggctttagagagcttacgaggaatcttgattagttagactaaggaaattacattttccctgcgaattgagctaaatttgaggaaatattctgttacgcatgcactgagattcttgtaagattgtgtgtgtgtgtgtgtgtttaaagccttcattactacaaatattaaaacaaaacaaaacaaaacatttttaaccacccagattgtccaaccctctcactgagtgaggaaccagaagaccagagagggcctgggcattgcctggggtcacacagcagtgagtggcagagcccaagggcccagaattcctcatggactccagcccagtgctccttccacactcccatgctggcttggtttggaactgctggggcctgaagaagggcagagagtgagcccaggactcggggcttagtgcagccaaacttgagggctcatcaaagccttggctgaaaagactcttcacccatacccctcactcagacaccatggaacctggctcagtcattcctccacagagggaagctaacacgccttggaatgagcactggttggggagtcaggagtccagggatccagcccagccaggccacttcttagctcagcagcactgggctgctcctgtcacctctctggcttccttggcggttaaaaaaaaaaaaagagcgagaaaccccccgaaaacaaatgggggtcaggggcggaggcaggtaacacagcccctgtagtcacatgcagagtgaattcgaaaccagctctggagtcacactgcctgggactgaatcccacttcagtgctatgtgactaaggcaaggaacgtaaactctctgtacatgtttcctcatctgtgaaacagggataataataacaggacctacccccttaaaccagttgtgaggaaattaagtaagataattctgtatatgtggagagttcaggatagcgcctgatacatagtaggtgttctgcataactgtgtaaataactgtaaaaaattacctgctattgttactgctccttgagcctccattgacctcacactccctgcccaggacatgatacatgcttggaagactcagatgtctgtatgcccagagcctagcccagtacctgggacttacgtagtaagagtggggcgcggggggcgggggcggggggcagcagcaggaaggggaattgctcaatacacgctcctggaaatattaattttttgaagtggatgcatgcaatgcactgagcccccctcccctacaaactctccctcccacacccaagcagctcctccaggactcaagggctggtgaatgaatctttgaatgataaatattcctattttgatgtccattaataatgagcttgtaggcaagatgagtcatctagacctggttcacggatatccctacaattccagagccacagagtcaacgatcctggacattcattcattcaacaaacattaactgggtgcgtggcaacctactgattcatgagttggaagaggataaaatattatatagaagccatacttaatgttattggacacgtgttccctaagcgcctatcctctgatcttgtgcaaactatacttatgtgaccttgtttatgaattaatgacggccagctaatccttcagaagactccaattttaggtttgcgcaaaagcccttcagcctttacaaacgaggacctgtctttctgggttgagctaactcctctgctagttaaaagctttcctgtgtctttaaaagggggaggcatcctatcaaatggaccctaacgcataggctgaaggcacgtgaagtcccacccactttctatgacgtcccgcgtcccggcttctgattgcccgcctgagacgtcaatcgcagggcgtgtgtcttgctgggacacagtggaggtctaacctttggtttgcggagcggtcgggtgtattctccgccgcccccacgccctcgaggtccccgccaccgaaccagcggcggagcccgcccgcgcctcccgcggcattcccgcaccggatcgctcctcgctggggcgggacctggcctggcggctctggtcactatggtcagtgatcgtgggggatcgcgaagggggagcgggc

SEQ ID NO: 12948 - DNA, 2300 bp, Homo sapien
agtagtaggtagcctttttttttttttgcacagcatttggcaaggttactgtcatttagtgaatttggttgcagttaaatgccatacagaaacttcaatactaatgaatataggtgacaatacataatattgaatgtatagacaatagattaggtcctgtgctggcactttagattcagaatcacattcagttactctcctaacatccttaagaggaagcagaatagattcatggttaagagcacagatcctggaaccagaatgcctgaaatcaaatcctagttctgtcactccttaggtggtcaagttatttaatttctctgtactttaattttctcattatttggataataatagaacccattctagggttgttatgaagattgattgtaaattcatgcgtgtaaagtgtttagaacagtctctagcacatagtatgtatatattgctaaatgttagctttaataatttctagtccctttactacttattaccattatcactattctcatttatagatggaaaaatgaggtctagaaaagctgatcagtgtgcccaaggtttctctgcctggaagtggtagagctgggcctcagacaagcctgtcggacctcagagcccatgctatttcttattcctgatgtctttgtccatctgcctttggaccagactgatgctcagggaatggggtgcagattgtcaagatgagggcctggaaagttgaggcagactacaaagtgtcttttgccagtgttttgtcaggtcatggggtaattagtttctagaacaagtgtttgatttactggtttttaaaaattggtaagtagtatcagtggtttactgagattagcttagaacaaggcttggcaaactataggcctcgtgccaaatcttgcttgctgccctttttttttctaagatggggtcttgctatgttgcccaggttagacttgaactcacgggctcaagcaatcccaccttagcctcctaagtagctaggactaccagtgcatgccatcacacctggctgctgcctgtttttttagtagacgttttactggaacacagcaagacccatttatgtattgtcaatatcctcttttgcggcagagttgaatagttgccatagagactgtgtggttcacaaagctggaaatgctctctggctctttacagaaaaagtttgctgaccttgatccagagcagtagtttaatgttttacaaactaggatttgcattgcatttcccggcctcagctcagacatgcagggagtgaggaccctgaagggccagagtcttatgttttgaagcacctcaagtacttttgactttccatgaaccacacattgagaaacatcatccaacacatttatcaagtgcttaccatgaaccagatgttgttctctgtggtggtaataacagcagtgagtaatgcaaagtccttgctctcatgaagcttacattctagtagagggagataataaattgcaaagtaagcccacagtctgccaagtgatcctaagaagtaagtcgagcaggggttggagaaaagagattgggtatgtgtggtcagtctctgatgaagtgagaattgagcagagagctgaagaaagtaatgaagtgagtcatatggacatctgaggcaagaccctttaaggccttaaggagtagcaagtgcaaaggcttggaggtgagagcatgcttggtttgtttggggaagagcaaggaagtctgtgtgccactgggaggaagtaaatgagagggtgctaggagaggagtcactgacccagaatatgtatggcctcatttaactcactgaagggagtctttatcattgcagagtatggcatgttggttggggtcaatgagtcccaaatttggatccagactccacagctgaatagccatgtagatagcttgggaagttaatctctccgagcctcagtttttctgtaaaagggtatacaagtgatatcttacagagtattggtaaggactgtaatgtttaggatgctcagcagttggtaagaatttgattaaagatagctgttagttattattaataagctttctctctctaccccagctgtgttctcttggcaacagatgtggcagctcggggtctggatattcctaaagtccagcatgtcatccattaccaggtaggggcatctgaaaatttataggcatctgcctgcactgaatggggaatttttaaggcaaaggttgggggagggaggaggaattgttggttccaaggctcttgcatcagagaataccactggcatcgagtgcccact

SEQ ID NO: 12949 - DNA, 2300 bp, Homo sapien
tgttttgtttttttacttttaaggaagtgggaaaactcttgcctttgccatcccaatgattcatgcggtgttgcagtggcagaagaggaatgctgcccctcctccaagtaacaccgaagcaccacctggagagaccagaactgaggccggagctgagactagatcaccaggcaaggctgaagctgagtctgatgcattgcctgacgatactgtaattgagagtgaagcactgcccagtgatattgcagccgaggccagagccaagactggaggcactgtctcagaccaggcgttgctctttggtgacgatgatgctggtgaagggccttcttccctgatcagggagaaacctgttcccaaacagaatgagaatgaggaggaaaatcttgataaagagcagactggaaatctaaaacaggagttggatgacaaaagcgccacctgtaaggcatatccaaagcgtcctctgcttggactggttctgactcccactcgagagctggccgtccaggtcaaacagcacattgatgctgtggccaggtttacaggtgaggtttagttccatttaataaatattttctaggtaaatcccaaatgctcgttggtaaagatgaatgagctgtggctcctgccctctagggtaagccactctcatctataagccagacaattaagccctacagaaaattgatatagtgacattttttcagttccctcaaggataatacatggttggtgccattgtggatgcataggaaatttattggatacagtagatgctcagggcagggattagcaaactgtctggttttataaataaagttttgccggaacacacccacacccatttggttttatattgtctgtggttggttttgtactacaaaggtgaagttgagtagagttaatagttgtgacagagaccatctggcctatgaggtcagtaatgttcactagtgaccctttcagaaaaagttggctgatccctgctctaagctattaggatttaattctctcagggaattcactctgggaagggcttcactctgggaatcttaattttataatgaaagcagcaattaattaccaagttgttactattgctaagccctttacccacatgatactatgagaatttctgcaccagagacgaaaacaacagggcattagtggacctttcagaataattctaactgagggaatggaagggcttcctaggagaggtgtagcacagctgcaggtcatattcctcccagcattatggtgccccagtgctccgttttcccagagctttggaggtaagcatacctgggttcaaattcagcccctttggtgtggttggaggggagggagtagaaaagaaatgaggctgaagaagtagagctcagatcacagaagacttggtaagccctctaggagtggcgtcaacagtctggccaggcctgctcttttagcaatgctctagggcattacactgtgctgatgtctgtctctgctaatctggggtgcctgtgtcagccatgtaagaaaatgatcacccagattgaataagtgtcccttatgttttctgtcccataggaattaaaactgctattttggttggtggaatgtccacgcagaaacagcagaggatgctgaaccgtcgtcctgagattgtggttgctactccaggccggctgtgggaattaattaaagaaaagcattatcatttgaggaaccttcggcagctcaggtaatagatggcacttctcttttccccctcactgccttttctgaaatgagccttaggtgacatggtgtgggcaatgccttcttctcatcgcagaatgctatggtgtggtatcatccagaccctggcctttagaaagccaagagtgcatgagggagattagttgagggcctgatggtggtggtggtagtggggtgtgtacgtgtgtgtgtgtgtgtgtttaggatgagtgtagggtgtgctatagatgattcctcttaacccgctgctgaccaatgatatgggtctctctggatctgcaggtgcctggtagtggatgaggctgaccggatggttgagaaaggccattttgctgagctctcacagctgctagagatgctcaatgactcccaatacaacccaaagagacaaacgcttgttttttctgccacactcaccctggtgcatcaggctcctgctcgaatccttcataagaagcacaccaagaaaatggataaaacagccaaacttgacctccttatgcagaaaattggcatgaggggcaagcccaaggtcattgacctcacaagga

SEQ ID NO: 12950 - DNA, 2300 bp, Homo sapien
cttcaggaatccatgtcttcgcttttttgggcaccttggcagcagtgctctgagaaggctccaacccttttttccctttatttttcttcttttttggagcagtttggaccaggttttctgatgtcatctccccagcctccggatcatcacaaaccatgtcatctccctgggcctccagctcaggatctttcacttcaaattctttctgggtactggttccttcagttgctacatttttacttttcttcaacttgatctttttctttggtgagctagactttccctcctcctcctcctcttcttctgaaacagcttgtgcctttctcttgggtgcttcctttgagaagagactggagggattcttggcaggggagaccaactggtaatctgtcaattcctcaaagcacaccaagtcatccatctgtccatctgcaaacatatttgggtcaatcttcacttccttccattttcccacaactttgattccctttgtctgaaatttgccacagcttgactgctttggccttgattttgtgtccttcaacttcatggttgctgaaaaggagatacatgttctattaggttggtgtctgagaagcagagggttctgatgtaacaaatattttctaagcaactaggccctacaaagaactgaggatacaaagatggctatcacacagttgctcccacctagagaagaacaaagaataccacagaacagacagctttgcctggaacacagggtacacatgtgatggaacaaagacatatgagctagacctggtttgaattccaaatccaacacttactgcctgtgtgaccttggatagtgccacccactcctctctgaacttcagtgctctcatctataaaaaggggggagggtacctaacaatatctaagttgtacattttatgtaaataaagaaaattatgtaaagcacggaggatgaaacctgccacacctaagtcgttctgaaggcagagtaagaatctcaggggtttttcttgtgggggcaggaggggtgagctttattaaaagcgtactgcgcttgcttccttctcaagccttgcctgagagagcaaatgcctgctccaccatcctttcctttgccaagcgtcttaaaacccatccagtttcttcatcatattttaagtggcttaatggccatttaggcccaactcgtttgggtggaactcgatccaggtttttccttttcagaaaggccaagaaagataacagattccgtgaaaaagaccaaggtaaactttggttcaaatccagatccaccacttgtcagctgtggctctgcggtggacgtattaatctctgagtctcttatttcccagtctgcacaatgggaaaaacgaggacatctgtcccacagaatccttatacgccactacgaaaaagtgacgcacgtcaaaaaaaaccgctgagcatggcgcccggcgaggagagcacgttcgcacacagtgcccgccggacccgctgcgccacggcaaaaaaacaaaaaacaaacaaaaaaaaacacaaagaaacacgcggggttcaacaaggagagggcgaggggtgccacgcgaaccgggcgaggacacggagagcgccaggcagagtagaagggcctctgtctcctcgtgacgccggtcccgcgcggccctctcgctttgtctcaggcacgaacgcgcgcacgaaaccgagaaaccgagaagccgagaagccaaggccgtcaggctctgatgaccggacaaggagcccaaggcgcggggaccgtggcacgcagctcggttggacggcttgggccggcggccgccctctctggacccgggaacccaccggcccagagcgacccgcgataggaacccgggttcctggcctcagcccctctccagagtcggctccaaccccgctcgttttggtactcaccgtgtggagacgccaccgcagctccgtcagtcgcgagtgaagaacctcagaaaccgccgctgtacctcagctgcagcagcaactgcagttccggggcgggacctccacgcacgtactcgtgcgcgctggggaggaagtcccgcccctatggcaaactcagctacctgattggctgcctcgcggaccgcagcagtgccggcgggagagctggcttggggcgctggcacctcctcttacagctttactcctgccagcttgggaaaaggccggagaaggtgaaattctgtgtgctccctccggcgagagactttgtcagctcccgcacagtaacgtaagttttcttgtattcttagtgtagtttcgttaccggaaag

SEQ ID NO: 12951 - DNA, 2300 bp, Homo sapien
atctcaagaaaccactttctttggtcatacattagaaggaactgttcatccattcaagtttctcacgagattgccacaattcagtcatatcttcaggctccgcttgtaattttagttttcttgctatttccaaccacatctgcagttacctccttcactgaagtcttgaacctctcaaagtcatcaatgagaactggagtcaacttcttccgaactcttgttaattttgatattttgacatcttcccatgaatcacaaatgttcttaatgatatctaaaatagtgaaccctttccagaaggttttcaatatactttgcccagatccatcagaggaataactctctatggcagccatagccttacgaaatgtatcttaagtaataaaacttgaaatgcaaaattacttcttgatccatgggctgaagaatggatcttgtgttcacagacatgaaaacaacattcatctccttatacatctccattagagctctcgtgtgactatgcacattttcaatgagcaataatactttgagagaaatccttttttctgagcagtaggcctcaacagtgggcttaaaatattcagtaaaccatgctatgaacagttgtgctgtcatccaggctttgttgttctacttacagagcacaggcagattatatttagcgtaattcttaagagacctaagatttttataatagaatggtaaacaagcactggcttcaatccaaagtcactagctgcattagcctctaacaaaagagtgagcttggcctttgaggccagacattgacctctctagctatgaaagtccttgatggcgtcttcttccaatagaaggctgttttgtctacattgactacttgctgttcagtggccaccttcatcaacgatcttacctagatcttggggataacttgctgcagcttctccatcagcatttgctgcctcatcttacactttcatgttctggagacggcttctttccttaaacctcatgaaataatctcttctagcttcaaacttctatagcttcctcacctctctcagtcatcatagaatagaagagaatcagggccttgctttggattcggttttgggtttaggggatgctgtagccggttttattttctatccaaaccactaaaattttctccaaatcagcaataaactgtttcgctttcatatcattcatgtgttcattagagtaaaatgtttaatttccttcagtaacttttcctttgcattcacaaactggctaactttttggtgcaaactttcagcctagctttcagcctatcttgccttttgacatcccttcctcactaagcttaaccatttctagcttttgagttaaagtgagagatgtgcgactctttctttcacttgaacacttagaggcccattgtagggttattaattgacctaatttcaacactgttgtgtctcagggaatagagacccaaggaaagggagagagaaggaagaacggcctgtcagtggattagtctgaacacacacaacatttatcaattacgtttgtatcttatatgggcacagctcatggcgccccaaaacaattacaatacaaggaacactcatcacacgtcacccttgtagcagagcacatctccctatgatctaggtacgagcattgtacctaggatggacgcgttcgtcctcttaccttcgggaacgccctactctgtctacggagtaaagtacttaataaacttgcttttgctttgctatgcggactcaccctgaattctttcctgtgcaagatccaagaaccctctcttggggtctggatcgagacccctttccggtaacgaaactacactaagaatacaagaaaacttacgttactgtgcgggagctgacaaagtctctcgccggagggagcacacagaatttcaccttctccggccttttcccaagctggcaggagtaaagctgtaagaggaggtgccagcgccccaagccagctctcccgccggcactgctgcggtccgcgaggcagccaatcaggtagctgagtttgccataggggcgggacttcctccccagcgcgcacgagtacgtgcgtggaggtcccgccccggaactgcagttgctgctgcagctgaggtacagcggcggtttctgaggttcttcactcgcgactgacggagctgcggtggcgtctccacacggtgagtaccaaaacgagcggggttggagccgactctggagaggggctgaggccaggaacccgggttcctatcgcgggtcgctctgggccggtgggttcccgggtcc

SEQ ID NO: 12952 - DNA, 2300 bp, Homo sapien
ccttcccagagagaaagccagagtggacacctgctggacccctgaataggagtatagatcgccatcagtgtggcttaaactagttgaaccaacatattgatgtcacacttgtgtcaacataaaaaaaaaaaaagagagagagggagacaaatctttaagtaaaatcgttttacttgggaataatacaaaagaagtaggattgcaatcccacaacataaatatggaccagggtggcctttttgttttggagaacaaaggaaaaagctggggatttttagagaaagaggctgttatgcaagttgttctgaaggaaagttcaatgcaatttgttttatgaaagttatgcaagttgttttgaaagaaagtttaatggctgtgatcccacagccgaaagctcacacctgtaatcccagcaatttgggaggctgaggcaggaggatcacctgacatcaggagtttgagaccagccgggccaacatggtgaaaccccatctctactaaaaatacaaaaaattagccgggcatggtggcagttgcctttaatcccagctacttgggaggctgaggcaggagaatcacttgaatcactccaccgggaggtggaggttgcagtgagccgagattgcgccattgccctccagcctgggcaacaagagcaaaactccataaaaaaaaaaaagaaaggaaagggaggggaggggaggggagggcagggaagggcagggaagggcagagaagggcagggaagggcaagggcaagggcaagggcaagggaaaggaaaggaaaggaaaggaaaggaagaaaaaaagtttattggtggtggcagcatcttacaagacctggcgagttctgaccgccaagtgtcagtagttgctaggtaggactgggaatcttggagttatggtcaggttcctgcagttttggattgggtttgtgagacactgtgccaggcaagtgtttttgcataactggctcgctctccctgtgcttctagctgtccttgtgtggcccatgtgataagctgcagtttggaaacatttcttgtgatagttcctgttagcaggcaaacgggagagcctcatcttgcgtgagagccctcccattaaagccttgctggctctgtctgctgaggttttacccaagtgactccattttgaatcttacaactcgcacactactcatgtggaagatttaaatgtacattccaggacctggtgctttctcttccgcctgttctcaaagcagctgcagggtgagcctgactgtgtcatttctcagcttcatctccctttccccaaaaaggtatagatgataatcccctgcaatggcttcaggacacaagatcaagtccttgcagtgcttttgtggcctcacagggcctggatccctgttaaactctgagttcacctcctgcctctctcccctgcccacctgctgaggccacactggcccccttgctgctcctgccacacgggctctgccactgctgtggcctccacctggaatgactgcccccccataattctgcctaggtcactgcttcacctccttttgctttagcgcttcatcaaataacattctatacatttagttatttattatgtttagtttgcccccattgctggtaaactctgtgaggatggatattttggtctgttttgtttacagtcctgtcccagtgcctagtcagtatctagcacagtgggccttcagttgagactttttttgaaaaacggaacatctgcctatcgcaaggactactattattctgaaaatcaccttcttcattagaaagtaatatttatcattttattatagaactttgatcttacttcttgtgacttcattctgcgtagagcacactcccatccttgaattaaatgacaaagcattttatattaactgacaatgactgatgccatgggcaaatcctatttctgtaaataactgaattttcttctggactgcgcatgaggggagaaagatgtctgcagtttcggtttcctggaaaatgaaacctatctcatttgttgcctgtgtcaaggggcagtgcttcagtcggggtggagctgcttaaaaggcctgggatcacaccctttgggaacacatccaagcttaagacggtgaggtcagcttcacattctcaggaactctccttctttgggtaagactgggagggtgggcaggagctacccttcccgtggccccggaccttgggtgggctgtgggctcagggagcggaggggaggccttaagcatccactctctgcccggtgtttttgttctcatcagggagcct

SEQ ID NO: 12953 - DNA, 2300 bp, Homo sapien
aagacggtgaggtcagcttcacattctcaggaactctccttctttgggtaagactgggagggtgggcaggagctacccttcccgtggccccggaccttgggtgggctgtgggctcagggagcggaggggaggccttaagcatccactctctgcccggtgtttttgttctcatcagggagcctcagatgggaagggactcgagccccacctgtccctggactctggaatgtaaggacaattagctttgtccttgcccaggttttcctcaggccttgagggcggcttggggtaaagtgggcaaggggaagagataagtgttaggaggaaccaagtcgaagccattgcaagtccatgcctgggcggggtgttgcttccctatggaaagcttctgacctggagcaaatcactgagccagatcgcgctccctcatctgtaacatgcggaggaggagggtcccatctttttcacgttagtgaggagattacataagagcaggcacctcgcctgctgtatatgccttaaaaatgcgattggttctgatttcttagttttggtgctttttcaattgctccgtggagagataagggagtcccggaagtgtctaagacattggcgctgggactttcaggagaaagaaagcagcccccctggggaaataaagtccctcagggccctgacctaacacaggtcctttggtagccccaactccccaacatccctccctccctcaccccaggatcctttcaaggcctgctgctccacaagctcagagcagcctccctagccccctggagcccgtcacatttttcaggacagtgggaagcaagtcaggttgtgtgcccatcccgtcctcagagctccatcccttcggcaggtctggctgaagttgaggatctcttactctctaggccacggaattaacccgagcaggcatggaggcctctgctctcacctcatcagcagtgaccagtgtggccaaagtggtcagggtggcctctggctctgccgtagttttgcccctgggtgagtgttcctgggaggggctggtgctgggggcgaggaggcggctgggaagggcgggggtcctgtcccgggacccgtgggagagaaaatgggggacacccgcagccttgctgccctgtcctgtcttctcacagcaggcgtccaccctaactttccatctgggagggggcccggggcaggcagactctggccagatgcccagccctgggtgttccacaggtcctctcccctctgggcccgggcctcctcctgcctagccggaaagggtctatctaccactgagtcccactctcttcagctctcccttcccccagattcaccatcagaattcatctcctttaggagtttaccttgtcaatagggccccgtgtcctatgggatctcacatccagagtatcgattttaacaaaattcttcagctcacttttttcattagtttctgggagatctctttctggttttatttattctcattttcttccttttcaccctcgattcccctccctcaaagtcaacctttctaatatatttaatgtgtgtctgtttttcatatgtatttttgcagaatgggtattgtgttttgtttgcgggcattttaactgacatgcaggatggtgtgctgtagatcccattctattgcttttttccacactgagaaccatattcttgagatccatcagtgtcattcgatgagcatctaatcctggcttctacctgctgacaagtgctcctctgtgtgtatcccctgccctttacctttctgtctccgtgggtggacatccaggggttcccccaactccgccagcacaaatggcacaggcttgaatgggggcacagggcccctgactccgaccctgacttctgacccctgccccaacctctaacctctgtttgagcctgcactcaccctttgctgaccctgtcatcctcagctgccctgagccccaacatctctctcctcagacccttgctgggggcactggaggctagctccttcatgctggggtccctcactggcaccctgttttgcaacttggaggtaactggccctcggcaacacacaccactctgggctcccaactcagtacagagaagtgtgatgagcaagcaagggcctgggccacgcccagcagtcctttctgtttgtcagaaatgcagatgacttctcagtttaagatcaagcaattcataaaattaaaataataacagctcaacttaagcaagcgcttttatgttctagtcacttaccctagcacttgaggtttgtcaatttaatt

SEQ ID NO: 12954 - DNA, 2300 bp, Homo sapien
tttagtctcactagtggtgaagagaaaagtatattaaaataagtcacctattaaatcaacaaagggtttttgtgttattgtttcttaacgacaaagctaattgttagtgaggagtagaaaaaaaatagattctctcacatactgctgggaaaatgtaaactgatgacaatagttttggatgccaacataacaacacaggtatcaggtgctgtaaaaaatgcacagtttctgacccagcagttccacctccaggaatatacagaaaacacttgtgccccataatgttagcacttcatgctaaaataacttatcagagcaaaaattagactttaaacacttaaaagggagggctgatacgttgaacccaaggggatggaatatttaatgacaaatatcatattgaagttctggaaaaggcaaatgggcggggatggttgccaggagcagggcgtgggtgactccaaaagcgcatgagaggattgatggaggagggggcggggcatgtaaaaaaaaaacggtctgaatcagagccgtcaaagcctcccagactcacagaagtgtacactacaagggtgaattttactttgtgtaaatcacctacaccttaataaacttgactttttaaaaatcttgatgaaggatattaagcagcctggggaaatctaaatggttgattaactaaagtaagtaatttgcaaggcagagtgtgaagggaaattggcaagtggtggagggggtgtttacatattcaggggagacataggctgggagcaaacgtgccagaatgtatttatattagtgtctctctggaagttaaacatcgtttattaaattaaacatcatttttctccttgcattttgtttgtttctttgttattgttgtgttgtttttggttttggtttttgcagcaaacagctcttctgttattggcggggttggagtggggggcggtgctacagcaatttggaagcggggctcacttgctatggcttccaggttctttccagcgcttttctcttcggtagatccatcaagccgggacaggcgagccggggagtcgcgaaggctcccgggcgagcggggtggggcggggggcggggcctgcgtctctctagggcagagtaggcgcgtccctactggatggagggggaagtaacaccccaagaacgctgtcatttcctgggccaagttgggacccggacggcctcaccatgatgagtgagtcttgcttccccagggggctggcgggctgggctgggggcaggcttccccaaccccagcccaggaagggacagggaatagcttcattccctgacttcatcaaccagctgacctactgactccctctccctcccttcctccctccccttcccttcctccctccgctccttgcttccctccccctccctccctttctgcccttctctctcctctttctcccctttcccatctccctctgccttcccctggcactctctctctagaacgggcagctgctgctgcagtgggaggaggtaagttacccggatcgcctgtctccaggccctcacctagcctggtccccgggctgctgggagaacgcagagatgaggcgctgggctggctctcaccctccacttccgaagctgcccgagtagcctgagtgagccacagcatcaaaatactccagggaaaagctcactcccattcctgacccagcttctcttctagtccttatgtcgaataagcataggaggaagatcgtttgaaagaggatttgcagctaaactccacgtggcttatttcacatttatgcgtggacacacacacacacacacacacacacacacaaatttgagaccaatgaagggtattgacttcctcagcatcacacagcaagttagagacaaaccagggccatggctggtccttctatgacatctttgcttcacctggctccacactccaccttttcttcaccagaagaccactaagttgccatctctgtattgctcaagctgacagtctccggaaactgtcaaggaattcctaagcggggggcggggggaagggtcccttctcctgagcccacctctgcactcagcttctctctccccacagccctggcagtgggggctgtgcccgtggtgctcagtgccatgggcttcactggggcaggaatcgccgcgtcctccatagcagccaagatgatgtccgcagcagccattgccaacgggggtggtgtttctgcggggagcctggtggctactctgcagtccgtgggtaagtgtcctagacaggaccaccagagctgcgagaa

SEQ ID NO: 12955 - DNA, 2300 bp, Homo sapien
gactccatctcaagaaaaaaaaaattaagaatttaccattgaatattgtatcatcttaaatccaaacttatatggttgcaaacaactcattctttcattataccttttggtgtaatagtgcttgagcatgtacatactgaaatatacactattttattacaagtaattttcttgtatttctcttttgtttgggcaataccttgtgtgtaactataatagaggatgttatctatgaatttcatttcaggatagtagagagcattacaaagtgtttttaatcttcacaaaaaatgtgtagccctggattaacaatactgctatgcacagtcagattttaaatcagataataaatttataagattgaaacagtgtgatattgttgccagaagagatagctttttggaacagaacagaaaatatccaaacagatatactggtatatataccagctaatgagttttgaatataaagatggaatatcaaatcgaaggtgaaatgtaagatgatttaataatggtagtggaacaactggctaagacatatatggatacagaaaacactatatgtaccaatctaaattccagacggattaaagtaaatcttaagtagcaaaccccagaagaatctaaagaaaatacaagtgacagtgtattgaatagctagtagaaatggccttttctaaagacaaaaataataaagtaaaatattggtaagtttgcataaatattaaacacttttctattaaaaaaaaaacaccaaaaaggcaggaatgaagtgtaaataaaaatttgcaacatctatgagaatggatgaagataattaatatatcattaattcctatataccaataaggaaaaaaatacttcagtagaacaaggatccaagaatatgagaagataactcacaaaataaggagtacatgaagctaatacacttaaaaatagtttagtctcactagtggtgaagagaaaagtatattaaaataagtcacctattaaatcaacaaagggtttttgtgttattgtttcttaacgacaaagctaattgttagtgaggagtagaaaaaaaatagattctctcacatactgctgggaaaatgtaaactgatgacaatagttttggatgccaacataacaacacaggtatcaggtgctgtaaaaaatgcacagtttctgacccagcagttccacctccaggaatatacagaaaacacttgtgccccataatgttagcacttcatgctaaaataacttatcagagcaaaaattagactttaaacacttaaaagggagggctgatacgttgaacccaaggggatggaatatttaatgacaaatatcatattgaagttctggaaaaggcaaatgggcggggatggttgccaggagcagggcgtgggtgactccaaaagcgcatgagaggattgatggaggagggggcggggcatgtaaaaaaaaaacggtctgaatcagagccgtcaaagcctcccagactcacagaagtgtacactacaagggtgaattttactttgtgtaaatcacctacaccttaataaacttgactttttaaaaatcttgatgaaggatattaagcagcctggggaaatctaaatggttgattaactaaagtaagtaatttgcaaggcagagtgtgaagggaaattggcaagtggtggagggggtgtttacatattcaggggagacataggctgggagcaaacgtgccagaatgtatttatattagtgtctctctggaagttaaacatcgtttattaaattaaacatcatttttctccttgcattttgtttgtttctttgttattgttgtgttgtttttggttttggtttttgcagcaaacagctcttctgttattggcggggttggagtggggggcggtgctacagcaatttggaagcggggctcacttgctatggcttccaggttctttccagcgcttttctcttcggtagatccatcaagccgggacaggcgagccggggagtcgcgaaggctcccgggcgagcggggtggggcggggggcggggcctgcgtctctctagggcagagtaggcgcgtccctactggatggagggggaagtaacaccccaagaacgctgtcatttcctgggccaagttgggacccggacggcctcaccatgatgagtgagtcttgcttccccagggggctggcgggctgggctgggggcaggcttccccaaccccagcccaggaagggacagggaatagcttcattccctgacttcatcaaccagctgacctactgactccctctccctccc

SEQ ID NO: 12956 - DNA, 2300 bp, Homo sapien
tgggtgctgctgggaaaactggctcactaaatagagttaataatactgtattcctgctcaaactgtatgcaaggtgaaccccaggtggattaagacctgtgacaggtaaaagtatgaagccaactaggggaaaatgtaggagaatattttgcgactaacaggtgggaaaagattcttaaacaagaccccaagaccacactgcacaaggctaaaatttgatgcattaggctaaatgaaaattaaggatttctcctccattgcagcatagcaaagaccaagcaaacaggatgcatgaaagattgagagaaatatttgcagtgtttttctaaaactgacaaaagattaatatttagaacatataagaaactcaactgcttcaattcattcagaaaaaataataaaatccagcagaaaataggtaaaggatgtaaatagataattcacagaaggaaaacaatctcgatggttcttaagtatatggaaaaatggttaacaccaccaatcaaaaaaatacaaatcgaaattacaatgtgatactactttactgatttcagattgacataaattaggacatcggataataccaaatgttagcatataaaatgggaaacgggtaccttcctaccttcatgtgccattggtgggtgtgaatggcaaagccatctggaggccaacatgacagagtgaaaccaaacactgtggacttcatgacccagcgactcaatttcttatgttctgtaagggacacgtctaacatccattccagcatggtctgtggtagtaaggaactgctggcgacctaactagccgttatttgaggaattgataagtagaatatgatagacacacaaatcaaatattattattagtcattattaatgaactcttgttgtatagtgtcacatggatagatctctaagacactgagagaaaaacaaggaacagaatgagttctcatcacaatgccgttcatatatgttaaaaacagacacaaaccatgtatcttttgaggctgtatacggtgcatgaactgggacataccttaatagaggagagggtgcatatggcgggtagaagaatgggtgtggagaaggaacgagtaaaaaataaaaacaaaaaagaaaagggccttgctgactgacgagctgaacagtacgaacttgtccccaaggtccaaaaaaatcgccccaatcccccttccatctcgtcccattcttaacagaaccaagtgcaagggactcagcgtggctgtccagagcagggcttttcttcatcaaggacctaggtcctcttccttccacccacctcgccacgccctcggtgcccgagccccgagctgtacttcgacggcacttttcaaacacaaccaaacacacccaggcttcaaccccggaccggcttgcttttattatttctcttgggaaagccttatcggtcgctaagattcagtttaagtgactcttctctgggaggccttttccgaatgctgcccttgaccaaaagccagcccctccagggctgtattcccacagccccctcccccgtcagccgggcaccccgcgtcctaactgcttattttgggcactcagcgctcccctcagggctggagttgtgctggggggggtctctgggttcacggcccgccagctggggtgggcggtcctgggaataactggacagttaagtcagcaggtacagccgcagcccagccagctccctctcctctgcttccgctctcattggctcagcctccccgccccccagcccccgccccccagcccccctccccagcgcccgcccccagcgcccgccctcagccggctgcgggaggcaaaaggctctgcgcacgcgctgtggggtggggcacacttggttgggggcggacgggggtttaggagaacggcgaggagcgggcgcagaagggtggcggggccgccgggtcgttgcgcggcagttgcgtccggcctcttgcgcgcggcgcccgggaaggggcggggccgaggcgggcaaggtggcgggcccccgcccctggccccgcccccgcagcccgcccgcgagcctcgccccgcctcctcgccgggcccgccccgccccctcgccgggccgtgctcttgctcccgccgcctggcagcctcacgctcggctccagcggccaagagccggagaaagtcctgctggtgggcggccgcggggctgagggcgtccggcatcccggggccgctccggcccgggcggcgagagtgcccggcggtccatgcatccgccgccgcccgccgccgcgatggatttcagtcagaaca

SEQ ID NO: 12957 - DNA, 2300 bp, Homo sapien
atggcctggctgaagccttcacaatcttcccaatatactccgctgccttcctttataaggatccatttctgaaaccctgtgccctggccaggcacggtggctcacacctgtaattccagtactttgggaggccaaggcaggaggaccacgaggtcaggagtttgagaccagcctggccaatatggtgaaaccccgtctctactaaaaatagaaaaattagcgtggtggcaggcgcctgtaatcccagctactcgggaggctgaggcaggagaactgtttgaacctgggaggtggaggtctcagtgagctgagacagacagtgcctgggtgacagacagagactccgtctcaaaaaaaaaaaaaaaaagaaagaaaccctgtgccctaagacctgcacactcgctggctccgctcagacatttagcaaagcagacaccttcccaggcctggaggaaacagcccctgctttttgggaatccacaagcccgcagctgcagagctcgacctggatgggcaggcaaaggctgactcctgtgcgtggtgtgagtccagcctggcccctctacaccctcactttcacctcttaaagaactgcctattaacagagcaggtactgcccaaaaggaacactctggaaacttgttgggacacttctgcctttcacaaacgtttggggggagtactactagcatttaaggattgagggttagcaatgccagacataccagaacacgcagggcagtctcccatgatgaagaggccgccgggttccccaggactcacatgtccacctcaagttcacgtgggattatctgagcctagactgtcagtcctggggctgctttatttcatataaaaatataatatttatccaaggttttactacacactgcattttctgtgaagacaatgaccgtgtaaatcagggaaagatctatattttattttgtttgaaactttaccaagcattatttaccatttcaaaagctctatccctggtagtaccattggttttcttgttcaccggccagcagtgagcagcacacaagcgacctcccgtgggctccacattggacagcctcactgcacctgcccaggcccttaggccacagcactgccatattcagggacacattattctcttttattatgcctccatattatcattacagcattatcttttttttaattttgtgggtagattatattagctatacgtttcacttcaatggtagtagtaaggggcacataacaaaatatttacttatatatattaaaaaagagagtctgagaagtctgaaaagttttgccataaacggtctccaccagcctcaactctgagtgcccgaggattcagtctcaagtccagcaacattgtgaagcaggaaatttaccttgaaaggagctatgtactctaagtagtgatttacctgtctgcctcccccactggattgaccagttccttgggggctgagagaacaggtcctgaacatttctgctgtgccccccaacccacatcctcatagtgtccagtaccaggctggggactcaggaagcatccatgggatcccccagtgccttctttctcgaggtgttcagcacctagaacagctcaagacaaattccccacaccccacccagacagagctgaatcttactggggcgaagccttgagttgcaaggcagaagctctcgtgatgggatttgggtcatattccgggttataggaggagctggggagtatgggaagcctcccacttggtctttggttttccagaaactccaccatcacaagcaggatgttaatcagtaaccgtcccacaggggatcatactttggaatagcaaatatttgctgaaggttctgggctgcaaagctgaagctttggtttctgctctaaatgaaggacttttccaggacccaaggccacacactggtaagaggcagtgggttacaggagaccttcaatgagtctaatcagggagggaccgggaaggatggtatcatccctgggcgggctccaacgtgagggctgtgtggctgagcagtgcaaagacctccatcctacactccacagggactgtacatacagattgggagctggagtggggtaagaggcgaattatagacacaaggggctcctctgcaggaaggaggccaagggaaagaggcttgaaaggcttgatatttcacccaccaccactcactgccggagtaagcaggtctccccttcccagggctgaggggaggcagggatgtgtgctgtcccagggctgagaagtggcaggtgagctggtgat

SEQ ID NO: 12958 - DNA, 2300 bp, Homo sapien
gaataatgtcctccctgaaggagggggacttctgagccacaccctggggtccagggctcacagccttaggagcaaaatcgtccacccccttcctggttcctcggtgctgcagagatattcataggacagagtctgagttctggccacttaacagaggaagaaaggctggctcggtgaggttaacttacatcccagcagctaggaaccgggagcagaggacctcagattcacaccagggcaggaggcaatggcctggctgaagccttcacaatcttcccaatatactccgctgccttcctttataaggatccatttctgaaaccctgtgccctggccaggcacggtggctcacacctgtaattccagtactttgggaggccaaggcaggaggaccacgaggtcaggagtttgagaccagcctggccaatatggtgaaaccccgtctctactaaaaatagaaaaattagcgtggtggcaggcgcctgtaatcccagctactcgggaggctgaggcaggagaactgtttgaacctgggaggtggaggtctcagtgagctgagacagacagtgcctgggtgacagacagagactccgtctcaaaaaaaaaaaaaaaaagaaagaaaccctgtgccctaagacctgcacactcgctggctccgctcagacatttagcaaagcagacaccttcccaggcctggaggaaacagcccctgctttttgggaatccacaagcccgcagctgcagagctcgacctggatgggcaggcaaaggctgactcctgtgcgtggtgtgagtccagcctggcccctctacaccctcactttcacctcttaaagaactgcctattaacagagcaggtactgcccaaaaggaacactctggaaacttgttgggacacttctgcctttcacaaacgtttggggggagtactactagcatttaaggattgagggttagcaatgccagacataccagaacacgcagggcagtctcccatgatgaagaggccgccgggttccccaggactcacatgtccacctcaagttcacgtgggattatctgagcctagactgtcagtcctggggctgctttatttcatataaaaatataatatttatccaaggttttactacacactgcattttctgtgaagacaatgaccgtgtaaatcagggaaagatctatattttattttgtttgaaactttaccaagcattatttaccatttcaaaagctctatccctggtagtaccattggttttcttgttcaccggccagcagtgagcagcacacaagcgacctcccgtgggctccacattggacagcctcactgcacctgcccaggcccttaggccacagcactgccatattcagggacacattattctcttttattatgcctccatattatcattacagcattatcttttttttaattttgtgggtagattatattagctatacgtttcacttcaatggtagtagtaaggggcacataacaaaatatttacttatatatattaaaaaagagagtctgagaagtctgaaaagttttgccataaacggtctccaccagcctcaactctgagtgcccgaggattcagtctcaagtccagcaacattgtgaagcaggaaatttaccttgaaaggagctatgtactctaagtagtgatttacctgtctgcctcccccactggattgaccagttccttgggggctgagagaacaggtcctgaacatttctgctgtgccccccaacccacatcctcatagtgtccagtaccaggctggggactcaggaagcatccatgggatcccccagtgccttctttctcgaggtgttcagcacctagaacagctcaagacaaattccccacaccccacccagacagagctgaatcttactggggcgaagccttgagttgcaaggcagaagctctcgtgatgggatttgggtcatattccgggttataggaggagctggggagtatgggaagcctcccacttggtctttggttttccagaaactccaccatcacaagcaggatgttaatcagtaaccgtcccacaggggatcatactttggaatagcaaatatttgctgaaggttctgggctgcaaagctgaagctttggtttctgctctaaatgaaggacttttccaggacccaaggccacacactggtaagaggcagtgggttacaggagaccttcaatgagtctaatcagggagggaccgggaaggatggtatcatccctgggcgggctccaacgtgagggctgtgtggctgagcagtgcaa

SEQ ID NO: 12959 - DNA, 2300 bp, Homo sapien
gattgagaccatcctggctaacacggtgaagccctgtctctactaaaaataaaaaatattagctgggcatggtggctcacgcctgcagtcccaactactcgggaggctgaggcaggagaatcccttgaacccaggagacggaggttgcagtgagccgagatcacgccaccgtactccagactggatgacaaaggaagactccgtctcgaaaaaaaaaaaaaaaaaaagaccatatatggctattacaaacctcaaaacattccaaatgttcaatatcataatggacaatattctttgaccatagtgaaataaaattggaagtgaataacaagagaatagcctaaaattctaaataaactcagtgacatattactaaactacactctggttttaaaggaaaccagaaaagaaattttaaaatacttagaaaaaaattacaatgaaaatagtaattatcaaaaatgcgtgggacatagctcactcagtatttagatgaaaacttgtaaccttaaatacatttatgtggagactggaaatattaaaatgtaagaaagctaagcatttatctcaagaaaatagaaaaaagcacaacagaccaaaacccagagaatttaaaggggtgattaaaaaataaagatataaacagaaatcaatgaaatatcaattttttaaaaaaccagtaacaaaactaaaaggtggatctttggaaagattaattagctatatagatctctgtaacaggacttatcaaagggagaaaagacataaacaaaatacagaacaaaaaaagaaaaaagaattactgatataaaataataatgtaaaaataataatggagaggcctaatgaataactgtagtatttaatttgaaaatctagatgaaatagataaattcctagatataaagttcaaacttgccttataggataggaaacttgaaaagaccaataaacatctacaaaactaaggtgtctccaaaactgcagacccatttgtaggctctactctcctcttttcccctgggaagagattccctcatctctggatggaagcaatgatgctgtcaacccaacagagagcaaagaaccctagcgaggcattcacaatgcctcatccttctccacactgtgatcaatcagtcctaaggggggcaaccacgccatagacttttggggggaactgttatgaacattgagaaaaatgagaatttctctccttctgatatcaactaaccagttagaactaaataacccagagctactgtggccacatttgtccccaatgcagacagaataaagtagaagaaagcagagctaggaaggaataaaaaaaaaaaaaagacagagagagagagagaaggagagatctgatgcctgatttagaactccgtagatccatgcctgaagtcctttccacccttggacctctcattcattcctttttgctttaaagcagttcaaatttgatgtctgtcacctgtaatccaaagaaaactgatgaaaaataaaatgtggggaaaggggaaggtgctagactttagaattgaatggccttggatttgaatctcaagggcgtttaacttaacttccatgcagctcagtttcctatctaaagaggagtgacaatggtacccacttcacagagtcattgtgaagatttcgtgagataatccagaggaagcgcttggcagatattattccatgtctgtctctcccaccagactaagaccactggaaggcaggaccttgcccaagtcatccccaattggagctaaacacctatttttctttttacaagtatctgcaccttggtgctaattaagggcacctaagacatctctgccaactgacacagggcaaccacattgatgcaactccagccacattttggtattaaaaaaagacttcatagaattgaacgcagagcaaagttaatttgcagcatttctgtgtttactcagctatcctgacaaagcctcccattggttaatgactcgggggagaggactaccaagcggtgaaggccactggcccctctaaccattaaccacccaggaagctggcaaacaaaatttaacaggcagcatccaccgcaggcttactgtacacatgctagggtccaggacagcaggaccaagccagcagaaacagcctgagcccaccgcagactgtgagtaacacctgagaaccctctgtccctccccctgcccagcctccagagcaaagccatggctgcagctcgcttgtttggtttgttgagatgctttgtttttttaaagggcacattgaacattagggca

SEQ ID NO: 12960 - DNA, 2300 bp, Homo sapien
tctgggcagtgtgactgtacctcttgcggcaactcaaagggagagggtgacttgtcccgggtcacagagctgaaagggcaggtacaacaggtgacatgccgggctgtctgagtttatgagggcccagtcttgtgtctgccgggcaatgagcaaggctccttcctgtccaagctccccgcccctccccagcctactgcctccacccgaagtctacttcctgggtgggcaggaactgggcactgtgcccagggcatgcactgcctccacgcagcaaccctcagagtcctgagctgaaccaagaaggaggagggggtcgggcctccgaggaaggcctagccgctgctgctgccaggaattccaggttggaggggcggcaacctcctgccagccttcaggccactctcctgtgcctgccagaagagacagagcttgaggagagcttgaggagagcaggaaaggtgggacattgctgctgctgctcactcagttccacaggtgggagggacagcagggcttagagtgggggtcattgtgcagatgggaaaacaaaggcccagagaggggaagaaatgcccaggagctaccgagggcaggcgacctcaaccacagcccagtgctggagctgtgagtggatgtagagcagcggaatatccattcagccagctcaggggaaggacaggggccctgaagccaggggatggagctgcagggaagggagctcagagagaaggggaggggagtctgagctcagtttcccgctgcctgaaaggagggtggtacctactcccttcacagggtaactgaatgagagactgcctggaggaaagctcttcaagtgtggcccaccccaccccagtgacaccagcccctgacacgggggagggagggcagcatcaggaggggctttctgggcacacccagtacccgtctctgagctttccttgaactgttgcattttaatcctcacagcagctcaacaaggtacataccgtcaccatccccattttacagatagggaaattgaggctcggagcggttaaacaactcacctgaggcctcacagccagtaagtgggttccctggtctgaatgtgtgtgctggaggatcctgtgggtcactcgcctggtagagccccaaggtggaggcataaatgggactggtgaatgacagaaggggcaaaaatgcactcatccattcactctgcaagtatctacggcacgtacgccagctcccaagcaggtttgcgggttgcacagcgggcgatgcaatctgatttaggcttttaaagggattgcaatcaagtggggccccactagcctcaaccctgtacctcccctcccctccacccccagcagtctccaaaggcctccaacaaccccagagtgggggccatgtatccaaagaaactccaagctgtatacggatcacactggttttccaggagcaaaaacagaaacaggcctgaggctggtcaaaattgaacctcctcctgctctgagcagcctggggggcagactaagcagagggctgtgcagacccacataaagagcctactgtgtgccaggcacttcacccgaggcacttcacaagcatgcttgggaatgaaacttccaactctttgggatgcaggtgaaacagttcctggttcagagaggtgaagcggcctgcctgaggcagcacagctcttctttacagatgtgcttccccacctctaccctgtctcacggccccccatgccagcctgacggttgtgtctgcctcagtcatgctccatttttccatcgggaccatcaagagggtgtttgtgtctaaggctgactgggtaactttggatgagcggtctctccgctctgagcctgtttcctcatctgtcaaatgggctctaacccactctgatctcccagggcggcagtaagtcttcagcatcaggcattttggggtgactcagtaaatggtagatcttgctaccagtggaacagccactaaggattctgcagtgagagcagagggccagctaagtggtactctcccagagactgtctgactcacgccaccccctccaccttggacacaggacgctgtggtttctgagccaggtacaatgactcctttcggtaagtgcagtggaagctgtacactgcccaggcaaagcgtccgggcagcgtaggcgggcgactcagatcccagccagtggacttagcccctgtttgctcctccgataactggggtgaccttggttaatattcaccagcagcctcccccgttgcccctctggatccactgcttaaatacggacgagg

SEQ ID NO: 12961 - DNA, 2300 bp, Homo sapien
caggagtttgagaccagcctggccaacatggtgaaaccctgtcactactaaaaatacaaaaattaactggaattggtagcacatgcctgtaatgccagctactctggaggctgaggcacgagaatcgctcgtaattccagaattcgagaggtggagtttgcagtaagccaagattgcgccactgtactccagcctgggtgactgagtgagactctgtctcaaaaaaaaaaaaaaaaagaagaagctgtgagtaggccacatagttccagaaaatgcagaaatcccccctcccctccccaacacacaggaagtggctcaggagattacacacagaaggaaagtgtgtctgctggggttttgcaagttggctaatttgaaaggtgactggaggaggtgaaaaaatggtgcaaacttcattcattcattaaatgagttataagaagacagacacaagtgtccattatgctaacagagctctgtgttaaacaccccaccagcatcgcctcatctaagcctcagaagagctatgtgggaaagaaacttttatccctattttatagatgaggaaaccaaggctcagagaactgagggcctcccccggatccaagtccacctagctgcagtcaccccacatcctctgcatgtcacaggtgctcagaaagatgctgaaggcacctggcccttcaccttcggaaagccaaaatgagcacggcccctaaagaggggattgacagccttttctggaaaaaatggaagtttgaatctgaggaggtgtccctcaacaacaggtgctgctccccaaatctggggccaaacgcagcagttgttcccccacttagacccctgagacccatctatatggtttttcagagccaggacacatccccaaaggtcatggcctttggtggttagcattgacttggggcccatcacatgccagaggctgcccgaagtgcttaaatgttattatctcattcgatcttcacagtcctgatggaagtgactcttcttagagtcttcctatctcacagatgaggaaaccgaggcacagagaggttaagtggcttgtctaagagctcacaaaaagagcgatggagctaaggcttggccccagatattagatcccgaacccacgccttaaccagtgacctgcactgactctcaaagaaggaagctggtgcctgggaaggagggtgcatagtgagggtgtgcatggggtgtgtgtgtttgtggggtggccagcactctccgggggcactttgccaatgagttcagctcccatgaagtccactgttgttctcctgaccagccactcagtcttgatttacttggcccagggccactggcacacctcacccccttacccgattccttgctgcagaccccaaatctcgactctcacatccctatccagcccataccacgaggctcccatctccaggcagggccctgtggtggggcagggcctcccccagatgccccttactcatgaccagctcacaggatcttcccatgatgcatttcctctggggggatcagcccagatgctgcaatagacaattgtggaagtaaccaggtggacaagactttccccctcatgtcctggggttcctgggggcacagtatccttgtgaatggccactgagtactcccacccctcccaccacaacccccgggattttgtcctggtgcgtttttccagattatcctagcccttcctcccaggatggatgtccagagcagggcgggggctgagcctagagccctgccaaaagagcaggaccccaaattctgagccccttacttgcctcacctgctcccacccatgctttcttcattcctcctccaaaagccccagctccccactgcaatcccttctgcacccagccaggtcctatgacacacacctccccagtgcacacagacctgcccaactgtggggctgcccactgggcatttcataggtggctcagtcctcttccctctgcagctggccccagaaacctgccagttattggtgccaggtctgtgccaggagggcgaggcctgtcatttctagtaatcctctgggcagtgtgactgtacctcttgcggcaactcaaagggagagggtgacttgtcccgggtcacagagctgaaagggcaggtacaacaggtgacatgccgggctgtctgagtttatgagggcccagtcttgtgtctgccgggcaatgagcaaggctccttcctgtccaagctccccgcccctccccagcctactgcctccacccgaagtctacttcctgggtgggcaggaactg

SEQ ID NO: 12962 - DNA, 2300 bp, Homo sapien
acaaaattaatgtacacaaatcaataagtctgctatacaccaacagtgaccaagctggggatcaaatcaagaaatcaacctcttttacaatagatgcaaaaaaataaaatatttaggaatatacctaaccaaggaggttaaagatctctacaaagaaaactacaaaacattgctgaaaaactcatagatgacacaaataaatagaaacacatcccgtgctcatagatgggtaggatcaatattgtgaaaatgaccataccacaaaaagcaatctacaaattcagagccaattcccatcaaaatcccaccatcattcttcacagaactggaaaaaaaatgctaaaattcatacggaaccaaaaaggagcctgcatagccaaagccagactaaaatgaggcatcacattacctaatttcaaactatactataaggccataatcaccaaaacagcatggtactggtataaaaataggcacatagaccaatggaacagaatagagaacccagaaataaacccaaatacttacagcccagttatcgtagacaaagcaaacaaaaacacaaagtgaggaaaagacaccccattcaacaaatggtgctgagataattgggaagccacatgtaggagaatgaaactggattctcatctctcaccttatacaaaaatcaactcaagatggatcaaggacttaaatctaagactggaaactataaaaattctagaagataacattggaaaaatccttctagacgttggcttaggcaaggatttcatgatcaagaactcaaaagcaaatggaataaaaacaaaggtaaacaggtgggacttaattaagctctttagagcttttgcacagcataaggaacagtcagcagagtaatcagacaacccacatagtgggagaaaatcttcacaatctatacatctgacaaaggactaatatccagagatattccaacaaattagcaagaaaaaacaaacaatcccatcaaaaagtgggctaaagatatgaatagacagttctcaaaagaaaacatacaaatggccaacaaatataagaaaaaatgctcaacattactaatgatcagggaaatgcaaatcaaaaccacagtgtgatatcaccttactcctgcaagaatggccataatcaaaaaataatagacgttggcgtggatgtggtgaaaagggaacatttctgcactgctggtgggaatgtaaactagtacaacccctatggaaaacggtgtgcagattccttaaagaactaaaagtagaactaccatttcatccagcaatcccagtactgggtatctacccagaggaaagaagtcattgtatgaaaaagatacttgcacacacatgtttacagcagcacaatttgcagttgcaagattgtggaaccaacccaaatacccatcaatcaatgagtggataaaaaaactgtggtgtatatatatatatgatggaatactactcagccataaaaaggaacgaattaattgcattcacatcagcctgggtggaccttgagactattattctaagtgaagtaactcaggaatggaaaaccaaacatcgtatgttctcactcataagtggagctaagctatgaggatgggaagacatgagaatgatacaatggacttcggggactcgagagaaagagtgggagcggggtaagggatgaaagactacatattgggttcagtgtatactgcttgggtgatgagtgcatcaaaatcttgcaaattaccactaaggaacttactcatgtaaccaaataccacctgttcccccaaaacctatggaaataaaaaagttagaaaaaaaaagaatacagcctggatcatacaaccacagacacaggcaacagccacaaccacaccaccacctgctgccagcatcagaatattctcaaagcgagcctgggcttaagtcacaatccaccatttgtttgtgggacaggcagtcagggcagatactttgaaaaaaaagagcccttcctgtttgctgtgcattgtcttcataccagttcccagaattgacctgacaaatattgaccaggttgctgtcatcttcaaacaccattttcctgtgggtagaggtgatgcagtgctgaagacctgggcccctgctcagtgcctttgctctgtaagtactttgcctgtgcccaaaatgagggcaggggcagaaactgcctcactcccttctctctctctctctctgtctctgtgtgtgtgtgtgtgtgtgtgtgtgtgtgtgtgtgtgtgtgtgtgtgtgttcctggctttgatggta

SEQ ID NO: 12963 - DNA, 2300 bp, Homo sapien
ggagatgagtccagaagccttcaggattgtccaggggagagataaggagggtttggaccaagggaaaagcaaagagatggagagaagctggggcttgcgatgtctcggggaggaagaacgatgtggggaaggagggtggccgaagagtgcagagtggccatcagtctcctgacttggaagatggcagcatgggtaaaatggccttcttggagaaagggagagatggggcactcagggtgggggcagctctggaggtcagttcagaacaggttggcaaagagtccagtaggtggatggatggatgcgaatgtaacttagaaagaaaattccactttagtcaaacaggcaaatacaaaactacacaacagaaatcgccaatcacataagtggaaatggagagaaatgaacaggtttgcaaaagaattactcattcagtaaaagggttctttataaagttccatctaagttaaattatatctggtataataaaatgtgattcatttacatatttcatttccacagagaaattgttgggaatgtggctgtcacattatgcttggtctgacatagacaagtgactatgtgtggcaatatttttgtcgcttttggcaaaggttctcttatcttttccttctccatttctggcaaaataattgttcacttattgactgaattcttgttccagtgggtaaagtctttccttcacaatcaggagtaacacttcatgccggtgctcctaggagaagagttggtggcagccattcacactgtagtataaatgactaaagagcaaagtctgatgaagggcaagggggattatgaaggcactgtgcttgtgaaaaggatgatggggggaaggacatccaggtcatgggggggaaattataaaatttgtgagaagagaaaagccttcagacggatgtgacctattggagcacacacctgctttgctttcccctctggctgagcacagacctcccctggccttgcattggattcatacaccttccttctctaaaatgaccacttactgttgtatctcagggtcaacgcacagggttggagctcctctgtaaagttgtgttaaaggaaatgaaatctttctgatgaaactgaacaggtgagggtgctgtaggcagggctggggagacctgtgagcagtacttgatagagttgctccaatcaaattctctctgacttcaacaaaacaacagtaaaagtaatgtattcagcgctcaccatgtgctgggtcccgtgctgcacaatttgtgccttatcacactcagtcctctgaacaactctgtaaggtaactatctctgttttacaaaggcaaaacagagaagtccagagaggttacttgtccaccacgaatgtcagggttagattcaagcccagccctgttggggtttgaaattgctatcaggtcatttagtctgaagtctccttggggccaaagccatgtcagctgaggcttgaaggggaagcagacagatgtgactagaactgcagctcatcagcaactgactgccagtgctcagggcacctgaaggagcacagcaaaaaggacagccttttgctccaggtttccactttttgagagatatgaacacattagtaaaatgcctgtgtctgggaacaggcagccagggtgagaaaataatcagatctacacaaaatggataaagaatgtgtggagggacctccaaagggtgagaaaccacttctggctgctaatgcaatctgggttcacatactcaattcttaaaaaataagtccatgaagcagaaacatcaaaaagcatgggatttggaatttgagacctgactttgaagcccacacagaacacagacaagtcaaccatgctatttggggtaagttgcacagactctctgtggcctgtttactcatttgcaagtaaaacagcaataataagatctacatcatgggaatattgtgaggctcagagattatgtgagagagctctgctaactggcctatctgtcctcattctgctgctgatggcgtgggggtgttaaagggtctctgattcagggcctggaccctcagtttaccccctcaatggttcttacttctcttgcagacatattttgttccaaaatggcatcttacctttatggagtactctttgctgttggcctctgtgctccaatctactgtgtgtccccggccaatgcccccagtgcatacccccgcccttcctccacaaagagcacccctgcctcacaggtgtattccctcaacaccgactttgccttccgcctataccgcaggctggttt

SEQ ID NO: 12964 - DNA, 2300 bp, Homo sapien
tttcatctctagaagtttgatttttcccacattacagtaacatttttattatttaagcatattttaagtaactgttttaaagtccttgtctacaaattccttaatctctattatgtctgagcctgtttatattgcttaatttttcttctggtcatgggtcacattttcctagtcctagaaggtctagcaatttttaattggatgctggacatcataatattacaattttgttgtcttcctttacagtgtttgacatttgttttaacaggcaatacgttacttacagatctgtttgagcttgtcaaggcatgtttttaaactttgttagggtgggtctagtgcagctttaattcaaagttagtttagccctaatgccaagatgtgacacttctgggtctctactgaatgttccaggtctctccactttgggtgcataaccttaatatatcctatgctttgtgaactctggaaattattttgcttataccttcacagtaggtttattttttcgtgtgtgtgtgtgtgtgtgtgtgtgtgtgtgtgtgtgtgtgtgtgtgtggaccagccatgtggaatttcactttatgcatgcagagcttagtacttagctttggacttaaagagacccctatgaacatttctaaagctctcctctagtacttcactgcacaaattatagcttcctcagttttctcaaactctaatgtctgtctcctaagctcagcaagcctcccatgccctccttgggttttcttccacacgtccagaaagtatccttaggcagaaaattgggacaattgtagagcttatctcattttttaccttccctgcctgttctctaatgtctgaattgttatatgtatttttcgagtatctcaatagtgtcataaattttgtctagttttctgtttacaacagtttgcaaccaatatcagttactttgttttggccaaaagtgtaagtcaactcaaactttacatatatacctgtgtaactttaccttaagtagctacaggactttccatcaccctgagttccccttgcttattaccagtcaggattactcttcaaagataaatggattatttcattttatttcaattcatttattcttttagcaaccacttactgaaccgtgagtattggccaaagagtgggtgcacaagtagacaaaattaaggtagacaggatccctgattcatgaattgttcagtcacacaaataaatgtgaaactatgacagtgataagtgtttcactgagaagttgatggtactataaaaatagctgctgggagaaagttttcttatttcagtggtcaaagagagtttccttgaggaaatcacacaaactagggcctaaataatgaataaaaattaattaggggaaaagtcagatgaagagagttggaaggatattccaggagtaggaaacaacaaatatcacatgtgagcataaaaaaaaaaatcagcagaatgggctaacatggatgtcaagggcaaggggcttcatgatctgtgatgaacttagaggagcccgcagaggccaggcaatgcaagttaagacttcagtgtttactttgggaaacgggaggcaattgagacattttaaatactaagtgacacagtcaggtttgagttttaaaagactattctagctgtcatgtgcagagtgaattggaggagcaggacagggtatgcagagagagctgttaggaagctctgtggtagcccaggcaagacacaatgacagcccaactggcctgctagagtggaggcagagaaaagtggatggacttgagcaacattcaggaggtaaagttgacaaaactgggcataagttgacatgaagaagaaggaagtgcaaggatgcccctcctaggctcaactaaccaggtgaatggtggacccagtgacagaaatgttgaaaagaggtttcggttgtggctgttgctgggagatggttcttgggaaggagtctgagttcactgtggttcatattgcatgtaaggtttatttgcaacatcaggaggagatatcaagtaggaagttagacatgtagagatcagaggaaaggattgagctggagaataaaaataatatatcatttgcatgtctagctggagaataaaaataatatatcatttgcatgtcttagtaatgaagtcatgggtgtcgtggcatgagatcagctggagggagaggagagattaaagtgaggagagagctacaaccaagtaagcaagtgtcagggctcaccaaccatgcaaggacagggcaggagaagaggaacctgcaaaggt

SEQ ID NO: 12965 - DNA, 2300 bp, Homo sapien
ggtgtggcatggtcactaacatgtttcttccatctgggagatccaaagagtgaggatgaggaccagaaattcctagctcccctctcacccctacacatggcaataatgtaaaaaatattcaggccacccctcagcctccgaccagtgccttaggcccattaacttataacaataatcttcccaggctggacaatctccttcatccttctagcccctgatgaacaccaggcacaaatccatgggacctgaatcttaactacaggcagtcggggcagcctcaagtctaggctgaggtcccttaatgggcacgtgaagggggctgctccctcccatgcctatatccttcactgctctccacagacgtgcacctcctccggggctcttttccccaggcaggacaggcaactcccaacccaggtgtagcgcctggctggccggcagcccacctgtggctaccctctgcccatggcctactggcctctggcactgtctgaactcaggcatccccagtgctgcccgtgtcgctcagtgggcatccctaccctggcctcttcctgcatgtctcccgtggaaatttaccctggagcagagagtgtctggggcaggcagggaggcatggccctcagactcacacaggcctcaccctgtcattagagggcaggttttccctcccaaaccagatgtacagacctggattctgggtcagtgtccacctcactggctctgatcttccaccactatagcctctacagtcacaataggaccacctgtactccttggtctcagcctgtccttctgtctcctctgcaaccccttggtgaccagagccggccagtgtgaagtctctcatctcgccgttcacatggtgtctttgacccatgcatcccagcaggcaggccttgctgcctgggcgagggaaggtggtggctcaggggcatcttcaggggtggtttctgatctgggcagctctggaacccatatccccatgtccttgttcatctaggccctgagtgcatagagtctgtggctgaaccaggcctgggaatgaactagtgtctcctctttccaagaaggtttgtctgggtcacctgctctgaatagctctgggaatgagagtcatgtctttgctaaaagcagcaacccaaaggaagggaaaacaacacccatggctcttccgaggcctccgaggtgtttcgatcagatacgacctactgtgaaacaccactcaatggggaagaaatatgtgaatgttttttctgctcactggagctcattagattaagcagaattgaagataggcatgttgagcttattgctcttccatcccagcatcagtgggtttggaatgttcccagacatcttcaatgcttctctctccaagtggtaaaactgaagataagaattttattttattttattttaagcctttgaaaaattaatcctaaagtaatatctgttttttaaagacaatttggaaaatatagaaaagtaagggggaggcagagacaacagagttcagccatagtctcatcaccccagcacaagagaacccaaccatagtctcaccactccagcacaacaaatgtgcaataggaaaacaatttgtaatttccatgatcatgaactttgaggtgaatttttaattcctgttcttcctaacggaatctacgcatttagttgtctatttgtctgtcctcgaactttttccccaaaggactccatgtgagctaagctaatttggaacacatgaaaaaatagcaaaagaaaatggtgagggatacatgggaatgaccccaagaagcccagttatcaacctgttcccatgggcagcaatgatgatacttgggttgaatattcagtattaggactctaggctcatctacttgtagactattctggcttccatacccagagagcaactgggaaatagagtcgttgcaaaaggtgtctagtggacttcattagggaagccacagcccagtgggtgtggccggtacgatatcatgccgctgcctccacagggagagctcccagggaggtggtgtggccattgcttccaaagcctccatcacctgcccatacacgccagctcattgtattggccttactcttccaagaggccatggaagtataaataataaagcaagaaaggcagatgcatttggctggctcagtggacttctgaatgtactgtgagtatgagaccttcccttccaaaagatccggtgcttcttgtctattccacacgaagcttgcttcagatcgagggaggatgtagcactgtccacaggtgggtgtat

SEQ ID NO: 12966 - DNA, 2300 bp, Homo sapien
aataccatcaccaccaccaccatcaccaccacctccgtcaccaccatcaccacctccatcaccacaactattatcatcaccatcaccaccaccatctccatcaccaccatcaccaccacctccatcaccacctccatcaccacaactattatcatcaccatcaccaccaccacctccatcactaccatcaccaccaccatcacaactattatcatcaccatcaccaccaccatctccatcaccaccatcatctccatcatccccacctccagctccatcaacaccatcaccagcaccaccaccatcaccaccacctccatcaccaccacaaatattatcaccactgtcaccaccactacctccatcaccaccaccaccatcctctccatcacccactgtaaccaccataactataatcaccaccgtcaccactactaccaccaccatcacctccccaattattatcaccaccgttaccaccaccactaccatcaccaccacctccatcaacaccaccatcactatggcaactatcaccaccagcctgaactatcatcacctgcatcaccacctccagctccatcatcaccataaccaccaccacctccattattaccagcaccaccacccccgccaacaccatcaccaccaccaccacctccaccaacatcaccatcaccacaactactacttccatcaccaccaccaccttcatcaccaccacagtgccatcatcaccatcatcaccacctccaccaccactctcaccaccaccatcaccatcacaactattatttccaccatcaccaccacgagcagcaccatcaccaccaccttcattaccaccaccaacaccagcaccaccatcaccaccagaactattatcatcattgcaactatcaccactctcaccactaccaccaccaccatcaccaccagaactaatatcaccattacaaccaccaccactctcaccaccaccaccaccttcaccaccagaactaatattaccaccactgctggcaccatcaccctctcctcatggagaaagtgacttgtaaactaaactttgaagctgggtcagaatttcccagatggacaagaagcaggtattacaaacccaaggtccacagtgtgtaaagacaagaagggcttgtttggggtggaaaaggctaagaatgagcccttccctaatgcaaaggtaagagaggctgaacaggtgagtggtagacgttccattacaatcccaacattttttcactgttgctatttaacaaacttgaattttctgtcacaggcaaaggagtttagagagggaaataacacctcttcattcatatgtttatttgttaatttattcaacaggtatttattgagtgccttttatgtgcaaggttcaaggttcaagggatatagttaagaacaaaaccacaaaaatctgtttaaataatctcattaaccctcactataaacctagaatgtccattttggtattattagcaaataaggcttctaagccctaactcgatgttcacattcttcatggtggtctcctgtggggtgtgcgaagtccatttcacagaaaaaactgaagtgtgaagaggttaaacatactatccagacacatccagctaatcaggaatatagccaggattcaaagccaagctgctctgacatcaaaacttgtgacttttccctttcaaagtgctgtctgtgataaatgcctgaagctgtaacttcagacatcggccgctggtgaattatgagcattgggatatttttgacatttaatttgatgtgcttgccagggacatgctttcatgttcttttcttttccctcctgcttaaatgcagggaacaatgacaaagttctctcttgccagtattttcccatttccccgtgagaaaaccacaggctccccaggaagtttgctgagcacaactgcccttggctttccccagccaggggccacggaggctttgaacacattcaaagggccatttcttccccacacattccaatgcagcctttcagcctgaactatctctgggagactggaggtgtcacaagctgggaggatcactggataattagggagactcccaggtgcctggcagagagtcctcaccagccccctgccggatgtctggctggcatctgaggggactgaacatggcaagaagcaaaacagcagcacaagaaaccagtttcttcatctgaaaccgagcaggctctactccagaacagaacccacagtcccaggcgctgggccttcttcttaagttgggaaatcactcat

SEQ ID NO: 12967 - DNA, 2300 bp, Homo sapien
tgaaataatacgacagactaactcacgcttccactgcactcactatggccagatgctattctaggactttacagatgtcagtttactgatcttgttgacaaccctgagatttaggggcaattattacccacagtttacagatgaagacactgaggcagagttaagtaacttaagtagtggtggagtctagattcaacccagacagtctggctgtccaccactgctgggatgggaagggaagaaggaagcacccattaagactgatacagggctcagaacatttaagagtgctgcccccctgcccttaatatcagttttctgattagtgattattgcttctcatttgacacgtgaaaaactgaggttcagagaggtggagtgacttgcccaaagtcacaaatctcagcagtgagggagcttgtctgacgccaaagcccagcctctgtccagaacataccaggggcaggcgccagaaactaaagggcagtgactgtgtgctcatggcagggacaagctgtccatcccctgggctgcagccaagcatacgctaacccctggaatctgtggcatcagccccaaactcactgaagaagcaagactaaaaaagcaaaaccccagactgtagaccattgtaaggggaataatgtattttcacattcatcagagcaaaaatccatggccatctttcactcattgacttactcagtcaacatccatggagcatgtcccctgcaccacattctgctctagcgcgtggtacagcagtaagcaaagcagcagctgctattccggtggcaggaaaagtctgtccaagtggagaagcagcagatgctgggaaggaatatgggcttcatgttcagtggccacggagcagaccctgactctggaatctgagctaacaatgtctccgggcttacattttctcatgtgtaaaatgggccaagcttagtatacctagagtgtataggcaagggaaagagagagatgagtgagggaaagcgagaatccactgagacagtagctctcactttgcctgacctgctagcttcctctcttgtcctggtgttgacccattttggacctcaggccagctggctccagggctgtgcttgtgcctgctctgccatccccatgtctacatcgctcagggctcccagcccactgtgctgctcagtggtgtatatttcacttaccttaaggcccaacgacttggaaacacatccagaaagtctgctagaggatgcctgaatggtcaaggtcatctcagtcagggcacccagggccacattgctccctgcagtccttccccacatagcttgagaaatggctgccccaggagggtgcaagggtgcaagggtgcaggggttcactgattactggggagagaacaagttcaattccatggttaaagaagaaaaatgcaaattgaatacctggcccaaggaggttcctggtcccaccccatgccacccttgccctgggatgtactctccttatggtctgacctatgagatctcagtggactctatcctcagaaatcacagagtccaggattgcaaactggaggccctgctgtgaggccctgcccacaggtgggtcttgcctggcctgtagagagctggctctctcacttccacacatccccaccattccccaccgtggcaccatggagtcttccttacctgatctaggaaggcggcgctggagcttgctgccccctgtctgatccagcccctcatgttgtaggagggaggtgggcgactgaagctcagagagggagtaaatgagctcaacttcacacagctagtgaggggctggttggagaccagattttccaagtggttccccgggccctcggggagcagcaagggccaggcgaacctccatgcactgcacaaacatgaagaagtgaaccctcttggggttccccaggtgggaagtggggtgtcttcttgggagggggtgaaccaacttctggtgagttttccttgttgaggcaatgctgcacccgtagcctgtttgttaataattacctggtcgggagagagtgggtggtactgagaaggcctggtttgaccagtcctcctgggcttgataagacagagctgagacagccacccagggggtccactccaggacagactgtgccgtgagtaaccccctgagacaatggagacgagagactctagagggagggtgaccaactgttccactttgcccaagactgataattcttctgggatatattttcagtgctaaaaccaggaaagtcccaggcaagctgggacactttgtcactc

SEQ ID NO: 12968 - DNA, 2300 bp, Homo sapien
tctaggggaggatccattcctttccctctccagcttctagaagcttcctcactccttggcacctggctccgacatcacattgacttttcccttcctgcttctaccatcacatcaccttcttctgactccaatctcctgcctctttcttgcaaggatccttgtgattgtaattaggacccagctggataatccatgacaatctcttcaagatccttaacttaatcacatctgcaaagtcccttttgtcatagaacgataacattcacaggttctgggtattaggacacggataacttcggggttccattactcacccataactggtatgcagtgctgatttccatcctgtaggtacggtttagggatctctaggtcaatgagataatggactcttgctcatgttacatggcataatgggaagaaagccaaacctagaaaaagagggactcaggttcccttgttagagcctcttcttactaactgtgggattaggggctgattccctgacctgctgtgttctgtcttctctccaattcaatgggaatgaactgtgagggcactgagcaaaaactaaggtctcaatacctagtagtagtgggacttgcctctggatacccagtagtgatcctgccgcctgtttctggatatcctacagtagcaatcccacctgtttctggatatcctacagtagtgatcctgcctgtttctggatatcctacagtagcaatcccgcctgtttctggatatcctacagtagtgatcctgcctgcttctggatacccagaagtgatcatgcctggttctagatacccagtagtgattgtgtttcctctagatacccagtaggtattgtgcttgcttctagagatgtagtagtagctggacttagctctagatacccagtgctcatctctagactgggctgagatcagtgtctcccttgaagggttattgtaaggatgaaaaaagataatgcgtttaaagcacttggtgtagtaggtggtctttttaaaagtgtgaataaatactagttcttattatttctgtggatatccaacagccacataattgggccccaaagccatgaagaaggaagaggaaatgtcttaaaggttgtcgatggacagtgtttgctgaacatcaaaatcactttccaggtattacctctgatttgctctaccaactccacaccccacctgcagccacataaccttccatgatcacggccatgcacaacacaccatgtcccccaggcaaggggaccttagaaacataaccaggcttgagacagcactctgcaccggtgtcttggaaatgctcttaagagtgtatggctgagttagggaaccaggatttcaaagtagaaagggagaatctacccaagcccatagaaatcctgaatccactcctttctcagcaacaagcactggcctgggagtcagccacttatgcaccaaccccactctgcccctaattaaatgcatgactttgaaaattcccctcattcttctgagccccaattcagtgattggtgcaatcacaggcttggctacagtgacccattcattgcaggcatggtgagtctctcaatccctctcatttccactagaatctaactgttgggatctatgacccagtcagcatagcaggcctgtggggagctctcaggttcaagcatatgccccccctaatctacaagaaattagctgcagaaaaccaaggaatagaacctggaaaaagagagggtttgctagagctgtccctttccctgtctctggaatgccaacaatagggaggctctttggtcttgtctctcaggagtgcccatgccattccaggaaaatgatggcccagctggtggtgtaaggcttggggggcagcgagtgggcatcgtggtgaaagcctcgggatcagggagctgcgtctgcaggcaggcctgctggccggaaacctgccaggaaaggaaggggctgtcccggggcggggccagggaggggtggagacagggccggctgtggtcagtgacaaatgctggctgcaatccagccagccctctgccctttctgagcccgagggactgccacctccactgtgtgcacactcagctacgggacacagtaagtaccgatgccgcaaagggaggtccccagggcttgagggcatgtgaggcgaggagaggatggactctagagttttggggtttggggtctgcaaagctctgaaggagtctcatctctgcagtttcaggtatccaaggcagcagaggtgagtgggtcccccgagctctgtgaccttatgct

SEQ ID NO: 12969 - DNA, 2300 bp, Homo sapien
gtcttcactccttttatttgcagctgagaatttctaattctgacacaaaattctttttcatttttcccttttttcatctttagctaagtgggagacaagcttcaaccacaaaggcacccaagagcaagacttctacgtgacctcggagactgtggtgcgggtacccatgatgagccgcgaggatcagtatcactacctcctggaccggaacctctcctgcagggtggtgggggtcccctaccaaggcaatgccacggctttgttcattctccccagtgagggaaagatgcagcaggtggagaatggactgagtgagaaaacgctgaggaagtggcttaagatgttcaaaaagaggtactttcagactaccccagggccagcctaaacccacacagccccagggagacacacacgccctaccagggccacacagcactggtgggaaggactcacccagccaaggagctgcctccaggcccagaggcatcctgtgacatccaagtcctgggggcctagcccagttggagggacaagagctggaaactgggttccttagggtggtgccagagtgggcagagacctctgggcagcccacgtccaagtccagagcaaggggaggctcatcctagaaaagaggccagaggagccataaccaccattgttccttgggttaaggagtccttttttaaaaccatcaaaactaagaatccagtgcattatgaatccaaggggtgaggctcagtgtgccaatgccccagaacagtctaagaaagctccttttccctttccaggcagctcgagctttaccttcccaaattctccattgagggctcctatcagctggagaaagtcctccccagtctggggatcagtaacgtcttcacctcccatgctgatctgtccggcatcagcaaccactcaaatatccaggtgtctgaggtgggttcagaagctcctatgcatctgcttcccaaggtctattctgttctattctttctattctactctaccccatttcattccattccattccactcaactccactccactccactccactccagttcactctattcaattccactccactccactccagttcactttattcaattccactccactccactccagttcactctattcagttccactccactccactccactccagttcactctattccattccactccattccactcctccactcctctcatccactccactctactcctccactccacatctccactccactcctccactccactcctccactccactcatccactccactcctccactccactcctccactccactcctccactccactccactcatccactccactcttccattccactccattccactcctccactccactcttccactccactccattccactcctccactccactccactctattctattctattccattccattctactctattctattccattccattgcagtcaactccactccactctctactattctattccactcctctcccctccactccattccattgcagtccactccactgcactccactcctttattctgttctgttctattctattctattctattctattctattctattctattctattctattctattctattctctccctctccctctcttttcccacaagtagtgaaagtttcactttgtgtcttatccttcatgtaatgggaagccatatccaccactgttccttgagttaaggagtcctgttttaaacaatcaaaactaagaaggcacttcctagctatgtgatctccaaaaaatacttgactctctgagcttcctttctctcttctataaaattgaagaattacaccttgctcaaagatgccatgagaattcaatgacagacacatgcgaagtcaccccccagcacagtgcctggggcagagtagctgctccattgttccatttcctacttgctccatggctcagttgaacagatacttagaggttgatgcccataggcagaagctttgccatttgctatgatgacttcacctgcccctagtggcctggtgatgcctggtgtctcccctgcagatggtgcacaaagctgtggtggaggtggacgagtcgggaaccagagcagcggcagccacggggacaatattcactttcaggtcggcccgcctgaactctcagaggctagtgttcaacaggccctttctgatgttcattgtggataacaacatcctcttccttggcaaagtgaaccgcccctgaggtggggcttctcctgaa

SEQ ID NO: 12970 - DNA, 2300 bp, Homo sapien
ttgcgccactacattccagcctgggtgacaaagcgagtctctctctctctctctctctctctctctctatatatatatatatatatatataatatatatataaaaatatataatatattatatatgtgtatacgtatatatgtatatatatacacacacacacatagagagagatatatatataaagacacacacacacacacacacacacacacacacacacacacacacattcaattccaaaactgggagcctgaaagtcatttaagaaagatgggcccagacagttattggtcatcttagtgccttacagtcaacaaatatgtaagtcctctaaagatgcagcactatcgcaacagacaaacaaaaaatcctgtcctcgtagagtgtacatttaatatcatttcatttcatcttgattaccactctgtcagggaatattgccttgcatcttagacatgaggaaattaagctgtagagatttcccatgatttgtttgaagtgagtcagttggtgagtcagacatcagagattcaagccaggtcagctcatgccagagctagaacctcgccactggtctggtggcctccaaagcatgccctctagagaggcctgtcagggctaccccggatggggactgtgaccatgaggaatcaagaggaaggatttttttttttttgagacagagtctctctgtgttgcccaggctggagtgcagtggcgtgatcttggctcactgcaacctctgcctcctgggttcaagcgattctcctgcctcagcctcgcctcccaagtagctgggttacaggcatgcgccatgatgccctgctagtttgtttgttttttttttttttgtatttttagtaaagatggggtttcgccatgttggccaagctggtcatggactcctgacctcaggtggtctgcccacgtcagcctcccaagatgctgggattaccagcatgagccactagtcccgcccaggattttttttttcctttttcatgagccaaagaaagaccccagactagctaagagagaggcccaaggatacctgaaggccggggaggagggacaaccacttgttggggtgaaccaatcgcagaggctcagcaggacagaggccaaggctgaggaggcccccacagagaaacagagcctgaggacaaggggttcctcacaacacctgtgctccccgaaagctcccctccacacccctctctaggtgccctactctctggggttggtgaaggggtgccaaaaatgcaaactgatccacagaaaaatagagtcctgtattttaaaaatatatctaggtttgtatatggacattcacatcacacagacacacagacacacatgcagccacacacacacacacacacagagacaccaaagaaaagtgctttagaaatacaccaaaatgtggctgggtgcggtggctcatgcctgtaatcccagcactttgggaggctgaggtgggcagatcacgaggtcaggagttcaagaccagtccgaccaacaaggtgaaaccctgtctctacgaaaaatacaaaaattagctgggcgtggtggtgtgtgcctgtagtcccagctactcgggaggctgaggcagaaagttgcttgaacccgggagtcagaggttgcagtgagctgagatcacgccactgcactccagcctgggcaacaaagcaagactctgtctcaaaataaaaataaaaaataaaaagaaataaaaaagaaatataccaaaatgttagctggggtcttctctgggtagtaaagtgctgggggatattttccaaagtccttctttacattctctgagtttttccatgttcttcaatgagtatttaataagcagataaaaactaatacaacaaaggattttttctgtgtgcttttttgacctttggaggaagagattagagctagtcccataaccaggttatttgagtaggtctaacaagcccgtattaccagaaattatcatctggtcatttccagtccgagaacagaacacttggttgtcctggcatttcccaagcagggggaggagttctctgcaggaataaataagcctcagcattcatgaaaatccactactccagacagacggctttggaatccaccagctacatccagctccctgaggcaggtaatccatgatgttttacatcctgggagcggaggaatctgtttttccaggagagttttaggcagcagcctggagtgtgtggagtgtgaggggtaagcagaggccaggaggaggtgtactcaggtgttaggggccaggggtc

SEQ ID NO: 12971 - DNA, 2300 bp, Homo sapien
ggtggccaggtggggctggggccatcttcacagggcaagataatccccaaggagcctggccacttccaagattctatgattctactctgctatcatctttaattattttaaaaaatatgtcactgacacataacaaatgagggcagaaatggcattgttcccatctggggaagagcctcaagggtgggcagtatacaaaacatgaccctttgccagattctaactggtccagtgcccaatcccattgatagaaactcaaccaatgcaaacctcagcctgcaagctccgaaggggcagagtgcaagccggtagcttttgcctcctggagcccacagtccagatggggacaaaaaaagagatagggacacaaagagtgatcactgagccagagggtggaaaggtgcttaggagacatgagctgcttggaggcagagtcctgcttggaagctgttggttgattcctgggcaagccacttcccctcctgggcctgggttttcatctgtaaatgaaggcgtggatccagatctccctctaagactactccacgcctcacgtgccatttgttctctgagtttcccatgttctcgcctcctactacctagccctatgctaggactctcccctccaggacacagtagccagcctagctttcccctccccacctgcctctaacaatgggaaacaggcaggtggtaaacaggtgggcagtggaggtggccccatgtctccagcctcccctggaagctcccacccccctcattgttcagtgctctggtcctcctggagtggagacctgcagggcccctccccttcctctgttgacctctcctcactctccaggtgccagttttgctccctgcctcagcctggtttacatacagtgtatgtgacggggcttggtcactgctggggcagccctgtggaaggtggaggggaccgagcatgcatgagcttcaggctgagacagtcccagctcagaaccctggagtgcttgttccctccctttctgctcttcctcttccattgcacccactggacccaagagcatgcaaggattgactcacccagtgatgctagaactatgtattcagctgaaagtaagggggtgggggcatccaaccaggggcagaagatgggaattcaagaaaggaaggtttcccctagaaaacggttttcgtcttttctcttaaatccagatagaataagaagcgaaggccgttacagcagagagaaagttgagtcaagcagagatcagatactaaagacactagactaaccagacattcgggccctcagttgaacagctgaggatgtcagaagatgttaaggaggcaaaattggaaaacttggtggctggcagacagaaatggggggagatgggagcagatgtgagaagatttaaaggcttgtagagcttgggtggtgatttcatccaccaaacctatctctctccccattctggcatacaaggcagcagtcagggtccccagaggcagcccatctttctggcagggacccatgctggagatctggccagctgaaaggccccaaaggagctcggtgccctgggtaatatgggaaggtgctccatggcactgccctcacatggaggccacagaagcccctgaatggctgctgcaattggtaacggggacacctgttcaactgaaatatctcctaccctgagatgggtcctttctccaagggatctttacaattacatttgtccccagtcattccatgttgggaggctgcagggaccagagaagctgagatggtctttggggaggggaaaggaaagatggacagttattttggtcctagaaagcccaaaggtggggaagtgtcaagaaggaagatgagggcacaagagaatgtagggccacccagaagctggctctcattgcaattacagaaagaaaaaccaaaataaagaaagaaaggaaagaagctcccatttattgagcagctactctcaccagccattcacatgcaatacctcgtttaattctcgcagcggctctgaaaggtggatggtggtattgccatttgttaggtaggagacatgccgtccagaaaagcaaataattaaacattcaaagttgacctgggcccatttgaaaattccttttgctccctcattttaacccctaaagtaaagccgtttgtgactttatgagcttttaccaagcatctcctaaaaccaagaatggaggtgaaagattgtggagcccacaacctagagaaaggattgacaattttttttccataaagggcctagtagtatgtattttaggct

SEQ ID NO: 12972 - DNA, 2300 bp, Homo sapien
gcactgccctcacatggaggccacagaagcccctgaatggctgctgcaattggtaacggggacacctgttcaactgaaatatctcctaccctgagatgggtcctttctccaagggatctttacaattacatttgtccccagtcattccatgttgggaggctgcagggaccagagaagctgagatggtctttggggaggggaaaggaaagatggacagttattttggtcctagaaagcccaaaggtggggaagtgtcaagaaggaagatgagggcacaagagaatgtagggccacccagaagctggctctcattgcaattacagaaagaaaaaccaaaataaagaaagaaaggaaagaagctcccatttattgagcagctactctcaccagccattcacatgcaatacctcgtttaattctcgcagcggctctgaaaggtggatggtggtattgccatttgttaggtaggagacatgccgtccagaaaagcaaataattaaacattcaaagttgacctgggcccatttgaaaattccttttgctccctcattttaacccctaaagtaaagccgtttgtgactttatgagcttttaccaagcatctcctaaaaccaagaatggaggtgaaagattgtggagcccacaacctagagaaaggattgacaattttttttccataaagggcctagtagtatgtattttaggctgtgtggtccacatgagggcagattcttctttttgacttcctcctctgcatcttcttcatcttctctttcctcttcattttttttacaacctttgaaaaatataagcaccattcttagctttaggtacacacaaaaataagctatggctgtattggcttacaggctatagtttcctgacccctgttctaggggaggaaaataattgtacccaactaaatgcgtgcgaatcatgggcctatgtcatgattcccaaagaatgagtttcatggaattttcaacattttaaatattttactccattcttcccttgcttgcatagtttctgatgagaagtctgctgtcattttcatccttattcctttttagataaggtggagttttcctccctctgcctctacctctacctctttcaagattttctctttctctttactatggtaaataggcctttagtgagaggagttatgtcagcctggctaggagtcaggctgcatttcaggtttgtgatagctagaggtaccagaggcagtttcatggaattttacctttgcaacactgagagcctaggcagcctcagagtcagaacacccacagttgaatcctcagcctgacagacactgaatccagggcaaatcttagctgaatattcatggtctgtagaggtggacatgagctagatatgagctaaggaccatagccagctcatggcttttgtgatgtccaacaccgctatcctctaagatgtcacaagtgtccctaggcttttattcccatggtctctcctggctctgagttctatcttccattaaggttcttcctgttcctcccctcattcacactgattggcatctcttctgtctgccctcaccaactcacatacagaacccagtctctttcctcttatttccacccaaagccctcccacaagccactgttatatgttcacatccctgtaataccagtgagtaataattgctaatgagacatttttccttttatggaacaaaggctgtcccatttctcctcaggcaccagcctcccacatgttgtcatgcctctttcccccactttccctaaaccttctttctctcttgcactccttattccctggttcctattgatttctcatttagcacaaggaactaggtctttcttttgtggcccttttcccaatccaagcctgctgggctctccctcacccccaataacttttactcttgccaagctacttctctaaaccaaagcagggtccctcctatgagggactctgggcacttccactgctgcggaagcagggtcgagcagggcgacccttgcactcacaccttctccaactgcttgctccaccttcagccaaatgggagatgccctttgacccccaagatactcatcagtcaaggttctacttgagcaagaaaaagtgggtaatggtgcccatgatgagtttgcatcacctgactataccttacttccgggacgaggagctgtcctgcaccgtggtggagctgaagtacacaggcaatgccagcgcactcttcatcctccctgatcaagacaagatggaggaagtggaagccatgctgctcccagaga

SEQ ID NO: 12973 - DNA, 2300 bp, Homo sapien
catgctcttgcctctgctgaaacccccaaacccctttcctgcctctcccctgctccatcttccagtttcagttcaggtgccacctcctccaggaaaccttccaggaacttctaccttccatgcctcctgcaggctcctcattcaccctttgcagttcacctctaactgccatcgccctttcctcactgagctgtaatcagctccccacatttccctgcgatcactggcatgctccttccaggcagggcccaggctgccagtccctgttgccctgactgctgaatattggttcagtgagtgagtcagcaagtacatgaacgagcttctcttggggcctcagtgttcctgtctgtccagagcccaggttggaccagggcatcctttctgctcaaaagctccatagttttggggcctcagaggaagcctctgctgctgctaggttccatctacaccctcaccagcaaggcacaatggaaccccacctaaagaatgtgagcgtggacaggacactggacccgagacagcttgtcaccagcctggccatggagcacacgccaccctgcgcagatctctgcatgtctgtcccacaggacccgagcctccccaagggagccattgtgtctcactcatcttgtgtccccagcatacaattcaagtcctgacatgtagcagccgttttgtctatgtttgttcaatgaatgaatgagtgaatgaatgaaggttaaatataataagagaatgaaagtgcaaacttcagcaaaaccaagatattcaccaaagcagattaccaggcaaatgggcaaatggagatggttggttctctgtcgataagtaaatcacggggaacagaggctttcctggaggctgaggctgagctgattgtttcttacactgatgaggaagctcaagttcagaaaggcccagggctgtccgaggtcccatggaaaatcagaggcaggacaaggggttgtgatgatggtcgattctgtcagttattaacccaagcctagactggacatgcgaggccaagcacttgtggcagagaaagctaggaatggtccagtgttaaggtcccagagaggcaggaaaatgcctgtgctctaggtaaaggctgaagccctagaaggaggcccccccaaaggttagcccatgaaccatttgttttttcaacaaatattgttgagtgagcactaggaatgaaccatgcacgagacagagtatctgctctcacggagcttatcttctagtggggaaaccagacaaacatgtcctaccatgccagatgggcatcagaaaaaccaggcagggtgagggtggcaagggcagaggtggggtctctctggggaggtgacctttgagcagacaactgagtgaaggaaggaagcgagctgtggaaagggcgagagcaaggctgctccgggcagccaatggcaagagcacaggtcctaagcaggaagaagcttggtaagttctagactagcaagaaggccaggatggttggagcagagggaaggagggaaaggatggtcagaaggaggtcagaggccaggcacggtggctcacgcctgtaatcccaacactttgggaggccgaggtgggcagatctcctgaggtcaggagttcaagaccagcctggacaatatggtgaaaccccgtctctactaaaaatacaaaaaaaaattagctggatatggtggcacacacccgtaatcccagctacttgggaagctgaggcaggggaattgcttgaacctgggaggtggaggttgcagtgagcctagatcatgccactgcattccagcctaggtgacagagcaagactctgttaaaaaaaaaaaaaaaaaaaggaggaggtgagaaaggctagcagggccttgtcatgtagggcctcctaaggtgtggtgagaaacacgggatttctcttagttgctatagggtcattggaagtctccagcagggagtgaacgcatctgatttacctgttgaaaggatcacaatggttccctaaggggggcccaggaccagctcagacccttgccaaaatggattccagactccgtggaggcctgctgagtcagaccactggaagggaggccccacgtccgctgccactcctggggctctctgtgccaggtcctgggctgagtgtgctccgtgcatgattgctttgaatttctgtaaccttgtgatgtggggattcttagcagcatgccacagagtggaagccaaggtcctgagaggcaaggccacctgcctaaggtgctgggcttatatgagcccagccctggactcctccctgt

SEQ ID NO: 12974 - DNA, 2300 bp, Homo sapien
cgtccatcaactgccctgtagctttaaacctgggaaagattggtgggggagtatctgccctggagcatggtgacttaagtctctgagaacggaacaacaataaaaaagacttcatcctagtcagtgggagatggaaggtgcctcacttcttaccctagacctgacctctctaaggggagggtcacactccctctttgtttttattgttaaaaaagaaaaaaaggaaaactctattcacttccccaaattgagacccatctccgtcatgtcctaatccccatttacaaccacctctagtttgcgcagcactggaaggagcaactctcaggccacaagctggtggccgtgaggacacagaggtccacgctgggaggcctaggaggagaaacgtcgccgcctggctccactgggccgcttctgcgcgccgccacagtagtgccctcggacaggactaaacctccgtgcaatggctctttgaaacccgaacagaaattgacaagtgggctttcccctttgcccctgagccggggagtgggcagcccacttacttagccttacggcggcgacttcagacaactttgcggggtcccttggttaattagcctgagagaaatcgcgaaaaataggtgtgagttaaaggcggacttccttcaggaaacccgaggtctcccgcaaccccatctccctctccggctctcgggggtatcgcctgggtcgggtactgccccttcccctggagtggcctgagttgcaagccgggagcttgcacccggtccacaggatctgggggactgcttttgttccgcgcgtaccgtcgcctaccttctcgaagggcgctcggccgcctgcttgccgtgagtggtgggctggctgcgcctcccgtggctcgggcaggctggccgtgccatgccgagaatcccgcaaatcatcgcggccgcctgccgctatcagacccggccatcgtccaggccactgcggcccagggaatccactctgggcctgccaggcggaagggcaggcctaccggcagccagcaggtcgtaaggaaaaatgcgacccaattattggggaagaagatagggaagtcccaaagaccccatctggattgaaaatcaaaaaaatagtttgggagagaaggcaccacatttccaaaactaattttttaaaagcacaaaaactaccgacacccacgctgggagcagctagaagcaccgcttcagactgcaactcttggtggcgaattttaaagagcggctgaatttggtcttcgctgtgtaggacctagggactgccatggtagttttcagacccagagtggctggaaaaaaaaatctttttaagaagcacgatgcacccctcctttagtcgtttttgcctttacaaaatttggattttacaaaaccaaaagttttttgggggggttaacaagttccattcgggagagaaactcaagatttaaaaaagaggtaaatcaggcggtgagtacgtgggggcgcggaggagtggtggaattttcaatcctgcttgagaggggatgcagcccctcacattttctaaaacaaaaccaattccgaaagggggaaaaaagtagccccaaagtaaaatcgtccacaatgaatttgagctacaggcagaggaaatcgcacccaataataggacccaatctgagaaaaaagggtgggggtggagagctcgggcggagggagttgttaactgcggcggcacaaaggaattaatgagattaaccaaggcaattaggccgcccgcccagctcggccggcccgcggcccggctgccgaatggaaaagattaggttaatttcattaattcgcaatccacaatctcttttcaggccttgtaaccccctccccttggcacctctccccctccccccaaccctcttcccccacccaaaggaaaagaaagggccaaatctggttctgtttgtcatctgcatattaccaggaactaaatccaggatgacgtcgactcagtataaaaccaacaagaggttcagctggtctgagctccgtcctacccgcgggttgagttcagcgaacgctgcggctaggggagggcgggaggagggagagcggacgcagggggcggggaggggcgcagggctgcgcgctcgccggcgctctctttcggtttggtcggcggctggaggagagtggacccccccactttaaggctctgtcctcggcgcgttcccgccgccccccggtcccgacgcggggctcggggatgcccgccagcatgttcagcatcgacaacatcctagccgcccggccgcgctg

SEQ ID NO: 12975 - DNA, 2300 bp, Homo sapien
aagactcggaatatggttgtttgaagattccaccaagatgtatgtttgatcatccagatgcagataaaacactgaatcaccttatatcggggtttgaaaattttgaaaagaaaatcaactacagattcaagaataaggcttaccttctccaggcttttacacatgcctcctaccactacaatactatcactggtaaggagcccacgaccagacttcatttctgggaaaatgagactttgtgttgatctcatcgtgttggccttgtaaaagtgatctatgcatgtacagtgttcatgcttaatattcaagggatggggcggggaacaaaaggaatagaaagaattcttttccttgttatttggggagcacgtattgctttataactttggttgttgggagtatggctatcatataccctcatcagtgtcattttatatctgcctaattagagaaattttaaccttagtattttgatgtgttttccccattttatcctccgcaaatatctttctcttgcccattcagtgctgcttttggtttttgatttagttgtatattctggatgtatttccacagccttttattgttcttcctggacaaaaagacccctcctttagggtctttttaaagatggatagattaaaagattaaaagcaatgatttcacaagaaggttgcgtggcccttgctgtgactctgctgtcatcttctacttctcactgtgctctgtatttgcccctcttttaatagactgtcaacccattagattagaagggagaacaagcccctcacacccaaatcagcttcaggctgtgaaacacagctgaagtttacatttcaatttctgtatcagaaaaataagtgcctgaattcagaacaccaaagcaaagtataaagtttgtagtttatataataaaagcagcgtaggttaaggtgatcagcaaaatgtaaaaaccaaaaagtgaaaaactatctgactctggactggaaagactgatgaaactaaagcctaattttcgttatggaggaaaaatgatacgtggctttcgactacattctgctggaagttccgagacctgggttctcgcctagcagtccctgcttcttaattccttgcttattctgggacaagtcaccatcggtccctgcctcagtttcctcagctggatatattattttaatcactgtgagaaaatagaggtgttgatttaacattgatcattttcacattttgacaaccagtttacctgcctttgctccctttcacaactcttctttctcaatctcttggtttgtggtaaattcatttctataatagctcaagttaagaagagggtcttcttttcctgtcatcctgtgtaacaaaaatagcccaggaatagtgaggaatggtatcacttatgcacagattccagagtgtgaatgagactttagcgatggcagcacagtgtagccacatggagaggtgtgtgcggccctggtttcacttaagtgatgatgtgtgagggagactcgagaggaaggccccagcacctgcccagacagcacagtgccagagaaaagcattcagtgatcatgatagcacctgtgaggttttgtttttccttcttaacaagcgttagtcttttgaccacttgaagattttatgaccccagtttatataagaaatgtacttaatttgtcattaaaatttagtttccagaggctttttagtatgatatgtcagatatcctttttgaagaatatatgtatgaaaatgattgtaaatacaaatcttcttcggatttggggatcagttgctatgtggggatagtgtaaatgcttctgcacaagcttacggttccacttcggatcccctcagattgttaccagcgcttagaattcctgggagatgcgattttggactacctcataaccaagcacctttatgaagacccgcggcagcactccccgggggtcctgacagacctgcggtctgccctggtcaacaacaccatctttgcatcgctggctgtaaagtacgactaccacaagtacttcaaagctgtctctcctgagctcttccatgtcattgatgactttgtgcagtttcagcttgagaagaatgaaatgcaaggaatggattctgaggttagtgctgttcaaaacgatgttgaaaaaagtggtctaactaggagtctctgtagtttcagagttctgacggcatagtggtctaaagggacagcaggaggtcaggggtgtgggacccagtgtgctgtgttctgtgggagcacgagtgaactgcagtttgcaggtaggcct

SEQ ID NO: 12976 - DNA, 2300 bp, Homo sapien
cttttattttccccattttataggtgagaataggctggagaagttagcttgcccaaggtcacttggcaagtaagtggcagagcttgggtcgaatccagacagcctggctttggagaccttccccttccccatcacactaactgctccggatagaaccatcacaccaggcagcacaccaagcatttcccaagtgctcactcattcactcttctctaagcctctgggaaagagacaacacatccctgttttgcagatgaggggactcacacttagagagtcgaatgggctcctgtcaggtcacctaactgttcatctgggagagtcaggagtgtgtccaaggcctcccaggatgatcttgaggtggactggaggcgcagtcataacaaccacgtaaactggcaacttgggggcagtggcagtagcagggaggtagggagaaatgtgggaagtccatgttagagttgagattttagacctcatggaatatgaagtggaaatgttcagataattgaggctgtaggattcagatacggttttgtagagtagtcgccatacggaagctctgagaatggatgagatttccaagaggtggttgcaggaagaaagtatcagaggcttggacaagtgtggcataggcaataggataggatactctgttagacaagacagaggtgactttctattacaaaactcgtccatttgtctgctcagaaaccttctactccttatttctgcagaaagaatgatcactccctcagcctgctgttcaggccctttcagccctgatgcgttttggatcctaagcaggtggaagccccttgcagctcattggacagactccacgctcagacccccagccttggggcccttgctctgtccttccttctgcagagggcttgcctccatctctacctgtccagaattttgccccatatttgagaccttacgtagctctttcttcatcctgcccaccatttctgtcaacttggaatgtgatttccctcccatgagtccacgttgtactttatcctcttcttggcgcttgtgatgctttgttctcttagcttggaaagggaagctagcatttatttcagcctgctacgtttcaggcagagagggagagtacttttggctatagtggtcacacgtaccctccttttccctgctagcctgtgtgtcacgaggactgcccctctgtcctgctgccatcgttccctcagggttgcccaatcgagtgcctctcatatggggggtgtctattaaacaatagttgagttacatgggaagagggctaatgaagtacttaataataaggaaccgagctttatgaaaatgaaaatgggattgacaattctagaccctagtttccaagtactaacttgacagaaatgcaatgatgtgagaaattaagaaggagatagaggcattaggaaaaacagaccggagtagagggtaagatagtaaagctgttccattaatgtgaataaacagaaaccttttggttcattttttttaagttgaataaaagtgtcttgaaatggctgtaaaacaaaggaataatatttgagagagcattacagttgaaatcccgtttgtggcttcgattctaggaatataacattgtttcagttttgttcggtgccagttttcactttgcagctagagctgatggcatcctccccccatttcattgaaaatattgtgacatcttgactttttctatgggttcttttctactttggtaattccagttagcagtttgcattttatatcatcaggttgtattttcaaggctttgatattgtctgaagtgtttcttctcagtcattcataaggagtatgcatagttatatacattattttttctgctctgcatcttatattcagaaatatttacaccaaaaaagcatagaatatgtgggaatttaatattctttttataacatgaatgggtagaaaaactgtagagcccttataattaattgatgacatataattaattgattaattttaagaacatttaactgaggatatgttaatatgccttgaatgaattccagcagtgatcatttatggataagtatcctaatattttctgctaaaggtcagcaactgtaatctgtatcgccttggaaaaaagaagggactacccagccgcatggtggtgtcaatatttgatccccctgtgaattggcttcctcctggttatgtagtaaatcaagacaaaagcaacacagataaatgggaaaaagatgaaatggtaagtttgtgtgtgtgtgtgtgtgtgtgtgtgtgtgtgt

SEQ ID NO: 12977 - DNA, 2300 bp, Homo sapien
tgttttaattagtattatgtgttgaatgttatttgaatgttctttttggtaagtattgagagttttgtttttatacttggcccattaatatatcacaaaatcattctcataaatcctttgataaatcccatttggccttagaggattatttttacaaatattttttaaaattaagttttactagcatttatgattttctttatccattagtgaaattggtctttttttttttcttttgtgtgtgcgctttgtatttatctgtccatttttccccttacttgaagatactggttccagaactctgtgctatacatccaattccagcatcactgtggagaaaagctgtttgtctccccagcatactttatcgccttcactgccttttgactgcagaggagctaagagcccagactgccagcgatgctggcgtgggagtcagatcacttcctgcggattttaggtatgcctgtgcagtcagccagaaagaacacagatcatgagatcctgtttgcaaaagaacagaattaagttaaaattgtatataaaataattcttaaaagagtaaaaagaaaataatggatatcttatgtcttgtcaagtctcagagggagatgagaatctgaggtcagaaataaccattactgcttaagccataacagttggagtgagaatgaaattgttctttgttactgcatcagcattttcagtctgttttttcttttaaaaatccaaatatatgttaaaaagcaatagccttagcatgttctttgtcttcattattttcttcccattagtaaaatctctgcattctaaagaaactgttggcttaaacactcacattagttctggttatccaattggcaatatcaagactgttctagggattgaaggaattttaaaatataataggaataaccacaatatttattggttagttgctatagtgccaaacactagcttaaatgctgtaccctgtgttagttagctcatttaatcattaagacagtgctatgagataggaattgttagcccttttctcaggtgcagaagctgaggcacagagagtttatgtaagttgcccagagttactcagcgggttaaccagagtgcctgggattccaacccgtgaagctaggccccaggtcctgcaggatgcctgcaagcttcgtgaccttcttaactaccacacctagagtctagggccagggattaaagcagtagataaaaccatgtcccactttataatttacactgtaaattaaaaatttggaaacttgcttctattctaaagtttaggagtacatttttgggatctttgtttttgtttttaaattcaaattgctgttgctctcagcctagctgttttgaagaatctgatgtaaagttataaaaatgtctttgcagataccctaacttagacttcgggtggaaaaaatctattgacagcaaatctttcatctcaatttctaactcctcttcagctgaaaatgataattactgtaagcacagcacaattgtccctgaaaatgctgcacatcaaggtgctaatagaacctcctctctagaaaatcatgaccaaatgtctgtgaactgcagaacgttgctcagcgagtcccctggtaagctccacgttgaagtttcagcagatcttacagcaattaatggtctttcttacaatcaaaatctcgccaatggcagttatgatttagctaacagagacttttgccaaggaaatcagctaaattactacaagcaggaaatacccgtgcaaccaactacctcatattccattcagaatttatacagttacgagaaccagccccagcccagcgatgaatgtactctcctgagtaataaataccttgatggaaatgctaacaaatctacctcagatggaagtcctgtgatggccgtaatgcctggtacgacagacactattcaagtgctcaagggcaggatggattctgagcagagcccttctattgggtactcctcaaggactcttggccccaatcctggacttattcttcaggctttgactctgtcaaacgctagtgatggatttaacctggagcggcttgaaatgcttggcgactcctttttaaagcatgccatcaccacatatctattttgcacttaccctgatgcgcatgagggccgcctttcatatatgagaagcaaaaaggtaagagatgatttttttattttgagcagttaattattcagtgtgcctgaaagtggtttgcagtgttggataatctcagaggatgagaacgtatcatgctcagaaattgctacac

SEQ ID NO: 12978 - DNA, 2300 bp, Homo sapien
gaaagcatcatttctgttctgaagttaactgtaatggaataaaatacctgttaattttgaggggtgctttacatttccttttgctaagattccacactttcctgtgtacacacgctctggagaggttaccatatccattgagttgaagaagtctggtttcatgttgtctctacaaatgcttgagttgattacaagacttcaccagtatatattctcacatattcttcggcttgaaaaacctgcactagaatttaaacctacagacgctgattcagcatactgtgttctacctcttaatgttggtaagaaaaaaatctcttactttgataactctagacacatatacaaacatacagctttggtatgaaacttatctgtatcatgttttaacaagctaaagagtcgtttttctcttctaagttaatgactccagcactttggatattgactttaaattcatggaagatattgagaagtctgaagctcgcataggcattcccagtacaaagtatacaaaagaaacaccctttgtttttaaattagaagattaccaagatgccgttatcattccaaggtaggtatttaaatggaaaggaaaatggtggtgatactttgttttaaaagatgcactaggtcgggcacggtggctcacgcctgcagtcccagcactttgggaggccaaggcgggcagatcatgaggtcaggagattgagaccatcctggccagcatggtgaaacctcgtctctactaaaaatacaaaaaattagccaggcgtggtggtgcacgcctgtagtcccagttactcgggaggctgaggcagggcaatcacttcaagctaggaggcggagattgcagtgagctgagatcgctccactgcactccagcctggagacacaccaagactctgtctcaaaaaaaaaaaaaaaattcacttattcacatgggaatataagtgggctgtgattttagcattgtaattactaataggaaatatattagtcagtcaggcatggtgatgcgtgctgtaatcacagctactcagggctgaggtgggaagattgcttcagcccaggatttctaggctgtgcagtaagctgtgatcacaccactacactccagcctgggcaacagatcggggaaaagaaagaaactcttaaggtcgacccgttctctccagtatacttgcttaaaaaataatacctaaaacgttatagataaggaattttcctttgtaaagggtcagataatctaatgttgataggctttcttcttaaaatctccatccttttagtctccagagtcttatagaatttgattataaataatgatttcatttcttaaaatttttataaggaatattaagctctgtgaaaatagtaaatccagaatgatttttttccttattttataaaaatttagggaatggagttttggggcaatacaatacaggcagttttcaaataattataatactagttgtaattcaatctttgattttttttttctttttgcacctcaaaaccatattttaaatgttagttatcaggaccatcactatcatagatgatgcagtaatacgttttatatgacaagtgtctttaatgtttagcattagtaatatacaaagtatttactctttggatagtgtaaattttttatactatttatatagatgaaatagatatgtaaaggtgccatttagcttcatgtgttatcaaaatgtagatatttagaacaagaataataataaaatgggacaataatgtgtccatttttacttgataaaaatacagttcttacatacttgaaatatatttggaatacagatgtttattgttacttatttttaatcttttgaattcttaatcatcatttccatactacaaacagttgtattttgagaatagttgatttaaatcaaaaagcaactgattgtttttttgtttttcttttttagatatcgcaattttgatcagcctcatcgattttatgtagctgatgtgtacactgatcttaccccactcagtaaatttccttcccctgagtatgaaacttttgcagaatattataaaacaaagtacaaccttgacctaaccaatctcaaccagccactgctggatgtggaccacacatcttcaaggtaaggggcttcagagatgacacttggattgcacttgagggattcttaccagacatcactagacatgcagaggttcactgtccccctgcccacccgtggactatctgaaatcaggagatgctttgcacacaaacttgcccaaggggtagcccaagaggc

SEQ ID NO: 12979 - DNA, 2300 bp, Homo sapien
aacactcgacacatgttactatttaaattcaaaattcaatttaaaataaaataaaaaatggagtttcgtagttgtacttctcacatttcaagtgctcaccagccactgccctgttgggcatcgaagatatagaacatctttgcagaagttctgttagacaacactattctgtcttattcgaagtttgaagcagtaaagtttaaatgccacatataaatacaaattcagtagaggggaagaggcacatgacaaatcaaactcgaggttataaatatcaatattttctcagttgtagattcagcctcagaatttctttttcttcacagatactgtgctagattaccaagtgatccgtttactcatctagctcctaaatgcagaacccgagagttgcctgatggtacattttattcaactctttatctgccaattaactcacctcttcgagcctccattgttgtaagtttagaagaagaaatgattgttatcttttaaaatgtgtcattagtggattttttcagcttttctaagacttgcaagttataggtaaatttgattttaaaatctactttcatgagcaggagccttgtgttgacagaccaaaaataaaaataaaaaccaaatttactttcaaaagtagatttatagattgcttttgtagtcatctacatgttcatatttgtaatagactgtctaatttacagatacttagaactggactaggtgatctctgaagtttcttctaaggtgttactaacatgcacatttttgacagaatcattcaactgtggcttagacacttagagtaatataaaacttattatagatcgttgcgttgtcctagttattttgttggtgactcaaaaatctgctttttgtaaatactgttcttggtctcagtactgatttccaagtgttccaaggtgactaatttctattgcacataaaaagctgctcaatactgttaatgttatagctatgttttgataaatctttctttttgttacatatttattgattagtaaaaataagatactttaaaatcttactgaaatttaaattcatcaaaattgtaaaatcttaattatgacttagtttttactaggcaggacttttaaagatgaatatttcaaatatggagattagaatttttaaaaacttgctggaatttttcaaaataaagaattttgttttggtaaattgaactttaaaaatgttggggcagtggtttcataggtgtttcatgtgctagaggtaatacagcgatgtgcatatataatggaaaggtttttgttattttcagggtccaccaatgagctgtgtacgattggctgaaagagttgtagctctcatttgctgtgagaaactgcacaaaattggtaaggatgtttgaaaagcatatacgaatgaaaataaattgcaaccattgtaaaaaaaaagcatatagaggactttatagatctgtaaggattttgtagagctattcacttgctgatcttaatgtgctttggtgaatataaacataagtgttagtaacttgaagatcctacattgttgtgggagctctttgttttccatagcttgactgcaaacaactgtcatttatttgctctctttaatgactccttttaagtacataaaggtcttttcgtaattgttgaatcatgcaccatgaacacttgtgttttaatatgtcagtctctcaaattagtctatactagtatagaaattaatccttttttaaaaaatgaactcagtttcttttttttttttttctcaatcctgctcctgtataagtggacccattttctatggccattttatttagcattgatatgtggtgatgtcatgtttagatgtttttgtttctgaaccttagaacagaatttgcagtccagctcatattggaatatatggatgccaaaatagactttgcctgaagtgtgaatctgattacttttaaattgtaaaaggcaaaggtgctttagtttccattacttttccaggtccttctaacatagttctgttctaaattctttactaattaatcaggcaaaatctggattgtgttaattctctctttaaatttgttaggcgaactggatgaccatttgatgccagttgggaaagagactgttaaatatgaagaggagcttgatttgcatgatgaagaagagaccagtgttccaggaagaccaggttccacgaaacgaaggcagtgctacccaaaagcagttagtattggttagaacagagtaaaaacctagcatttctgactttgttttccgctacatcaaatc

SEQ ID NO: 12980 - DNA, 2300 bp, Homo sapien
tacatgtgccatgctggtgcgctgcacccactaatgtgtcatctagcattaggtatatctcccaatgctatccctcccccctcccccgaccccaccacagtccccagagtgtgatattccccttcctgtgtccatgtgatctcattgttcaattcccacctatgagtgagaatatgcggtgtttggttttttgttcttgcgatagtttactgagaagctgggtgaataatctgaacgtaaggttacaggtcggcagaagtcaggcagtcatgagtgggggcagtacttttcagagtacatttgggactagatatcacagagtgtagtgctttgcttaatttcctttttaaatatcaactttttaatgaattccattccagtagtttgtattattttcttacacatggttttttgtgagagctgatagaaaccttaatcttttcaggtatttttggttagagatgttatttctgtatttctttattgtttgatatttatttttactatataatgtatctattttctctttatttagagcctaaatgttgataaatgtaacctttcatttctctgttttttttttccactttttttctcagattgattcttagaaaccagctacctatcatttttttctaaaccctgtgaaagttttagggtggggtagggcatttatgagaaatgttgtgtttgctaagaaaaaaaaaaaatctctgtcctttgaaatgccaggaacagaacctggacactgagtgaatttgcaactcctccttttccaagctctttacctgctggtttgtaggaataggatccacatacttgagtgaggttggtgtcttgaggtgaaaccgggcctgagaaacattggaggtctagggcttattttccagatagaattgagtctttgttggtcttgggccagcttccctgccctgcctgttttctcctttgtgattttatgagaacaaaggaggaaataggcaggccagggaaacgatctctctccctctcttgtgccgaggaagaactgtccagatttttcctcaatttgtttccgaaacaagcggctttgcagtttcaaaaagaatttactgatagcagaaagtgaaaaaaagtattcctaaggacaaataaggagaacattttcaaagtcttagaagcttcttggtagagctcatccctggttttttggagtctaagacccttgacttttcccttacaaacaaagcttttcaccttgcttggggtctggctgcagtacttgttcattatctcaatatttgtggcctgatggctttctgctttgatccctgacttttttcctttccccttcccctttcccttccccttctccattcccttcccctttttctttccctttcccctttcccttttccttccccttcccctttcccttccccttccctatccccattcctgtcccctttttctttccctttcctcttccccttttccttcctcttattcccttcccctttttctttccctttcccctttaccttttccttccccttcccccttcccttttccttcctctttcccttccccttcccctttccctttcctcttcccctttcccttttcctttttcttttgcctttcccttccccttcccctttccattttcctttttatttcccctttctcttcctcttcccctttcctttccccttccctttttcctttccccttccccttttccttctccttccccttttccttccccttcctcttcctttcccttttctttccttttcccctttcccttgctttccctttttcctcctttccttctttcccttctttcctttttttcctttcctttctgttcatatctgttctttgctttcctcttttctacttataccttttacaggaagtgataatagtgatttagagagtgtcatttggtttgcttttatcccagaatattcaactcaagctagcttggatagttaaggaatttgttggctcagttaattggaaagtccattgttaggctgggctttgagtttggttgatccagcagtttattgatgtcatcaatgacccaggttctttatttttgccatctgcggtgctggtttcatcctaaggctggatcttttcatgggtctgtgtagtgtaattgcagcagcaaatgggactaataatttcatgagtcatctttagagggaaagaaagacaactgcttctcttcaaccatcaaatgaaagtcctaaattttttgctgttggatgagcatgaaccaattcctctggccaggggtaagttgtatg

SEQ ID NO: 12981 - DNA, 2300 bp, Homo sapien
gttagggaaatacaattaaaaccaaaatctcccaacccagaaaattgctccacaaaggtagaaaagaaagaaaacaatgttattattgaatgaacattaaatcagactgctgtgcccatcacaggcagtcactaaagggatggcaaagacagaaagaaatcttactgttttatgtaactaaatggttacaatccattacatccatattttcaagataaaattgctaattttttttcacatttttatgactagaggtaggttttacattttggagtcaggtgacagattaggcccatctcctcctaggaaaccaggcgattgagtgttatttcccatttcagagatggctttcaggtccttaggaaacatagccaagttataagactagagacttaaatttatatacattgaaagggagggagaaataaaatctggaaaagaaaaggggaaagggacctcttcccttttattttcagcagggagaactatgcctcttatttttaatttgtatttgtccttacgtcaacagtcagtattttgtatctataccatggctgtcctaagtgatgtaggcgtgattgcagttaaaataatgccttgtatctcacatagcacttttgttactaggaacttaaagtgcttcatacatttttttagttttctctgttagcttaccatgagtattgcttatactgttttaatgtcactatattgtggtttttttccatttgtttatcctggaactttatagaagtcatgcattttgggctttgtgagagtaggaatgaaatctggatggtaatatttgcaaagttaataatgtcagaatctgtgatgcataataacatggatgagttgaaattattttgtcaccaattttgaaaattcacagcagaaagttctaggtgcctttaggcttcagatctgaatggttagctctttcttgctactagcctgtgaaaggatacagcctcgttactgcatttagttgctaatgtggattaagtttgctagtttgtactaaaacttgactgtctgatatgtggcgtgcctgtttcagagttatcttaaaggggcctatgaaacaggattttgcaggtttgtactttacttcacagtgatcaattaaaatgagaaaatgacctattagctttgaattaccagtataaaataagttgctattatacttgacatattacctttctaatgtatgtatggaattatcaatggaaataatgtggataacttagcaataattttgtaatagttgggtgacattgaattttaaaggattatcaacttagtaatttgattatggcatttctaggaatgaggtgagtctgaattggaaatcatctctagagggtgacacagcaggacatgttggtgtgcgtggtctttgcatcctactaggtggcggtatagaatgaaattaaaaattaaatgaagtctgaggtagccttagaaaacacaaatttggctggttgcagtggctcacacctgtaatctgcagtattcaatacagcatgttactgtactgagtactgtaggcagttgtaatgcagtggtatttgggtaatcttttgggactacagcactttgggaggccacggtgggaggatcacttgagcccaggagttcgagaccagcctgggaaacatggggtggccccagctctacaaaatagaaaaaaaaaataaaaaacaaaaagaaaaatgaaaacataagcactgacatattgggagataggaagatatgctcatatacagcatggtactgatttatcatagtgtttaagtatttttaaagccaagttttactgagggaaaaggtaatttaatgccaagagttatcccttctatctaattggattgtactaacaagttgtttttcctggctgtattagaacataatatcccaattttaaagggcagttcttttagacatgcattgtcttgttgcccaacagataaagaattttatgagggatcttaaaaagtagaacatctcttaaagttcgttttaaaaaatgagttgtctcttctaaaatttctctctgattgcttttaggttacctagggtatgaattaatacagacttggaaactctgaaagaacttagaatcagcattttgaggtaaatatgtatatgccaaagtagtgataaggttgccccagtctgctttgttgacttcttagcaaaacaaatttgtgtatgaaatgagaactttaacctccatgagaatgtcttttaaaggactggaagtagtaaaaagaggccactgccaatttgtttttcct

SEQ ID NO: 12982 - DNA, 2300 bp, Homo sapien
acccaactcacacattgagccacgggcaaaatacagcagagcagtcagggcttacccttcaaacatgagatggaagcataaaaagtaaagcaggcccttactaaaaaggattgtaggaaaatgtcttttctccccaaattaaaatggactaactgttctcttcttaaaacagcattttggtgccgtgagtaaatctataaacctatgttaccatgatcaatgtttatagtgaccatgttaaaagcaatctttagttttttgtttttttatctattgagttttatggaatatgccctaaaatgaagttttgaaataattgtgtatgtatgtgcatgtacacagcacatattacatataatacacacgtgccacaggtagctttaaagtagactttgcaaaataaactggctattccagaacctaatttccaaagatatcaataatattgaaaattactattctctaggacctggcttatcccgaacccatcttttaataaactgagttttttggtgaggatgtatatttttatttagaaaacttaacgtttacaccaatacatattcaatatagctaacctgttttaacagcacatttttaacaatattttccgagttgcttaaatcctaacctgagtccttttccactgtttgaaaacaagcaccacgaagacacctgacaatcaggattgtaaagattcagaatattcgaagacagaagcataggcgtccaagtgatcctctttcatcagatgaatgtttttaaaacctgaaagtcctaagaacacttacttatcgtgtagaccagtaacgtgtccctttaaccacaactctctccacaaaagcacggagttaacactacacaaataggaccctccaactcatctccacgtttccgcggatcttcaggttcctaaggacacactcagtggtttgctggctctgacctccaggcagagccatcagggcaactcagcttttctggacaatctacagaaatctgatgtgctaacttaaaacatacactgatttccccaaaatcaaaaaccctgaagaaagggtcctccgcagggtctaggcattttggcacaaaaacatctgaggggagaggcaaaagaatggcctcggcccctgcccgccccccagggccccaatctggtcccctgacagtaatcacacaggaccctcccgggagggaccgagagcccagcttcgtcccctccgggcgcggcacagcggccccatcagaggagggccccagggtgctccggcaggtcaggcgcgcgtctccacctccgctgctcccgcgccaccttagcgcgcgtgacgggacctgtcaagagccccaggcctcgccaggccggggagtggacaggcgccggcatcccccaccacgccacggcggcccggaaagtctcccagggctgcctcgcggggaggcgccggggtccgggcccaggagcagagccgaggcgggcagacgccgggtccacaggccgcgctgtgcgggacgacgaggcaggcgaggccgcgcccttcgtcagcgcccgccaggcccggacgcgcggctcggggccatggccggcacgcgggcctccgcgcggaggcgggagcgcggccaggcgacccgctccccgccccggacacaaagctgctccgcgggagcccgcctcacctgcagcacggggcgccgcgggccttcgagaaccatcggaccccgctccggcgcgcgcgtcacagcccaggcctcccggagccgcccggcgccgccgcccccgccgccatttcctcgcgctcgccgtcgcctcgtccccgctgtcaggttactccattcacctgggcctgcagcagcctgcgccgcgcctccgcctcgacccctcccgccggcgcctgcggagactgcgcagcgcccggctggccggcagccagcgcacggcccgcggcaacggcgcacagccgcttggagaatcccactggctcccgcaccgcccctccgcgcccccacgctccgctcgccccgtggcggcatgagagcgagcctgtgattggacagggcctggcggtgaaaggttaatcccggccccccagccactcaggagcagggagacagcgggcgcgcgcgcggaggccggagaggcgtttgcggcccagcgcctggactggaccttggcgttgggccgcagttgcccggagtttttggggcccccgggaacccgcgcgccgaggccggctaagtttggcagactctctgagctctcggaattcgactgcctccattgttgctccttctggcacccacag

SEQ ID NO: 12983 - DNA, 2300 bp, Homo sapien
agagggcaaccagaggggctgaagttgtaccagcccacaaatttccactgccaatagagtccagtgcctacccccatactgagatgctgtccttctcataaaggcttatcagggagtccaccgaagagatatctacatttggggataagttaagacgatgttctttaagccagacacttatttaacgcccaccgatattttaattcctagctacaaagaaaaccttatatgtatgactggggtcttaaaggtatgacatgctcaccgtgcttgacatataagaaactacttttttaaatacatgggtctgccaggagcatcctacttcctaattttgcccataaatatgctactttcaagtgaaaccttaagccaattcatagtaaatatattatcaaaattttagcacagtaatgactgagcacaccagcctcaaagccagactacgtgggttcaaatctcagttgttcacttactggctacttacttgttggaagttattccatttcttcgtctgttaaaacaggaagcaggctgggtacggtggctcacgcccgtaatcccagcactttgggaggccaaggcggacggatgacaaggtcagaaatcgagaccatcatggccaacatggtgaaaccccgtctcttctaaaaatacaaaaattagctgggtgtggtggcgtgcccctgtaatcccagctactcgggaggctgaggcaggagaatcacttgaacctgggaggcggagattgcagtaagcccaggtcgcaccactgcactccagcctggagacagagtgagactccgtctcaaaagaaaaaaaaaaaaaaaacaggaagcagtttcagcacctacctcacaatgtgcacacagttaaagcacctacctcacagggtgcacacagttaaagcacctacctcacagggtgcacctaaggatcacaggcatgcaagccctagatcagcctgcccaatggcaatataatgcaggccacaggtgacatttaaaattctgtagaacccacactaaaaaataaacaaataaaacttttatcccaatatatggaaaaagtttatcacttcaacatgtaacaattttttgaacattatttggtaaagaatgcatatatctcgattccgactagccatactttaagtgctcaggagccatgtggggctggtggccccaaactgaacagcacagcccaggcagcaggggcgcatagtaggttctgctcacgcccatggtctgaaagaaacacggttgcagttgctgtgagcacacctcacctggagcaaaccggcctatcagggggtccactgaagagatgtctacatttggggataaattaagaagatgttctttaagccagccacttatttaattcccaccgatattttaattcctagcttcaagctgtggtgcgcggttccgacctatgcaaatgaacagcttacaaacagagggccaccatctatttctcattatctggggatcccggttggggtggggggcggaagtgggtgtttgttatttccccaaatgcggaggcccctgcaccactaacgcgaggaaacgcaggcgagtgggaaggtactttaaaaaggggagggaggtgctcagagggaagctaagctctccgggaaacaattacggccacgttacggtctgtgggtgccagaaggagcaacaatggaggcagtcgaattccgagagctcagagagtctgccaaacttagccggcctcggcgcgcgggttcccgggggccccaaaaactccgggcaactgcggcccaacgccaaggtccagtccaggcgctgggccgcaaacgcctctccggcctccgcgcgcgcgcccgctgtctccctgctcctgagtggctggggggccgggattaacctttcaccgccaggccctgtccaatcacaggctcgctctcatgccgccacggggcgagcggagcgtgggggcgcggaggggcggtgcgggagccagtgggattctccaagcggctgtgcgccgttgccgcgggccgtgcgctggctgccggccagccgggcgctgcgcagtctccgcaggcgccggcgggaggggtcgaggcggaggcgcggcgcaggctgctgcaggcccaggtgaatggagtaacctgacagcggggacgaggcgacggcgagcgcgaggaaatggcggcgggggcggcggcgccgggcggctccgggaggcctgggctgtgacgcgcgcgccggagcggggtccgatggttctcgaaggcccgcggcgccccgtgctgcaggtgaggc

SEQ ID NO: 12984 - DNA, 2300 bp, Homo sapien
ttttctaaacaaggaacacaaagggcatatcttggctcatatatacataaacattttgaagaatgagcaggaaacagtggtcacctatttgtgacactaggacaggtgtgagggacatctttttccactgtgtatcttttataggctttctgataaatgaataatatggatatactatttattttaaaaataaaaactgaaattgataaaaatcagacaaaccggccaggcgcagtggctcatgcctgtaatcccaccactttgggaagccgaggcaggtcaggagttcgagaccagcctggccaacatggtgaaaccccgtctctactgaaaatacaaaaattagccgggcgtggtggcacatgcctgtaacccagctacttgggaggctgaggcagaagaatcgcttgaacctaggaggcagaggttgcagtgagacgagattgcgccattgcactccagcctgggcgacaagagtgaaactctgcctcaaaaaagaaaaaaacaaatacataaaattaaaaaaataaaaaaatcaggtatacctgctgatggaacaagcagcctggctagtcttgacagattgcaagagggcaaccagaggggctgaagttgtaccagcccacaaatttccactgccaatagagtccagtgcctacccccatactgagatgctgtccttctcataaaggcttatcagggagtccaccgaagagatatctacatttggggataagttaagacgatgttctttaagccagacacttatttaacgcccaccgatattttaattcctagctacaaagaaaaccttatatgtatgactggggtcttaaaggtatgacatgctcaccgtgcttgacatataagaaactacttttttaaatacatgggtctgccaggagcatcctacttcctaattttgcccataaatatgctactttcaagtgaaaccttaagccaattcatagtaaatatattatcaaaattttagcacagtaatgactgagcacaccagcctcaaagccagactacgtgggttcaaatctcagttgttcacttactggctacttacttgttggaagttattccatttcttcgtctgttaaaacaggaagcaggctgggtacggtggctcacgcccgtaatcccagcactttgggaggccaaggcggacggatgacaaggtcagaaatcgagaccatcatggccaacatggtgaaaccccgtctcttctaaaaatacaaaaattagctgggtgtggtggcgtgcccctgtaatcccagctactcgggaggctgaggcaggagaatcacttgaacctgggaggcggagattgcagtaagcccaggtcgcaccactgcactccagcctggagacagagtgagactccgtctcaaaagaaaaaaaaaaaaaaaacaggaagcagtttcagcacctacctcacaatgtgcacacagttaaagcacctacctcacagggtgcacacagttaaagcacctacctcacagggtgcacctaaggatcacaggcatgcaagccctagatcagcctgcccaatggcaatataatgcaggccacaggtgacatttaaaattctgtagaacccacactaaaaaataaacaaataaaacttttatcccaatatatggaaaaagtttatcacttcaacatgtaacaattttttgaacattatttggtaaagaatgcatatatctcgattccgactagccatactttaagtgctcaggagccatgtggggctggtggccccaaactgaacagcacagcccaggcagcaggggcgcatagtaggttctgctcacgcccatggtctgaaagaaacacggttgcagttgctgtgagcacacctcacctggagcaaaccggcctatcagggggtccactgaagagatgtctacatttggggataaattaagaagatgttctttaagccagccacttatttaattcccaccgatattttaattcctagcttcaagctgtggtgcgcggttccgacctatgcaaatgaacagcttacaaacagagggccaccatctatttctcattatctggggatcccggttggggtggggggcggaagtgggtgtttgttatttccccaaatgcggaggcccctgcaccactaacgcgaggaaacgcaggcgagtgggaaggtactttaaaaaggggagggaggtgctcagagggaagctaagctctccgggaaacaattacggccacgttacggtctgtgggtgccagaaggagcaacaatggaggcagtcgaattccga

SEQ ID NO: 12985 - DNA, 2300 bp, Homo sapien
aatgagctaattaatgagctccctggcatcaatgaaagctcaaaggtacagataataaagattatgtgatagtttataactctgggcaccatgcagtccttgcctaaattagatgctcgaagagcctgggaagagccaacccaaatgtgaatcatttcattttatgggtctagaccttgttcagaaaaacctctgcaagatacttctctcacctattacaacttgtaatattgtttaaaacatctactggcaagatgcctgaaagtcatttggttcaggttggcagtcaactgatattttgcaaaggaaaaaaaaatctcatttgagtataggcttctatggaagaagctggatatagaaaatggatgtggaagtctgcaggacaaaccaccccattgcttgtaaattttttttaaattaaaagaaatacaataaggcttttaacaagaactagcagtcccctaagtctcgctgcttagaagtaaccactttcaactctcttatgtttgcatttctacataacgtgcttacactttattttttaatttagaaacatctactggcttgctgtcacagtagaggaggatttcactcttaccataccgtgctttggttttccagtatagctagatcacatcatttagtacatttctattaggtgttgacattacctggagcacttaaggattgttgactcccaagcccagcagtgtgttatggttacatgtcctttctcctccaaatgtccccattaatttgctattctctctctttactttttttttttttttggtgtggcacattctttaataacttcctgaggaagagaacatgggaagtaaatatggttgtaaatattttgagatttttgcatgacttaagatgtctgtattctgcccttaacagaaatgtggctgagcatagaatgacaggtggaaaataataccctcccctagcccctcccaagcgtgctggttgagatttctgatgccattctgattcccgtacctttatatgtgacttaggtttttttatccacccttcctggaaacatttaagatctctttattcttggtgttctgaactgtcatgatggtgttgtatcccgggtgttaaaccttgtgctgggccttcatgggaaatttcttaaattttcttgtgattatttacattctttctttctggaccacctattatttcaatgttggaccctcccctacacccaggctgatgctctaatattttttatcttttctatttttcgtctatgtttctgatctgctttcaggaagaattattcatttttatcttcccaatctgaatgttttattgaatttttattttccaagttaataaaacctttggttattatcctgtctttgttttacagtgtcctgctcttgatgcgtggatgcagattttgtctctctgtggacgttaatgattgtggtctgaggggaagtcttttctgctccctgtgttgccctcattttctctgagttctctttattttggtggtctcagtctctatctttcacgttgtgaatttttctcaaatatatggtgatcctatggatctgttcatgttttaagagtgaggcatccaaaagctgattggaagttgtgtgtgccaactggtgagcttttccactagggtcaccaggtgggcacctggactcatcattggagaacactgcctgtcagtatttgcacgtgttttctctggggctcattctgtttcttgagagatattcccactactctccttcctgggaaacgggcatacacagggcttttagcctatgctgagtactcatgtggtttcaaaaatggtgtcccatctgggcagaagtccccatgagcacttggcttgactggcaaaggacaccttttgccccttcctccagacatacccagctctgagcttggacaatgctcgaggaacaatgaaaaggctagattttaactcctaattgccctctttagccaagtgcctctgtgcaatgcacaactgtaggaccatatccagagaccctggtctatactcagtgtgcccgagtcctgaccgctgagcaggcagcctcatcacccgtgagtatttagactttcattaagttgcttcaacctttgctgtgcctggtgtccctgagttggagctgctctgatttctccatggagtaggagcacagtggtcatctggctgcatgggaaggacaggggacctcagagccaataaatgccctggtcttcagccccatgtctcaccccatccctcctattccaatccccaagcctctcct

SEQ ID NO: 12986 - DNA, 2300 bp, Homo sapien
acattgttgctagctttgtggcccagcacatggtttcttttggtaaatgtgccatatgcatttgaaaagaacgggtcttatacagttaaagaatactggtattctttaatatgctgttaatatgttaatatgctattctagtattctatatttatactgatttttcctgctttcctgatccattaatgcaggagagaaatgttgaaaaaaaaatctccaactgtgattgtgaatttatttctcctcttagttctgccagtttttgtttaatatatgttgatgctatgctgttaagtgcacagacacaatttattatattttcctgatgacttgattgctttatttttataaaatttcccccatcttgaagtgtgctttgtctgatatgaacatagccatagcagctttcttatgattagtgcttgtgtcataactttttccatttttttcctttcagtgtatgtacacttatatttaaagtatgtctcttgtaaacagtatacagttgggtcttgtatttattctgacaaactctgtcatttaatcagtacatttttcatacgtttatacgggtttcatctaccatcttggttattgttttccattggtctgatatgttctatgctccattgtccttccttcttaactttttggggattattcaaggatttcttttgtgtgcatttatcccctttattggttttttaaccacatcaccttgttttatctttttagtagctgttctagtgattataatactcatctttaacatacatcagcttaccttaaattaatatactacttcaagtacaatgcatattttacatatttgtatatattttatatatatcacatatataattttacttcatctccattacttttgctactatattgtcatttactttacttctgcatatgttttaatcctcaataccttgttatttttgctttaaatagctagtaggctttttaagaaaactttgaagtagtcttttctattgaccatatatttaccatttccagtactgttcattccctcctttaggctttatatctgagattgtgttctttgagcctgaagaactatttcttttgtattgcttgtagcacagattagttattctagagcctttgcttgtgaattctaactccgggtcctatatgggtctatatctagtgattatttcttctcttgattgtggatttcgttttcctgcctcttcatgtcttgtaattattttatgtcaaacttggtatataaaagaacaatagaggttgaagcagatgtcatttttttccctcaggaaatacagccctttcccaaacaagtgtgtaagatgaggagctgtcgttttgatcatatcagcgtcaataggagctatgttgcagttttatttaatttcttctctctggttttaaatgatttgaggctgaagtcaattcacactatcggtgcattgggagtcaagcactgcagtaccacagagtcattttctgcttttcagccctgcccccagctggctcttacacagcaaaattccctgtgtgggctaattagtatatgaagaaaattgcttttgtgtttggagggcttccagattcactctctcataccagcccacacaatcaataaagatttggctgatctttccttatctcaggtggattagctcttctccaagtccatacccagactaggcaacatggtcctcaagcatgaaggggctgacaatctctgctcactttagaagggattgtccttctttagagcttggtttcattgagattcgttaatccatagctttttaaaaaacatggtattttatatttttatttatctgatgttttcatatttcagcaggaacaagagtcttctctaaccatttacatcttagaacactttgcattggtttgaagtggctttttccatttttgtttgtttgtgttttgggaaaggtggatatgggttgtacttaaatattcttcttactcatgttgctctgtgcttttttttgttgttgttcttttgtttttttttgtttgtttgtttttgtttttttttgcaggaagatattttcgattcagataaagaagttcctatcgaatccacttttgttcgcatcaaagaaactccttctgaacaggagagcaaagtcttcgttctgactgaaaatggggagcgtacctacactgttaaccatgaaaccagccacccaccaccctccaaagtctttgtctgtgacaagcccgagagcatgaaggaattccgcctggatggtgtttccagccatgcgctg

SEQ ID NO: 12987 - DNA, 2300 bp, Homo sapien
tagccgggcgtggtggcgggcacctgtagtcccagctactcgggaggctgaggcaggagaatggcgtgaacctgggaggcggagcttgcagtgagccgagttcactccactgcattccagcctgggcaacagagcgagacaacatctcaaaaaaaaaaaaaaaaagaatgtcagaacaggaaaccctgcatttttctggttttgcagtacacacaaaatgcagtttgcagaatgtttggtttgcacaaagctgataagatttgaatacagatcagaggagccttcatcatgttgcctctcaacatgggcatgtctcttggattctaatgacttgtgtgcatttaagcttcagggtatcttccagagtctgtacctactttaaaaatagtaataataaaggctgtaacatactcaaagttaggtcggaccttccaaaatcgagacgggaactggagccaagttccggccctgtttcaccccacaccggcagcagagtgattttagcagttttgtatcaggcctttttaccagcagcaggcccacagcccctggaccatgggcacaaatgccagaccagtgtggtggaaaccaaaccaactcggggccgccccagctcctcagcgtacagactggttgagatcctggtgaatcatttacctttccaagccccaactgcaaatagtatcctatcacacactgccttccaggacaattaggtgaaattaaataaaatccatgaaagagcaccttgcacagtgccagcccatattaagcacttcacaaatattgattcctttatcccctgtgtgtggaaataaaagagggaagagaggttggatcttcagagttttgattgagagatcaagcgtggtagattgaaattgacaaatgtgaaccaccattaaatgttgtttacataaatatcaaccaaaaaaaagttcattgtcaggggttagggtagaaggggggtgtgatgtatgggagaggaagtgtcttggggtgataggacagttctgtttctctattgtggtggttacattaatctgtacaccaccgccatgaaaagtaacacctgtgaaaatgtgaaattcaaatgcagtctatagcttgattaataattgtcttggaccagtattggtgttctggtttggataacgcaccctggtagcataagatgctgtcactggaggaagctggggaaagagtagagactctctgtactgtgtttcaacttcttttgggtcttaaatgatttccaaataaaaaggtacttggttgtttttggtttttttttttttttttaagagcgtttattgaccacggttgagagattggtggagtctcaggatagattctacaggaaattagtgcctggcaagattctctcctcttttgtccttcacttttacttttaaaaagttgaggtagcctccattctacaaaatagagtgaaagctctctgcccctcacttttacaatggtgcttttatttctattactgataatagtagctgtcattagtgagtggctttcttgggctcccaacgttgtatattaggttgaccctatgacttggccgttcttctggggccaggctcgactttccccacaaaagccccagcaagttcactgtgtggagtttgaggctcagagaggtaggtgacttgcccaaggccatggcactagaagcatagaggggacagctgaggtacaaacttgtgtctttctggttccatttttatggcacagcacattccatgttatgttttcaatgtcactgatacaaggaatggtctatacagttggtcctttatgtgtctgggaattggggaacccagggtcctattttgcctctttgttcagtgtataccctcctattccatttggctggaaatggaaatgtgagtggttcagggcagctctcccatgctcagggatgaaggcgtcttcacctggcgaggtcggcagctctgccccactcaaaaactcacgcggctgctgcatgctgaccttgcacctttgagtctgtttactaaccagcatcctggccgccgctgctgtttttccttcaggtatggcgtggcggtgcaggactttgcgggcagttggaggagtgggctggctttcctggcggtgatcaaggccattgaccccagcctggtggacatgaaacaggccctggaaaattccacacgagaaaatctagagaaggctttcagcatcgcacaggatgccctgcacatccccaggctcctggagccagaaggtagcagtggttctctctttctttctaataattt

SEQ ID NO: 12988 - DNA, 2300 bp, Homo sapien
caaaaaataactttgttctaaagtgtcacaagaaccggggaatactcctgaccaaaactggaacttggtagagttactttcctgaaatcactcagtgttccttagaggtgattaaagagcttgcactaaagatgcctgaggaagaagaataacaggcgagaccttattgttctgttctttgcaacttcagcctctaactggaaatgcagatttgatagagggagaactggatctgtgattggaataagaagatgacattttatttttattttattttttattgttatactttaagttctggggcacatgtgcagaatgtgcaggtttgttacataggtatacacgtgccatggtggtttgccgcacccatcaacccatcagaagatgacattttaaattgtgctcaagttcatttccctgtcagaaggagagagctggtatctcattttctagagcccacccgcttttggaatagaaacttgtggttcactgttcgattaccctcccaagagtgaaagtgatccacacgggcatgatttgcttggattttggcgcaatgcctgcatttcagagaagcatgagcacaaacaaggtctggagacaatagttcctgttctgagtgaaccatgaacttaaaaaaaaaaaaatactgtctctctcagagcctcagtttccatgtctgtgaaatgggagcagtggtcataataggtggtgagcatcaaaagaagccatgtgggctgggcacagtggctcacgcatataatcccagaactttgggaggccatggcggcagggtcgcttgagcccaggagttccaacatcagccctggaaacagagcaagaccccatctctacaaaaaacaaacaaaattagccaggcatggtggtgtgtgcctgtaatcccagcaacttggaaggctgagtttggaggattacttgaacctgagagttcaaggctatagtgagacatgatcatgccactgcactccagcctgggcaacagaatgagatcctgtctcaaaaaaaaaaaaaaaaaaaaaaagcagcagcagccaccatgtgttatacatatgcttcaattactgctacctgttattaaacttcctcagagattctggaaacatcccgaagatgtggtaaaagtcaagaccttaaatccaccaccgtagggcttcatttatttatttaacaaatgtctattgagtttctccaagatgccaggtgctgaaagtaaaaggccctgccctcatgaccctttaggatcacagacaagtcaatcctatatggtagaaggtgatgcaagagctccaagcaggggcagctagctcagatgggggagtgcagtaaggaaaacttcctggaagaagtgacaccagagctgggttttgaaggatgagtaggagtgcgctagacctcctactcatctttcaaactaagttagacgtaacctactgtgtgtgtgaattgcctgagggtggtattgaaacagattctgattccagtagctctggggtagagcctagggttctgcatatcttacagaagtcctcatgagaggagttcactgatggagggaagggacatcgaggcagcaagggcaggatgagcagaagcaatggggcttgaaagagctcagtgaagtctgggagtgatgggcggtgagaggaaaggggcggcagagttgggtcaggaagacctggtgtgaagtgctggctggagctggagagactccaggaaaagacggtcctccctatagagtgtaattacgtgtaccacaagccacaagaaacggacaggccatcacaagtactgcctgtcccctgccacagccatcagaaagggtttctctgcattcagagaagcaatcctgcctgagccggtccctccagccatggtccatatggccacccgccagacaaggggcttgctgagagggtgggtctgttgctggggtctgaaatgccattttccttccagattaaggagctcacaggcaacctcagcagaaactctccatcttccagcttgtcccctggctcagggggcacagactcagactcatccttcccacccacacccactgcagagaggagcgtggcaatatcggtgaaagaccagaggaaggctatcaaggccctgttggcgtgggtgcagaggaaaacgagaaagtaagccgcagcccctctccccacactacttcatttaactagctgctttcaggcagaggaaaggagaattagtatttattaaggtgccagttatgtatgtgcccattgcttcatatagaatatcagaacagg

SEQ ID NO: 12989 - DNA, 2300 bp, Homo sapien
actgaaaagcaaagaagttctttaggctgagagtcgtccaacaactggtatacagttggtgctcaatcgatggtgatcatagtccctccctgccagggagctgttgctgactgggtagtgttccccaaatgatgtggctgtccattcccaggatcagacatctttgcatcatgaaaaatggcccaaccctgtagctaacatccacagggcacattgcttaaagacagattccctgcaacctctctcatgatggagaagaaggctgattctcttagctctctgctttgtaaagaaaatggttttcagcacaacttcaccccacagcaattatggaaaataaattgaagtgtaagaacagggagatggctagcagatggggcaaaattagcctggctgctactaccaccctggctccacaggacgcagaaagagatcctgctccttggagtgtgaaatgaccacaagattaagaatcaaggcagcagcaaggaagctcctgcctcaagcccaagcaccaaggagcccctaatggggcctccacttctgtctccactgatcccacctttccccgcccaaactgctgtccctgtgggggttcctctcctccttctgggctcagctccaaggtcagtctttagagacctctgctgccctccacccgcattcacagttccttaacccaaattgactttctcctttctggagtccactttagaaatctcctttccttgtttaagggccacacgatagcccctgccccaatggatgactggagggtagactcaccctccttcagggccctgcctcaagggcacaggtctgtccttcgggggacctccatagttactgggtaattagtgagcagccgggtttccgggattcattgctgtgaacagagcagcgatgcacacaggcccatgtgtttaaatgcccagtgagccctgtccatttttttccccctcttggaacactgaatatttaaagccattttctttgtggccttagttgtcacagaaagggcccaagcactgagctgggagcagggggctgggacttcctgctcctaagtcattcctcaaccttgggcaaattcggtaactgtagggtctcacttttaaggagtgtaaaccacatggtgggcaccaaacaggataagatcctggaattctctagagttcaacagtggaggtggggagggaggggaccggaaggcctgtcctggcattttcagtagtctccacaggaagttctgtcctggcattttcactaatttccagtgaccccacagagggtcacttggagactcagtggccagagaccccacagcgtaccccagctcctaggagttggcctgcttcttgttccttcctagaagctggagtcacattactggaccggaaaaggctcctagtatctaaaccaacgaagaaggcccttctttcacagcccccccgcactttggagactcccacaactttacctccacactagtttgccccccgacccaggccctcgacactccccacgcagggctcccaggattcggggatgggcagggctcgggtcctggtccctccaagtgggggctgcctctccagagtggacaggggacccgcggagggggtgtcttatcccggacgggagggagacgctgcctcctggaccaggtactgggacccacgggcccacccccagttgcgtcacccggcccaccgccccctgagacatcacaatctgggggccgggacccgcgcctcatcacagccggtttgtaaccaaacaatccaacctacaaacaccccggaaagaaaaaaaacacaagctggcctgacccagcctcccgcccctgccccgccccgccccgcccctcgcccctcgcccctcgctcctcagggcccccgcccccgcacgggggagtgagagcgagcccgccgccccgcacccgccgccccgcgctcgctcgcgccagcccgcggcgggggcggccccgaccgcgccgcccgcccctccccgccccgccccgccccgcccgcgcccgcgccccgcccgcgcccgccgcgactccagctccgcggcgccctcgccgggtgcgtgccgctcgcgcgcccgccagccaggctctccgcgcccgccgcccgcgccgcgctggcccgggctctcccgcccgcgcttcatggctgcacacgagtgggactggttccaacgcgaggagctcatcgggcagattagcgacatccgagtgcagaacctgcaaggtaacgcagcccaggctcgccccgggatggctgggcgctcggggg

SEQ ID NO: 12990 - DNA, 2300 bp, Homo sapien
caactgcttgagccatctcagcccaggagccaagcaggtgagtgaaaaacccacctcggacaagagctcatcttcagcccagctgagcttttggcctggctggagctacagccccagctatcacctgtatcacctgactgcaacagcatgagagatcccatacaagaatttcccggcagagctcagtcaacccccaaaatccttggagaaaatccattgcatagttttaagctgctcagctctgtcatgcggtactagctaactagagcacgatcctctcctctccatctccacagcatcttggtcccggccatggtcatctctcccttagatgccctccaccaccacctacctgtttccttgtcccccatggtggtctccaacctcactctccagggtgatcttaaaatgtcattggagcatgtcactccctggcctccccctgcacatctcttgaaaatcagcctccttgccgtgttcacagggcttgagaaattttgacccctcatctcattagctccccgctcctctttcaagccacctgttcctttcagttcctcaaaagagctgctttttgtgcaaaccttatgacccaagaatttcactggcggtctacactcaccagaagtgtacaaatatcagctggacgtggtggcttatgcctgttaaccccagcactttgggaggccgaggtgggtggatcatttgaggtcaggagtttgagaccagcctggccaacatggcgaaaacctgtcttctattaaaaatacaaaaattagttgggcatcatgatgcaggcctgtaatcccaggcctgaggcaggaggctgaggcaggaggatcgtttgaacctgggaggttgaggttgtagtgagccgagatcacgccactgtactctagcctgggtgacagagcgtgactccgtcttgaaaaaagaaaaaaaaaagtgtacaaatatattccttgaaagatgtgttcaggagtattcatggcagtgttattctccatagccaacacagcccaaagatccatcaggaggaggatgggtaaataatggaatacgatttatcaagaggaaaaggagagaacaacacggatgagtctcacaactctaacatggggtgaaagcagccagatacaaaataatgcacaatgcagagtccagttgaaaaaacgctacaaaaataacacaatctgtgatgagaaaagtcaggatagtggttagcctgggagggaggtgggaaatggaaggagcgtaaggagtgcctctggggtgccggtcatgctttgtttctcatatgggtctggtcgtacaagcgtgttattctctagggggtagtttgccaattgtacattttctggctggatgttcaataaggtgttaaaaaaaaaaaaagtgctgtcctatctccttccaaatgactttcctacacacaccttcgaaattcctccaccgggaatttactgctttctcttagtcttcttctggttattcagatccagctcagccctcccctcctcggggagcccttcctctgttgcatcagttagtcttggctgtggggcgatcatacctacaagcaaagcacagtgactcaaagcagtctcattaattagctcatgattctaaggctggcaatttgggcagttcttatgctgctggggaggataatgtggaccagttttgagaaagcaagacacgaagaaagagaatcctggttcagtgcccatctggaaagcttcattcatgctgatctgatttagtgcgtcgttaaattgtgttttataaatgcataaacacagaattgataagatttgttctataatccccgctgaacacacatgtcagttactgggctgggagctggggacagattgatggataagattaatgcaggaggtgggtatgggttcatttgttcctttttttattcctttatttgttcattcatttcaccagccaactttaatggaggacctagcaagtgccaggcagcattctgagccctggaatccggtgatgaacatgacagacaagattcctgcccccaaggagctgcaccttaataagtcccgcaatgaaggagacagaacataaacagaggaaaatacacaagatgccagcttgtgagaagtgctagcaaaaaaagacacaagtatgtccagagagtctgaggtgtatacaggtatacagagttcaattcttctggggcagatggcaggaaaacgttctaaaaataagtaccatgtttttagtagaagccatgtcagaggcttgatgtgcattttttctaacttgta

SEQ ID NO: 12991 - DNA, 2300 bp, Homo sapien
accataccgggcagaggaagtgggtcaaggaggccagggcagctgggccgggcagggagaggacctgggcatggcagaggaggggaaaatagactgacccagcctcaggaggtcagaagtgtgttgggctgtgctgggtcacagaacaacacagcttgggaggctcctggaggcttcaaggggaggcttaaggctaaggctgtggatgttgattgtcgtgtccattactagcccaattattagtctgtcttcctggtaaaaatgtgtggttggaaatgccaaactgagaagcccacttttccccactggggatcatctgggttggcgtgtccatgctcaaggataatctcttgccctttcctgccccctgcctaggatttctccccagaggagaggagctgagggacccccccagggaggctgtgcctgtggctgtcaccctatgatgccagcggcttcctttggattctgtaatcagagtgtttttcaccggtgtctgcagtgattgccaggaagcctctgtgtccatagcccagcgggatcctgccctaattccctctctcatgggcactcagctaattctcaccccaatctcattgtcaccagtctaggtcagcattggagggaggtgtgggcaactacagcccttgctgcttccaagacagacatcaaaatagttgatcaccaacctttcccactccccactctctgacccaatggacctcacagtcctcaaaactactccaagctactgccaatcaatcattttcttatgtgagcaaaacctgtttgacatccttacacctgtaccagccctctcagaaagctctcaattctggtctccttttcttttttctttttttttttttgaatttatgttaaaattaggatgttcccaatcaaaaaatcatttttccttcatctagtaattgggtgagacaaactagccccagaaagcagacaatgggatgaactgccaagtaggacttttaggggaggcaaaatggattaggaaatgctaagttctctgttgaaggaggatacctggattcttcaggctgtcagagttggagggcttccatagactgtcttgttccaactttgtacccattttacaggttaggactctgagacctcagcagttcttgtttggccagtgagctcagggagttagttccaggagtgggggtcggtctctgcacccactggatgacagcttgatactgctcagcactagacagggttgagttggaactctgctgctgatgggctgtgtgacattggtccagttccttaccacctccccccacctattggtaaggagggaagtcagccctggagcgttcagtgctccctgaaatattaggtatcctaggattgtgcgcgtgggctcgcatctggaagagaaatccctagattcagccacgagtaacagaatccctcctcccccgaccaactttggcttaaaccagtcagagactttacttttctctcctcctgagaagtctagatataggcggttgctggcatcgtctcctcaggttatggatgtcagagccaaggctttgcaactgtccttcctttatatcacagtcacttcatggcccaggatgcttgctgtacctccaatttttcatctgggttccaggtaggaagaaggggagtgaactagacgaatctgccctcctcattagcagctttcccagaagctccaccagccacttccgttctcatctcattggccaggactgtgtcacatgttttcccccacatctgcaaggagtctgggaacatgtgccccaaaaagatgggggctcttctagtaagaatgaagggtagggtggcttggagtggcacttcgctgtctctgctacaattggaggagaaaaccagagtttgtcctgaccctccatgccttggctgtatgctccttgtgtggaactcgaaggcatcatccttgcagtgtgagagtgacctgccaccacggcctgccacctcctctcaggggaccctgagtccttcaggtctacccaaaggcattgtagacattcttcctgcaaggcttgggaaccgacaaatagatctgcccagcttgccagagtttttgtgcaggaacagcccctcccgtctttgtcctggcggtgagcacccagggctaagcttttgaacactttctttgtgtttggattcagcccaggcaatgcatatttgctttcatttcttcttgagcttgaggagctcctgggtgcaaatcttggaaaatgaggatctctgagcctttccaggccagctctttgttt

SEQ ID NO: 12992 - DNA, 2300 bp, Homo sapien
gttatgtgtgaaatgaagcactgagaggctaggagacttgcctgtggttatacatccaataggtggagacagggattttaacttgaacccaggcaatctgactcaaggtcatatgcttccaaccactgggccagctcaggctcccagttctagaaaattaacatagcaagaggaacagaccaggaatccagacatcagtggatccatcccccctgggactgcaaccctgggatgctcccgagagagcagagggctgggtatgacttgtgttatccctctgctgacgggaacaggaccctcatctgtttcagggagactgtttgcagcaaaggttgaagtcagggtggatttgtagcttatccagcgtctggtcaggaaatgcaactacctggcagggtccaccctcctgagcctcccaaggaatcagcaaactaaacctgacaacattataggtcccagcatggcatgtcagagctggaagggatgtggtcttattttacaaggagggaactgagcctagaaaaaggtcatgcttagccaggccacccagccatggggcagcgtccttcccaggaatgagggccctgggtgttccagcactgcttcaagttgatgatgggccttccagtggcctggacaggcctctctccagggacagcccccagtcttgctcaccctctgcacccttgcccttcctgctgaattcctgcaggccggccagctttcctgaccactgatgtgctgggcttcttcatgaatgattttcaacctgccagttcccacaaaccaactgtgtctggtcttccgtgaaaactttcatagacgtcattatgtttgctaactaattgaatagcaataggaacatttttgagaatgaacagggctggctgggcagattctgtgtccttctgcctacatagtggcccctattgccccagctgctgcctaaaatccttccctctatttgtgctttctcccttgagcttaatactctaaaccctgttcatccgtgggtcaccccaggctaagcctaattggagctgcccctggttccctgtgaatggaggatcggtcagaggtcggtatggtcaagaaggacagaagcacaaggctgcctcctgggattgagggagctggggatggggagggactaatgcatccctgctctgtaccaagtgccttgtcaatatcacccgacccacgtggttggtgagagtggccccatttatcaaagaggaaacagcccaaagtgcacagctaggaaaagacagaggtgggtctccaggccagctctgtgttgtggcaaagcccagcactttctactaccccaccctgcctcctactgagcagggccaagcaaggggctgagagtcctgcagatcaaggtcaaacgtggaacttcccaggacagcagtgaaaggctgtgtctggagtgtttgcacatgttgaagtgaagcagcttaggaatagtccatgcaaatagcttctaggcctgccgagaataataaccgggttcacaaagcacctttagaggcatgaagaggccctgctctgatgtccggtccaccatctacagactctgcaaccgtcagagagctcttagcccaagtttccttgtaaataacattgggacacggagactagcctttcaggactgttgtgaggcttaaacgaatgggacacccagggcgctcagcctggcattggtgtcccctgagtattagttatttgtaccattaggagctagtgtttgccatggcaatgctgggaggtagggggcaataaagagcagaactgtagcccagcaccagacagtaaaggctgagttccaggtcatggagctagagatgggagggtaggggctgagctcaagagtggggccccagttcctgcccctggtgacagtttcttcctagcctagcccacctccactggccacgctcaccctcctgcacacacacacttatcctgttgaggagcctcacctcccgctgcggtgtcgtcatgtgctgcaggcaacacgggcggcgctggcctcggaggagccccgggtggaccggctgcaagcccagctgaaggagctcatcgtcttccctcacaacctgaagccactctctgatagtgtcatcgctaccatccaggagtatcagaggtatctgggaaggccaagggtggtgggactcagggtgtgctggaacccacatttccccatctccagaaggcgggcttgctttctcctacaacatagtaacttctaaatcattctttgtacctctcaatgactggcttttagaggttct

SEQ ID NO: 12993 - DNA, 2300 bp, Homo sapien
gtccctcccattctttgcttaataaaaataaaagctgagtttttggaagccattcaagtcacacactagctgagaaattagagccacaacaaatacatttaaatgcttgcacatccaatgcacttttcaagtaaagcattcaaaggcagggagtggctacagggaacatattaagttgttacaaaaaaagtcaaaacaggtctgaaaggaaagcaactcactgggagaatcacaggacgggtttccagagcacagcccgctacgtcgcccacctccccctggccagcccacatcctttggcccagcacgcgtctgatggcctcttccattttctccttctctcttgtgggttctccccgaagcttcttctggccccgtgcagggcctggggatggtgcccagcttcccagtagatacttactaactgatgagtgaagacaatttttatttttaatagtgatgatttttactgtaatgtaataaaaattgtaaagtaaattctaagtgcttaatagagaaaaataagggaaaaaaaaacaaacttccaatggtggtcctacccatctcaaccaagtggccttcaaggttactgtgcctctcccccaatgccagggagagagaggcctgaggttcccatggaatgtgcttaaaagccaggcctggaaggggctaaggccactgcacacagccctgacttgatcacatagaccctttaatggcaagacatcctggcctttttcttgaactcctgggctcaagcgatcctcctgcctaagcctcccaaagttctggaattataggcatgagccaccatgcccggccccagcctttttctatgagtgtagtttttgttaatgttttgttttgcttttactagttgttgagttgtgactacctaatatataattttgtctcttttttggtattgccattatatcctaaaaattaccattcacaaattcattttaagcctcctttttgctggctgcataatattctaaagtgcaagtgtaccataacttacttaagcaatcccctataattaggcatgtgggttgtttctggttttgttttgccattttaaataatgccatgttgagttttttgatgtgttaaactttatacccattctgggctcatttaacaacattggccttactctgtacaaggtattgtgggagactggaggataaaccagacacaatccctttgaataaaatgcaaatacaaataactttagttcaaagcagtcacatggttgctatatgcagacaactagaactggaatacagaagagttttgcctggactaactgggattttaagaaagtcacaggagaaaatctgaggctttgcagccatagcccaggggaagtcaaatggacagtccagcaaaaggggtctctggtgggtgacctatgccagcaggcaggtgttacctagggccggcatagcaagcgggttgcatctcgagcattatgttcgttttcagtggttgcgaggagtgctgcgcagaggtcagaggggagtggctcagtgggtaactttagcaggacctgcccatggacccaggttggtggagtggtggggatggcatgaacctaacacgaccatccccagcctgagaagttcatctcagggagagctcagggctggtgtcagcttggcccatgcccagaacagtgttccttaggttgaggcctctttgatccattcaaatcaagatcattatgggtccagacgtttcggactgcaggttttgacgtcctcttttggagagcgtgcaatctgaatagacagacgagaattgcctccgggcctcaagcttcgagaagaggaagcagggaacctgagaggccaaagacaaagcagttttgccaggccagagccctaggccagttttcccagaggccagacctgttttcattccctgcctaattccattcctgacaaacgtgctcacctctggccatattgcccaactgggagcaccaggggagggttggtggtgggagtgggcctgtcccaggtgtcctgccgggggtctttttgcagccccctacattcctgcctgttggccttatctgtggccctttcttcagcccctgcaggtgccatgactcagcagccccaggacgactttgacaggagcgtggaggatgcccaggcatggatgaaggctgtgcaggaccagctgcaggtcaatgacaacacgcagggaccccgcgcggccctggaggccaggctgtgggagaccgaggtatgcagaggcgtggcctcagatggccctgtggtcttggc

SEQ ID NO: 12994 - DNA, 2300 bp, Homo sapien
cttacaacacaggtaggaacaacaggttattttggaaagagtttaatatattctctattgttaagtgcaccagatgctggacttctgaaacaacaattatgcttctgcataatagctttttctacatatttctgttcatgttgcttgttcctctgatttacctggaatcaatgaatctgaaaaacaaaaagattctttaagcacctggtaaatttcaggtcccacattagaaaatgagcaatcatcaataatattgatgggggtgaaaatatgacattgagactttcgggtaatgtgccgagtttactttcatagtttactaggctcaggtttcatgccgaaggattatttgaaagactcactcactgacatgattttctgattttaaattcgaacactctcaaagcataaacagatcacctccagcaacattgtaaaaaaatactcaaagtttaaaaaaaaaaaagtaacttgtggcagtacttagtgttcaacagaaaacactccatctgctaaacaatatctcgactgcaaagcttctcttactgttggcggatagataatgacatagcccagtcattatcaccgtggcaacagtgaccagaaactatcagaggaaaattgcacatggaacagctggctctcgagcaggcatgcctcagcttcctctggagtatgctttttctgcaagtctggtgtgctcgagggtaccaccaaccctgtgcggctccaagactacagattatgtagcaagtccactggtcctgctcttccggatttattcttcccgccaataggagcacttaccacgttccaagcatcgtcctaggcactgaggatacagcagtgaataaaactgagtgctgggtaggaagtcaataaccaagctagtaaataactgtatattgtcaagcactggtaagtacaagggagagcagagcaagcaatgggcctgatgaggcttgctttgtctcctctgcactcccacactgctttgtatctgcttctcatttctcacgatgggtccaagctttgggcaccaggtctccctggacattccgcgctggcactgcgcctagcacccagcggctgctcaggaaacgtttgtcgaacgaacgaattcacttcttagttccccattcaacaaacctttcctgatcctaggcccaacaggttaaaaggctggagggccaacgaggctggaaactcagaggcggccgggggcggtggctcacgcctgtaatcccagcactttaagaggccgaggcaggaggatcccttgaagccaggagttcgagaccagcctgggcaaaaaagtgagacatcgaccccccgcccccgccgccaattccgtctctacaaaaaggaagaaaaaaaaaaaaaacccagaggaaatcacacaggcaaaagcgctttacaaattttaaaaatgaaaactgttctagagaaataatcgcgcgccggaggcggaagccccagagcctcagctcccacgtggcggcggagccagggaaagtccaggagccaaggctacggcccgagcgctggaaccccggtcaggctccggctccccgccacgacgaactgcatgcggccgcggcgctccggaggcgcccggggacgctcacctaagctgggagaggcggatacccgcccggcctagccccgctacctcccaagagaccaacacgacaagcgcgcgcccaccgcattgccatggcaattcaaccgccgctgacaccggaaccggaaacttcatcaggaggtgaccccttcccggcgttccgcggaacgggcgagtcccgcgcctctcccagttgtctcggcgtagtccagctggcctcattggctcacaggaggaaagtcgtcttccctcttgttttgcctctcgttgccctgcaagcgtgaccctgatggacatccagtctctccaattaactaacaaagcggttgccgacgaccaatagtaaggcagtaggatgaggctccggcataaggcccacctcctacctgccgggcgggacgagcaacatgattggtggaatcgagtaattactgatcagtattgtccaatcacggagggcagtttagagccggcccaatgagggcctccagggggcgggtcggactgccgcgggccggggagcgctctgggtggccagctgtgggcccgggccgtcgtgggctccggcttgcgtgcggagatgagcgggtccctcggccgagctgcggcggctctgctccgctgggggcgcggcgcgggcggcggtggcctttggggtccgggcgtgcgggcggcg

SEQ ID NO: 12995 - DNA, 2300 bp, Homo sapien
ccaccaccactatcacctacagcaaatggaggatcagttatccccaagagtctttaaggactagataatctgggaaaaaatacatttgaaaaccatcaagtgctaatacgaagccagctaccatttaccgggtgctttctgtgccaggtaaaataatacacactttctataatttttactttggcttcctaacacaaactttgccaaattgtctcattatcctcaaatgcaggtgagtgacttaagttttacacctgattagccacagaagaggatgtcaacccaaagcttttccaaacaccagcctgtctcatcattgtaagcaatgactatgattagtaatttcgaatttagagtaacagagaacctggcacctatttttagcacacaactggcacctctttttagctagggacatgcagggactcagtcactgaaagtctctaactgggatgcaggtatcctaagtcactctctagaaggaaaaggtacagccttcccagttttccaccaaccctgaccatcctggccaaggagcaggcccttgtgcctggcctcttcctcctcccctactcagataagactggcgaatgcacgtggagtacttggaaaagatgcttattagctgcagccttccctctcccggcctaatccatctggtccctggtgccctggccccctgggctccaaggctgagccagtgagttagcccagggcccaggagccagggctgcttcttttccccacaaacctctccaagccctggcccacataaattcagccctgtgcttgagtatctaaagccaaatgtcatgactcttccccgacaacatagatcccgactaaggtcagccgacagctgtcccaaccctttgcttgtagcaaccacagaggatgatgcttgacaccctgagccgtgagccaagcgagatcagcctccgacctcactagcctcaagggcaacctcagccctctccccaccatcgacagccctagaccttacccacgagtaggccaatggcttccaacctccccaaagtgtccgcgaaagtacctatctcacagtgggtccttactatgagtttcctaaccgtgcagagcagtcaggcagcgggccaccctcctccgagtcagtcattgacaaatcgccccgaaacgcctatattagctcgaagtgaggataagtgaacctttaggactttacctactgctcaagttggcaacagtacagagccccagatcctcaagacccagtgaaatcaactacaccctcagcccagactctactccagggcagtactcctcgccctaacccggctcgaaccttcagacagaccccggcggatggagccccgctccccagcccggcgcggcggaacccctcggcctcgtgcagcgatgctcctgggcccggggcggagggcgcctgcccggcacactggcctgaccttgtcggagctccgggtcgtccagcacgttgtaggccgcgtaatcgcggacgccgtgcagccgcaggatctgcaccacggcgttgctgaagccgcactggggctgctccggcgtccccttgaggaagaccaccaccttgtccttcttcaccagcgcgtccaactgctccgccgagccgccgccgcccgcgcccgagcccgccgcccgcacgcccggaccccaaaggccaccgccgcccgcgccgcgcccccagcggagcagagccgccgcagctcggccgagggacccgctcatctccgcacgcaagccggagcccacgacggcccgggcccacagctggccacccagagcgctccccggcccgcggcagtccgacccgccccctggaggccctcattgggccggctctaaactgccctccgtgattggacaatactgatcagtaattactcgattccaccaatcatgttgctcgtcccgcccggcaggtaggaggtgggccttatgccggagcctcatcctactgccttactattggtcgtcggcaaccgctttgttagttaattggagagactggatgtccatcagggtcacgcttgcagggcaacgagaggcaaaacaagagggaagacgactttcctcctgtgagccaatgaggccagctggactacgccgagacaactgggagaggcgcgggactcgcccgttccgcggaacgccgggaaggggtcacctcctgatgaagtttccggttccggtgtcagcggcggttgaattgccatggcaatgcggtgggcgcgcgcttgtcgtgttggtctcttgggaggtagcggggctaggccgggcgggta

SEQ ID NO: 12996 - DNA, 2300 bp, Homo sapien
cagaggggagactcttcagccagactgcttggattcgaaaccaagctctggcactttttgcctctggagccttaggtgaattatttagcctctttgtggtgaagtccctcaacattcttcctttccctttttgtataataggtttttgccaggcacagggcagtccagaatagagactccattcctcagctcccttgtagctatgtgaggccatgtgcctacgtcccacccagtgggatctgagccaaaatgtcatgttagtttctgggaggtcttcctcaagagacagcccctgtctcattttttggtctttgctttgttttataatcccttcctctatcgtgctgttctcattggtgctgccagcatggcccatgggctttagtcaaggcactgttgatgggtgcccagctgcatttcagacttgttatggactgggaacacctaggtatgtactgctcattcctcactataccccttagatgggaatgctattttatttatccttttactctctctccattgtgtactagcagtggtacatgaggggagacataattgtctctttcattttcatatttttagattgagaggaacagcacttgagaagttgtacctgaagagcctcatccacacctgcacttgatctctatgatgaggtcctggaccttaagcctgaacctgatgccatggtggactgaaagtcaggatgtcttaggaggccacgagtcaattttgcatgtgaaaagaatgtacatagtggctagaggctggatgatgctagcttgcctccaaagataaccactattaattattttacctgtatgcacatgctactttcccatcgagaagtgaagtctcttcttctaactccttgaatccaatttgtgctttgaccaatagatacaagagatgatatccaaggctaggtcataagaagctttatcgctgccagctgagtctcctgaaaagtttgctcttggtatataccctttgggaatccaatcaccacgctgtgagacagccccaagcccacacaaaggccatgtgtgggacttttggttcctatagctccagctgagcttccagctgacagccagtgtcaactgacagcattgtgtctgcaccaacttggacagcaggcccagttgagccttcaggtgactgcacctagatcgccatatgactgaaaccttgtgagagggcccatgtgagaacttactccctagctgagccacatcaacccacagaaccatgggtgataattataaattgttttaagcgactccgttttggggtggtttgatgtgttagtagcagtaaatccatacttgtcagtagcaacctcaattctcgcctcctcagaagaaagaattcagtcgaggggcataaggcagagtgagagactgaggcaagttttagagcaggagtgaaagtttatttaaaagttttagagcagaccaggcactgggccaggtggctcacaactgaaatcctaggggaggccgaggtgggcggatcacttgaggtcaggagttccagaccagcctggccaaccatggccagcatggtgaaaccccgtctctattaaaaatacaaaaattagctgggcatggtggtaggcacctataatccccgctactcaggaggctgaggcaggagaatcacttgaacccaggaggcggaggctgcagtgagcagagattgcaccactgccctccagcctgggcgacagagggagactccatctcaatcaatcaataaaatcaaaataataaaaaatgaaagtttcagagcaggaatgaaagacagtaaaatacacttgaaagagggccaagtgggtgacttgattcaagtgcatggtttgactcttgacttggggttttatctgttggcatgcttgtgaggtctacgtctcttctcccctgattcttccctgaggtgggctgtctgcatgcacagtggtctgccagcacctgggacaggaacatgcgcagtgtgtttaactggagttgtgcgcatgctcacttaaggcgttcttcccttaccagctgaaagtttctagacgaagggcatataccagttaaactccgccattttgcctctcagtgttcaagcttgagcccacgcatccaactcctgagatcttactgggaagctgctgatcatcagtttcaggtgtttctatcttttgggagactgcccttccctgatgctagctgtaaccaattattattttagagagacagttaatgaccacctgaccatcacctgacggtcagctgacattcctggtcggg

SEQ ID NO: 12997 - DNA, 2300 bp, Homo sapien
aacagatacaacaatttggatgaatttccagataattatgctgagtggataatgtcaattcgaaaatgttatatactgtatgattgcattttgatggcaatcttgaaagaacagaagtatagaaatggtgactagattagtacttgccaggcgagtggggaggaggtggctctggcaatagaagggtggcttgaggggtccctttgatggaactgttttgtatcttgattgtggtggtgattacatgaatctgtgcatgtgatatattgcatataactaaatgtgcacgtacacacgcacacacacaaataagtgcatgtaaagggaaatctgatacagtggatcatatctaataagatgggtcatatctgaatacagtggattatcaaccagggctttcttggttatgatgaaaccaaggagaaccataggagaaaagtgaatgaagaatatatggaatctctcatattatttcttccaactgtatgcaaatctaccattatttctcaataaaaagttaaaaaaagagacagaattttgccttggagttaatctaattaatgtgttgttttgacccatttaccttctggggtagataaatccaaattgctgtgactggtcccaggaggacccataagagttcaatggtctgtcctaggagagtggtctctggaaagtggcccaggatcaataaactgctgctgtctacctttgagggtgctacctccaaacacagtcacattggaagtcagggtgtcaacctaggaattggggggaaacacaaactttcagtccttaatgggaatccaagtcagggggtcataagttgagtgtcagaagagaaagattaaggaggtattattagtgccggtgggccaaacatgaagtctagacacattacttaatcattacattcattcatatagtaaatattcaccaggtacatatatactgagtgctgggctagtttctgatgatgcagaaatgaatggctttattgtcttcgtcctcaaggccctcatggtctagtgtagaagacagactgtaaatatttaccattcagtacgatgtgtgctgttgcagagcgtggcttgggcgctatggggaaccagagggcatggagcctggtttggaggggcagggaagactttctgaaatatgggagacaagtcgaagcctatctgaccaaggcaccatgcaggaggaggcgggacattcatggcacaaggccagcatggcagcagtgtgaggtgtgatgggtgtgacccattcaaggaactgccaggtgctccatctgaaccaacatgtctgagctgggggcctggcatgagggtcatgcagtcctgtgggtgccaaaacaaggtggttaattttatcctaaaaacaattggcatctactgaggagttttatttgggaagaggtaaaattaaattagaatgggcaatgtatctctggaagcagagtgaagggggagctggaggggcaagcccagaggcagggccaacactgagctgcatggtccctgcgatggacaatctgagcctgaggtaaacgggctgatgtgggactgacggatgcaaggtgacaggctgaggctagggaccgtcatcactcccagtcacactgcaagctgcagcagggtagagccacatctgatttgtccccagtgcctgaccagagttggggctcagtgtttgttgagtgaattcttactgcatggccagggtttctggtcctggcagctgggtggatggaggggtcatattgagaatcctggagtgcagtagtagccaggtgtgaagagtcaagcaggtctgcagcctgaggatcagcatggcagcaggagggtcctctgggagctggtcatgaatttgatatggaccatgggatggtgcccacttttgtttgtatcctggggtacagatcacagctccatgaaggtttgagctaggcaggtgagccacgctgggagcaaagatggtggtggctaggtacttgcttatccctataccaatcagcaggatgtgggtggggccagataagagaataaaagcaggctgcccgagccagcattggcaacccgctcgggtccccttccacactgtggaagctttgttcttttgctctttgcaataaatcttgctactgctcactctttgggtccacgctgcttttatgagctgtaacactcaccgcgaagatctgcagcttcactcctgagcccagcaagaccacgagcccaccgggaggaatgaacaactccagacacgctaccttaagagctgtaccactcaccgcg

SEQ ID NO: 12998 - DNA, 2300 bp, Homo sapien
cccaggatcaataaactgctgctgtctacctttgagggtgctacctccaaacacagtcacattggaagtcagggtgtcaacctaggaattggggggaaacacaaactttcagtccttaatgggaatccaagtcagggggtcataagttgagtgtcagaagagaaagattaaggaggtattattagtgccggtgggccaaacatgaagtctagacacattacttaatcattacattcattcatatagtaaatattcaccaggtacatatatactgagtgctgggctagtttctgatgatgcagaaatgaatggctttattgtcttcgtcctcaaggccctcatggtctagtgtagaagacagactgtaaatatttaccattcagtacgatgtgtgctgttgcagagcgtggcttgggcgctatggggaaccagagggcatggagcctggtttggaggggcagggaagactttctgaaatatgggagacaagtcgaagcctatctgaccaaggcaccatgcaggaggaggcgggacattcatggcacaaggccagcatggcagcagtgtgaggtgtgatgggtgtgacccattcaaggaactgccaggtgctccatctgaaccaacatgtctgagctgggggcctggcatgagggtcatgcagtcctgtgggtgccaaaacaaggtggttaattttatcctaaaaacaattggcatctactgaggagttttatttgggaagaggtaaaattaaattagaatgggcaatgtatctctggaagcagagtgaagggggagctggaggggcaagcccagaggcagggccaacactgagctgcatggtccctgcgatggacaatctgagcctgaggtaaacgggctgatgtgggactgacggatgcaaggtgacaggctgaggctagggaccgtcatcactcccagtcacactgcaagctgcagcagggtagagccacatctgatttgtccccagtgcctgaccagagttggggctcagtgtttgttgagtgaattcttactgcatggccagggtttctggtcctggcagctgggtggatggaggggtcatattgagaatcctggagtgcagtagtagccaggtgtgaagagtcaagcaggtctgcagcctgaggatcagcatggcagcaggagggtcctctgggagctggtcatgaatttgatatggaccatgggatggtgcccacttttgtttgtatcctggggtacagatcacagctccatgaaggtttgagctaggcaggtgagccacgctgggagcaaagatggtggtggctaggtacttgcttatccctataccaatcagcaggatgtgggtggggccagataagagaataaaagcaggctgcccgagccagcattggcaacccgctcgggtccccttccacactgtggaagctttgttcttttgctctttgcaataaatcttgctactgctcactctttgggtccacgctgcttttatgagctgtaacactcaccgcgaagatctgcagcttcactcctgagcccagcaagaccacgagcccaccgggaggaatgaacaactccagacacgctaccttaagagctgtaccactcaccgcgaaggtctgcagcttcactcctgagccagcgagaccacgaacccaccagaaggaagaaactccgaacacatctgaacatcagaagggacagactccagacacgccaccttaagagctgtaacactcaccgcgagggtccacggcttcattcttgaagtcagtgagaccaagaacccaccaattccggacacagtgctgagaatcatgccttgaaatctagcagctctgttaaaaactgagcaaggtgtacttcggggttgtgttgagaaggttggtgttcagctaaatcaggagggaaggccaaggaaaatcaggcttggcacctgtcaacaggtgggacccaatagccaagcaaatggtcctgcaaactgtactacccaacgttcacagcaaggattccaacttctcaccagggcatggaaaatttgccttcatgtcaaccaccaccttagcccttgactacccaacggactcttcccaagtcaacagccacttcctccctggggcttaacaggcattccttgaagcctgccccgggcagttagtccttcccttttgtgtgaactctcggctgttttcgttgtctgcacacagagcagtggtctagggagcgaagggttttggaatggaccttttcctttcttagcttgctgtagggattgtgcttcagctaagtaaagt

SEQ ID NO: 12999 - DNA, 2300 bp, Homo sapien
ctcctgaaggtaacagcaagatctgagcagcgctggatggatcctgctctcagtcccctgtctgggaacaacgctgagccttaacagggatgtcagcttcctagggctgctgtaacaaatcccacaaactgagtgccttcaaacattgtctggtagttctggaggtcaaaggtgcagaacgagtttcactgggctgaaaccaaggtagggctgtgctctctcctgaggctttaggggagaatctgcttcctgaacttttctagcttggagagctgcattccttggcccttcgtcccccttgcttctcttccaagccagtagtgtagcatcctcagatctccctctgctttcgtcttcacgttgcctttccttttctgcagtcagatgtccctctgtccctcttataaggacatttgtgatgacatttagggcctatgtgggcgatccaggatcatctgtagatctagaacttaaacttttttttttttttttttttttttagatgtggtctcactctgtcacccaggctggagtgcagtagcaccatttcggttcactgcaacttctgcctcctgggttcaagcgattctcctgtctcagcctcccaagtggctgggattacaggtgtgcaccaccatctccagctaacttttttgtatttttagtagagacagggttttgccatgtaggccaggctggtctcgaactgttgacctcaggtgatctgccttggcctcccaaagcgttgggattacaggcgtaagccaccgcgtccggccacattattcttatttgcaaaacaaatacttatctggcatcaaacagatactttgcatccggcaaaaacaggtggaggtgactgaaggcgaatgtgggaggtcatggtgggttaatgatcgccagcgctgtccggtgaaatcaaccacctgtgacaaaggtggtttttcacttttactgaacaagcatgctattctacagtaaactccttaacaaatgtagcttttcaaggtccttaggactattacctttcaatattattgggaagttctttgctcttcttagcagactgcgaaactcaactttgtgatgacaagatacagaataaatgcatattaactgaaattctaggctcacacctatgtgagcttttctctctctaacaagatgtcagggccggttcagggagttcatctccagccacctgtgctaatcatcgcccatcctttccaagtatctaatgacactcccaaccaaggtctctataatttccagccaaaaatgagttacaacatatggaacatctaattttctgtttccattctagttattttattcttatgagcttgtgggctccatctaccaacctctgggcaaatgctcatctgacttccatagacacacagcaagcagacaaccacacaaagaggaagagggagaatatttaccagccatggaacatctgctctgtgcttatatctcatatgcattatctctaattatcaaaagaaggtattattattattattgttccgcattcacagatgacaaactgaagatcagattggttaaatacttgtccaacattaacttagcatttgggcatcatagttggaattaaaacttgggtctgctcatctccaaaaacaccctaagccttaccacactcatgggacacagctgcagctgcaggttctgaaaggaaaactaaaacttcagaacccagttcactatgccaaaaaggcaaaaaaaaaaaaaaaaaaaaaaagccaaaagctgagtcatgcaagaagctgactttccttttgctcctaagtagatagctacagataaaaggttaaatagctccacaggtagctactgtatgttcaccttatcttacgtaaactgctgatttattgagcatgagacaaatacgtaattgactatcccctacctactccgtttcctttgcaacatgtggattcagtcatgtgaccatacactgcctttctcctctccagcctacttttccactttaaatatcaaagccctcaaaatcatctttggagaaaggcacagactagcgactgtttctgtgatttcgtgtctttttacttccagacatgtccttaaccttggcacaacaaatctctaaatcgattgagacctgtctcagatacttcttggtttacaagatggaggctgaaattaaagagaaagatcctcactcaactcacagaggagcagaatgggaagaggacttagtgagaattccctgaacacaggagaaaaccgaagcccagagagtggatggccaagtc

SEQ ID NO: 13000 - DNA, 2300 bp, Homo sapien
gaattaaaacttgggtctgctcatctccaaaaacaccctaagccttaccacactcatgggacacagctgcagctgcaggttctgaaaggaaaactaaaacttcagaacccagttcactatgccaaaaaggcaaaaaaaaaaaaaaaaaaaaaaagccaaaagctgagtcatgcaagaagctgactttccttttgctcctaagtagatagctacagataaaaggttaaatagctccacaggtagctactgtatgttcaccttatcttacgtaaactgctgatttattgagcatgagacaaatacgtaattgactatcccctacctactccgtttcctttgcaacatgtggattcagtcatgtgaccatacactgcctttctcctctccagcctacttttccactttaaatatcaaagccctcaaaatcatctttggagaaaggcacagactagcgactgtttctgtgatttcgtgtctttttacttccagacatgtccttaaccttggcacaacaaatctctaaatcgattgagacctgtctcagatacttcttggtttacaagatggaggctgaaattaaagagaaagatcctcactcaactcacagaggagcagaatgggaagaggacttagtgagaattccctgaacacaggagaaaaccgaagcccagagagtggatggccaagtccaaggtcacacagccaagtgcatccgagcagcgcaggatccaggtttcctgccccagtgctctttctgcagcccatgccacctgttttcatgctatctcagttcaccttccagctacacacctgcaatcagaaacagaaagtctgagagtgtgtgtggagccaaagaggggacagcagtggtgaggccagtttcatgtcttgtgatttattttctccctttctttttggactttaatcttaagtggacagcaatttggaacagtgtcagcaccttgttggattgtgctgtttgggagaggtgacacagagtattttaaaagagcaggttaagaacttttcacaaggaatcaattgagagaaaataaaatagaaacagactgtcccacatttgggctgagcaccaaacacatttttttttttttttttgagactgagtcttgctctgtcactcaggctggaatgcagtggcgcgatctcggctcactgcagccttcacctcccgggttcaagtgattcttctgcctcagcctcccaagtagctgggattacaggtgcccaccaccatgccaggctaatttttgtatttttagtagagacgaggtttcaccatgttggccaggctggtcttgaactcctgaccaagtgatccacctgcttcggcctcccaaagtgctgggattacaggcacgagccaccgcacctggcctcaaacaagctttttaattgcattcagaagtgcaccaactaggcacagacctctggcatggagacagaatgggaggttcttggtgtctggcctggtcttgcagaaatcagggagttgtggggaccaggcagccactgtgcatcagataggagtttcagcagcaggcaacagaaagcctgccaatgtagctgaaataagaagggcttatttttatccctgaacagaagcttccagcactggttcatcagatcagggcactgagctggcatccccatttatacagttttcctttccttcacctttgtaagatgcctggcacagctctgagcatcaaatatctgtgccatgtgggagcacacgaggggacaagtggggaatagggtctcctctgtcctctgtccccaggctggcttctctcgtggtagaaggacccccacagcaccaggcctcataactaccctgctggtaaactgcaggtgctgtcacggcttcctgccttcgtatatgaaatgttccttggcagctggactgctgtttgtttaccgcacgcacagctctgctgcctcttggttacaccagtgagctattgctccatgacaagccacaccgaaatgtagcaagcacttattgttgcccacatgtgtcaagtcagttgagtgtttctgccaaccggggcctggcttggcccaccttggctgagcttgctctggtgctagggtcagctagacaggtcggcaggagaccagctgctctagaagagcctggacaggatgaattggttctccttccacgtgcatcttgcatccctccagccaaggatttgaacccaggtctcgtctgactccaaatgcaccaagaggatggagcccagagtgacacagaggaagaggcccctggatggatg

SEQ ID NO: 13001 - DNA, 2300 bp, Homo sapien
ctggccaaagagggtgatcggtgaagcaatctattttccaccttgaggctaactggtagttatttctttctgcctatggagacctctgcttaccttctgaccacccactcatggcaaggtgttctcagtctccatcttcagaccccaccaccatttctacagtagccactgtggatctccctactccaggttctgcctcttccatgtaatgagccaaacttggccaaggcagtcaacaagcagcatgcatgttagagccaggaacagctgggtccatatccttcctctgctacccacttcattcaggttgctaagccactcaagcctctgatacttcatctatgaaatgggggtgacggtctctagtttatggagttgttgggaggtgttagtgagataccctatgaaaaatgcctgacatggcataggggctccccacatattaggcaacctttacctccaaccccactgacagccacacacctgcccatcagggagtgaggttgagaatatcaaaatatatatttgcaacagaaaatgatagagataaatagcaattgcattggggttacaagggtaggaatgatggattctgcctgggagagggaactagtctgagaacataactattgaccagggtatttcaagtattcactatgtgtcaggctttaacactatacacacagcctcatctgatcctcagaggagtcccatagggtaggtacctacagcaaacaggcttcaggggggcccaggagaccaggggtccccatgatccctgcctcctggtattcataaccttgagtaaggataggacctacccctgaccaatggaatatggcaaaggtgacacacgtacgtgattccatgtatggatcacattatatgagactgtgatgtcccttgtcttcctggcccactccattcccaccccaagtgttggttccttggaaaaacactggggatggaggtggaattgctgtgaaaacaagactcagtcctccacagaagctgcccagggagttcttcaaaagtggttatcctacctgccatttacactggatcaggactgtccagaaatcattttcacatctccccagcagaatggcatcatctcaatactaatcttcacttgaactagaagaatcatgcttgtggttttcaaaaggaaaaggttcctattcatggtgcatttagaagcagcccagggtgcttatagaacggacctgcttcttgctatgttcttgagcttctgaggcctcttgacaaagtcgagcaagtaagacgaccaggccaagtgggcactctgggccccatggccaaggatgggctggccaggtggccacgtggcctccggtggccttgtttctgtgggctttatctgatcctgagctcagatgctgatagtgcactggcttattttctaaggagagggagcttgatttgtgcaggatgcgccttcaccagatacctccaggggcaagagtccactgaggttacagcgccccccgccccccatgcctctaagctctaagctcagagaagggtccctgacacagagtcctgttaaaggaatggccacagggataggagagaccagggtcgtgcatgccagctcaggatctggggcaggatggttggcagggggtcgtggggagcaaaggaggggaatcacctgacagaaaattgggcaggggtgctcagggaggaggctgcggagggactgggaccagtggaagggaggtggaataggtcttaggagccaaattccttgcagaggcctggggtgaagcctgggcagctctatccccgggagccgcccttttgcctccagcagctgccggtccagccacagcccctccaggagacccaggccgggttcctaactccgctgctctttggcctcgtccctgcctagcccctgctgcaggttgcttttttcccccctcctcctcctccctcctccctcctccctcctcccccttcctcctcctccccctcctcccccgactggccccgcccccactgccggccccgcccccactgccggcccgggccccacccacgccggagctgctccatttaaggagattgcgcagctggaaagctacacgtgtgagcctagaggcgggtcccggttgcagacttgccatggcctccgaagcttctgtgcgtctaggggtgccccctggccgtctgtggatccagaggcctggcatctacgaagatgaggaggggagaacctgggtgactgtggtcgtgcggttcaatccctcgcgtagggaatgggccagggcctc

SEQ ID NO: 13002 - DNA, 2300 bp, Homo sapien
gggtctgcgttcccaggagctgccaccgttccagggagcaagtcaggccgggacgtagcgcctgcgcgggaccctcacttgccaccaagacccccacaaaccccgccccatcctgccttacgccccgccccaaggtcgttctcccgacccggggtcccgccccaaggccgtcctcccgccccgccgcttggtggcggccgcatgctgcccggatataaagggtcggccccacatcccagggaccagcgagcggccttgagaggctctggctcttgcttcttaggcggcccgaggacgccatggccgagtgcccgacactcggggaggcagtcaccgaccacccggaccgcctgtgggcctgggagaagttcgtgtatttggacgagaagcagcacgcctggctgcccttaaccatcgaggtacagccagctttggagcggatggcgaggcagcaggggcagcccctgggagcttgggatgccctaggaagggcgaggactcaaggagcactcactatggggcagggaggatccccacagatgaagccactttgagccgggctctggaggatgaataggagttctccaggcagggaagaagggtgggaaaaccgcaaaggaatgtcggtcaaaggggtggacccagtgcctgtggagtgtgactataatgttgactacagcaggcattttctgggcttcggggtcctaatccttaaaaatgggtatctctaagtgactcatccatatggccgattatcggaatcatctcaggtgggtcccagaaatctgtatttttaaaaagaaccctcaacagtttagggtcaaccaggcatagcaaacactggcctagagtgtgaagtattttccactacctctgggctttatttagaaaacaaatttaacaagtgatgtcgtagtataagcgccggtattgaatcaatattgacttttttaatgtgtgatgccttaagatgggtccttaatccatgttaagtttttgttaaagaaatagataagtcttttacaagtatttggatttactcaatgaaaaagagtcaaaaaatgttcaaactctctccaaacatacactgaagaaagcataaaaattaaaaaatatattagaacacgtatgtccagtagcaatcaaaaattattgagtgttgactgtgtctctacagatgggaaactgaggcacaaaaatgtacatttgtccgaggtaagattgctagtaggtaatggggttggaattctaggctcttaaccaccacaaaatctgcatttttattggcatttcaattttttaaatatgtttttactttaaaaatcaagttaaatacttacttttttaaaatcaaaatttgaagaaataatttgaagattcagtggatttctttttttaaatctctgagaaatctcttcttcaacgtgacaccaaaaccacgaaccagacagtttttcataaaatcatgatacatgctccacaaaaaataacccactagcaaactgtgggacagattttgcctcacatcattgaaaaggccagtattctttttctctctttctttctttgttgttttttttttttcctgtagatacagggtctcgctctgtgacccaggctggtcttaaactcctggcctcaagcgatcctcctgcctctgccttccaaagcactggaattacaagtgtgagccgctgcaacccgccagaaaaaagtgtgcctttcatggccctgtctgggtggctagacacgtgtgtgtgctggtggtcctggcccagccagagtccctgagaggagcatgcatggcctaaggaagtgagcttcagggaacagtgatgaccatcatttcacactcggacccctgcccagatgggtggatggctggcaggagggattccggttttctgcgcctggagaagccctggcaagcggaacctgaaagtatgccctgtccttttcttctcctcagataaaggataggttacagttacgggtgctcttgcgtcgggaagacgtcgtcctggggaggcctatgacccccacccagataggcccaagcctgctgcctatcatgtggcagctctaccctgatggacgataccgatcctcagactccagtttctggcgcttagtgtaccacatcaaggtgagtgtctttctcccagaggtccatcgggtgatcttgggtttgccctcctccatgtctggccttagtggtttatcttccctccatcccagtcccaaaagcattaaaaaatgggggaaatgtacaagtgcagatttctaaaggactttaccag

SEQ ID NO: 13003 - DNA, 2300 bp, Homo sapien
attaaggacccatcttaaggcatcacacattaaaaaagtcaatattgattcaataccggcgcttatactacgacatcacttgttaaatttgttttctaaataaagcccagaggtagtggaaaatacttcacactctaggccagtgtttgctatgcctggttgaccctaaactgttgagggttctttttaaaaatacagatttctgggacccacctgagatgattccgataatcggccatatggatgagtcacttagagatacccatttttaaggattaggaccccgaagcccagaaaatgcctgctgtagtcaacattatagtcacactccacaggcactgggtccacccctttgaccgacattcctttgcggttttcccacccttcttccctgcctggagaactcctattcatcctccagagcccggctcaaagtggcttcatctgtggggatcctccctgccccatagtgagtgctccttgagtcctcgcccttcctagggcatcccaagctcccaggggctgcccctgctgcctcgccatccgctccaaagctggctgtacctcgatggttaagggcagccaggcgtgctgcttctcgtccaaatacacgaacttctcccaggcccacaggcggtccgggtggtcggtgactgcctccccgagtgtcgggcactcggccatggcgtcctcgggccgcctaagaagcaagagccagagcctctcaaggccgctcgctggtccctgggatgtggggccgaccctttatatccgggcagcatgcggccgccaccaagcggcggggcgggaggacggccttggggcgggaccccgggtcgggagaacgaccttggggcggggcgtaaggcaggatggggcggggtttgtgggggtcttggtggcaagtgagggtcccgcgcaggcgctacgtcccggcctgacttgctccctggaacggtggcagctcctgggaacgcagacccggccccagctggcccgcgccttcctcgaggccccggccagcagcgacaccgaccgccgccctctgctgctgctggagaggcaccggggtgaccttggccctttcttcttctggaagacccccccgcttccctcggctgccggaccgggactctgggcctctgctgggaactcacagtcgacaccaggatgcccagagccaggacccactcctcatcttatgggatcagaagagacccgcgcgggcctgagttaggcctgggctttcccgggttccctggatctccaccagcctgtgcctttgagtgtcagagtacgttttttggcaaaggacaactcctgacgctccctctccctcttccatacacaaagcatgcgttttccacaggtctgatgtgctgtggacatctaatagctattacaaaatggagaatcatgggtttttgcccttgggctttgagtttactagtgaaagcatagttcgaaatgaatacttaaaaagaaatccctccttccaccctaagatcaatggatttgaaaagtgcctggtttatatgatcaaaaccacccctctgtaaattacaagcaataaggaaaacaatttcactttattttgcagtaacgcattcccactaaggcaattaagaaagtcatgcacaatgaaaaacatgtgaaaccagctccagcctggttcaaacatcaccatgggatggagtttggtgtctcatcttccagctctttcccagttctctgaccaggcactaagaacataatttgtgatcctttgaaatatcaccaaagtggaaattaagagatctgatgaggacatctgattcacctggcagctgggtatctgcctctttgcctatccagagagcctaattcccaagaaggggctgagagggcctaaggtagtcgagacataatgggatttaccaggaacacaacatagaagagaaaagccaagggaagttgggggtggagtgagggcccttgagctcagcaaacctcttttccactgtagcccttagtggtgttaatatttaatatgcaaacttaaaggtttcatgctgattttcctgtgaatggctcttgactccagacctagatagccacagagcaagatgacaagctcgctaataagctctgttggggaggtctcagcccaggccagagctgtgaagtgagaaataagtccagtttaaatagtgctgctgggatggacttttgtggccagggaaggggtacccaggagccagtgtggccactgacccagcctcatcaatggccctaggatccagaatgccacaaacaatgga

SEQ ID NO: 13004 - DNA, 2300 bp, Homo sapien
caagttcacaggtgatcgtggtaaaggcaaaactagatctaaatcaggacatgaacgcatccattaaggattctgtcaaaatgattgcttcctgtagctttctgtgtgaaacatccatttgcttatcctcagggaaatcagactaacaaagacttggaaaggaacataaaattctaaagctaggcttatggcctttataacccttagatggggcagataacatgccacggaggctcagagacagctctgagactatgcaatagctactgtttcccctcttgtggaatgttcacttaaaaaagctcaagggctctataagttgcccaatgaactccacagacatccttaattcattttcatttattggaaccctctctcaaataattttctaaatctcacgcaataatgatgtatattcttgctcaatattaagaagccctcatgcaaaactgaagaaataaattgttcttacaaaagaaggaaaaaggaattatattctcagaacattctgcttacccagacacacagatctgattcttgctccattgtttgtggcattctggatcctagggccattgatgaggctgggtcagtggccacactggctcctgggtaccccttccctggccacaaaagtccatcccagcagcactatttaaactggacttatttctcacttcacagctctggcctgggctgagacctccccaacagagcttattagcgagcttgtcatcttgctctgtggctatctaggtctggagtcaagagccattcacaggaaaatcagcatgaaacctttaagtttgcatattaaatattaacaccactaagggctacagtggaaaagaggtttgctgagctcaagggccctcactccacccccaacttcccttggcttttctcttctatgttgtgttcctggtaaatcccattatgtctcgactaccttaggccctctcagccccttcttgggaattaggctctctggataggcaaagaggcagatacccagctgccaggtgaatcagatgtcctcatcagatctcttaatttccactttggtgatatttcaaaggatcacaaattatgttcttagtgcctggtcagagaactgggaaagagctggaagatgagacaccaaactccatcccatggtgatgtttgaaccaggctggagctggtttcacatgtttttcattgtgcatgactttcttaattgccttagtgggaatgcgttactgcaaaataaagtgaaattgttttccttattgcttgtaatttacagaggggtggttttgatcatataaaccaggcacttttcaaatccattgatcttagggtggaaggagggatttctttttaagtattcatttcgaactatgctttcactagtaaactcaaagcccaagggcaaaaacccatgattctccattttgtaatagctattagatgtccacagcacatcagacctgtggaaaacgcatgctttgtgtatggaagagggagagggagcgtcaggagttgtcctttgccaaaaaacgtactctgacactcaaaggcacaggctggtggagatccagggaacccgggaaagcccaggcctaactcaggcccgcgcgggtctcttctgatcccataagatgaggagtgggtcctggctctgggcatcctggtgtcgactgtgagttcccagcagaggcccagagtcccggtccggcagccgagggaagcgggggggtcttccagaagaagaaagggccaaggtcaccccggtgcctctccagcagcagcagagggcggcggtcggtgtcgctgctggccggggcctcgaggaaggcgcgggccagctggggccgggtctgcgttcccaggagctgccaccgttccagggagcaagtcaggccgggacgtagcgcctgcgcgggaccctcacttgccaccaagacccccacaaaccccgccccatcctgccttacgccccgccccaaggtcgttctcccgacccggggtcccgccccaaggccgtcctcccgccccgccgcttggtggcggccgcatgctgcccggatataaagggtcggccccacatcccagggaccagcgagcggccttgagaggctctggctcttgcttcttaggcggcccgaggacgccatggccgagtgcccgacactcggggaggcagtcaccgaccacccggaccgcctgtgggcctgggagaagttcgtgtatttggacgagaagcagcacgcctggctgcccttaaccatcgaggtacagccagctttggagcggat

SEQ ID NO: 13005 - DNA, 2300 bp, Homo sapien
catgcatacacacaccaataaaagatgtatgtgccagcttttgctatgcttaaacaacatttttcaaatctctgcaaaccatgaatgagacacttgtgccgtcaaatcgcacttccttacaggctgctttgtttcctggaatagtgggacgcatggaatccaagctctgaggtttcatttattgtaagcactgggctccctgaccaaattaggtgtcaaactctacctgcagattgggaaattggggctgaagaaagagccggcagccaatttggcacacagaaatagttcttctggagtttctggggaccacctccctgtctgcaactacccataataactggttgggaaattcagagatattgctcccaatttcgccggaaaatgttggaatgcaactgttatacacaggctgggatgcaaagtgcttttctcagaaaagtgtggcctttggaccctggtttcttaagacacaggtttctgtttccatggacttgcagggtttttcaataggagttactggcatctcaataataataataattggaggaaatgtcttgtcactaagccaacaaaaaccactcagactctgctgtttcccaaagcccctcatggagggactctgtcctgtagagctgcagggctggggtgtgggtgttcctgggcaggcctgattcccctaaatctctgctgagtctctcctctgcatctttctccccacatccataccatgaggaagacagaaaggccagctagggagggtatgggttggtgttgtggacgaggtggtaggtgattcctattctgtagcagggatgggagggaagcagccttttggtaggcaggaggatcttctgagaagtaggggcagaaggttccttgcaccatccaactggggaaggggcacagcggtgggccctgggaacctgctaaccaggatgtctgggttcttcccccagctctgcttctgaggcacccagcagacctgggcaatttgcctcctcgtcgatagagaccatggtcgctgcttgctctgaccatgtttcccggcacttgccttacttccctggacgttggggtggattttggtgaggtcccagagaaccaggagacaggctgcttatcttctagaaaatcatgttcacattcatggaaggccttaggtactagtacttagctatgacctttggagacaaggactccatcttcctgaagacgttaaaatgtcctgtgtactgaaagcaattggaggggcctggatttgaaccccagtctgtgtcagaggtcccaagtcttccaagaaagtggaaggcgccccgaggcaggttagagggcctacaaggcgggcaactggacatggggatgggctggggaggcgccaaagggcggcagggattgggggtatagtggtttgaccacgacttaactaccttcagctgccaggccatccgcctgttccctggaagatataaggagctgggagtggggaacggagcaacctgggcttccatgatgaagaaagagacagcgcaggagcaaaatgtccaggaaggagggagagagaccagaggaaggaggaggcgcctctttcacccgcgtccccaggtccccatgtacgccacgtgggtgggagcgtgtcccacacacccgcgcgcccaaagccacattcgccacgctcccgccggggcgggctcaccgcgcgcctctgggtgccgagcctccacaggccacatagccgccacctgctgctgcatccccactgcggggacaggggcactcagtgcctccctccgtcccccccgccccgcgaaggcctcccatcctccagggccaggcggaggccacgtctttcccgggccccctccccaacgcggagagggaagcggagggaggagcttggcccgcagccgccggccctccccgcactggagctccccctcccctccctccccgcccctcggctgccgcagcccggctcgcagcgcgcgtcagcgggggctccccggagcgagtcgctaggtaacggggctggctccgcagacgcggggccggggaagcccgcgcgcgtcatcagcagcggcgccgcggggcggggggcgcagagaccctccccaatcccggcctgccaccacctggctcgcgcgcagccccggcccagaatgccttaacctgcgccgattgctgccgccgaggtgcccctcccctgtagggaccccgacgccgccagccccttcctcctttcccgcaggtgcgcactgctgtgcttgcggccgggtgggcgccccgccgctgcggtcgcg

SEQ ID NO: 13006 - DNA, 2300 bp, Homo sapien
gtgcttttctcagaaaagtgtggcctttggaccctggtttcttaagacacaggtttctgtttccatggacttgcagggtttttcaataggagttactggcatctcaataataataataattggaggaaatgtcttgtcactaagccaacaaaaaccactcagactctgctgtttcccaaagcccctcatggagggactctgtcctgtagagctgcagggctggggtgtgggtgttcctgggcaggcctgattcccctaaatctctgctgagtctctcctctgcatctttctccccacatccataccatgaggaagacagaaaggccagctagggagggtatgggttggtgttgtggacgaggtggtaggtgattcctattctgtagcagggatgggagggaagcagccttttggtaggcaggaggatcttctgagaagtaggggcagaaggttccttgcaccatccaactggggaaggggcacagcggtgggccctgggaacctgctaaccaggatgtctgggttcttcccccagctctgcttctgaggcacccagcagacctgggcaatttgcctcctcgtcgatagagaccatggtcgctgcttgctctgaccatgtttcccggcacttgccttacttccctggacgttggggtggattttggtgaggtcccagagaaccaggagacaggctgcttatcttctagaaaatcatgttcacattcatggaaggccttaggtactagtacttagctatgacctttggagacaaggactccatcttcctgaagacgttaaaatgtcctgtgtactgaaagcaattggaggggcctggatttgaaccccagtctgtgtcagaggtcccaagtcttccaagaaagtggaaggcgccccgaggcaggttagagggcctacaaggcgggcaactggacatggggatgggctggggaggcgccaaagggcggcagggattgggggtatagtggtttgaccacgacttaactaccttcagctgccaggccatccgcctgttccctggaagatataaggagctgggagtggggaacggagcaacctgggcttccatgatgaagaaagagacagcgcaggagcaaaatgtccaggaaggagggagagagaccagaggaaggaggaggcgcctctttcacccgcgtccccaggtccccatgtacgccacgtgggtgggagcgtgtcccacacacccgcgcgcccaaagccacattcgccacgctcccgccggggcgggctcaccgcgcgcctctgggtgccgagcctccacaggccacatagccgccacctgctgctgcatccccactgcggggacaggggcactcagtgcctccctccgtcccccccgccccgcgaaggcctcccatcctccagggccaggcggaggccacgtctttcccgggccccctccccaacgcggagagggaagcggagggaggagcttggcccgcagccgccggccctccccgcactggagctccccctcccctccctccccgcccctcggctgccgcagcccggctcgcagcgcgcgtcagcgggggctccccggagcgagtcgctaggtaacggggctggctccgcagacgcggggccggggaagcccgcgcgcgtcatcagcagcggcgccgcggggcggggggcgcagagaccctccccaatcccggcctgccaccacctggctcgcgcgcagccccggcccagaatgccttaacctgcgccgattgctgccgccgaggtgcccctcccctgtagggaccccgacgccgccagccccttcctcctttcccgcaggtgcgcactgctgtgcttgcggccgggtgggcgccccgccgctgcggtcgcggtcgccgctggtaagctgcgctctggggcttggggcaggaagcagtggggggcgctcgaagagcagggcagctacggccaccgtggccgccggaccggccatgtgctaaagtttctggggctcggcgccccgctgggcgcgcagcgcggggagcagacgcgccgtgggtggggcagcgcggtgctgctggcgcccggcccccgcggggtgcagctctgcgcgttctcatgctgtctctctctctttccctccgcgctgcctctccgaggtcctcccgccgagccccggcgcggggcatgaggagcccccgggtgccgcccagagaccagcaggctgcgcgcacacctagccagcggcagacggggacatgagcagcgcgcacggggtcccgcgcccggcggccagccctatccggcggcggcca

SEQ ID NO: 13007 - DNA, 2300 bp, Homo sapien
tggatgaagcctccttggaaatcagaaactggaaagcaatgggcatcaattagtaaaagcacagatgagctgaccacaatacccaactgttccattcctagcgtattccctgaggaccccttgcacctgtgcatccaaagacaagatcgagagtattcacagcagcatttttttttggcgttatcagaaaacctggagatgaccaaagtatccatcaaagggctagtgcatcaataaaaactgtgataaggacatacaaatggaatattgtgtagcactgaaaaacaatatacgtcaactacacaaataatgctgagaaaacaacaaagaagacatggaagagcaaatttagagcaatttaatttttctacaaagggttaaagcaggtaatctataaaggtaaaactataaagaaaagcaagagaattgacaagagtgaatactaaataggatggaggtgaccctggaaagggggcaggtaggagatgcctttggagagatacacagtaggacttcacgactgttttttattgttccactttttaacctatgcaaggctatattatttttcaaattgcacacacacaacctatacgcccttttattgtgaagtatgccgtgtacataatatttcttacagcagacggggagccctgggcagttctgggcaggctgctttgctattggccacaggaagggtgggaggaggtgggcggctcttggcatggactgtttgggcaggccccgtgtggactaggctgggaggtggcaggaatgatgggtgtggtgagtgcagtactggctaaaaacagggagggaagggagggccagggaactggagggtttagagaccagaggaggaagggaggaggcaagcatgacaggaaaagtgaaaagagaaaagaaagaaaaaagtggggggaaggggagagaaggagagaaggaagaggaggaagaaaaggagggagaaaggaagggaaggaaaagaaaagaaaggaaagttacaggaaagataacactgaaagccttctgtaggtcagtgaggttctggtcccattcccatagccacagtccctactgggcccccagctgccgggggaccttgaacaaacccctccatctccctgtgccacagcttccttgcctgtgacaaagtctgggagtcccaggctgcccctcacagaggctcgtgatgaccatgagtgtaaagtacctggaagagacatcacccaaagggaccagtcgtactcactgagactccttagagtacagctggttccctcccagtgagcccccggagggcaaagcctccacgtgtcaccaagtctgtggtgtccaccacacacacacacacacacacacacacatacagagcaatgggcccctgtgggcgtctcttctgttccccttacttgaactgtggcacctgcatgattttcgatactggtttgagctgagagccatggagtacccgctgtgcaacctgagcaccgtgcggtcctcgaagacaccactcacagcctcgtctctattggatgattagccatgttagggctctcatttattgaggacaccgcgtgctatattccctatctcatttaattattcggttctgtattctcttttcacagatgaggaaatctaggctcaaagacactatcttgctcaagctgcacaacaaagcagggctaggattaaacctcgttctgcccagatgccgagccgggagtacaccggactctgggaggagcgttggcgtggaaagccaggtcactccgatcttggtcctcaggctcgggataacgtgtcagccccaagagagcgctgcccacagccccgggtgggttgggttcaactgcacggggcggggcgccaacagctcaggacttgggttgcaggctggttcttgcaccaaccagcggggcggcctcgggcctcagtttccccatcccgcccacgaagggaggcgattgcgagcgcttggggtttctgacggaccccgccccgggggtggggcggggagtggtcacgtggaggggcgccccgtccgccgagccccgccccaccccgccccgcccgcccccgcgctcggggccctccgcctagtagagatctggagccagaagcccagagacagccgagtgcgccgtgcggtctccggacgctcgctgctcagcccgatccccgccaactgtgcaggcggctgacccgcagcggcagcggcagcagcgaggactcgagcgctggctgcagcgacaccatggatctctcctttatggccgcgcaggtaacggggcgtc

SEQ ID NO: 13008 - DNA, 2300 bp, Homo sapien
acactttgaaatcctccgcctggctctgcccataggcaggggactggcctcagggtaaactcctccgaggcacggggatgtctgaggcatggggatgactgattcattcacttctgcttgacaatgcactgcctggctatgtgggtatctgataaatgagtgtgtgggtggatggatggagggagggagggagggaggcagtgagagagggagggatggactgatggatggacagacagacggatggatggatggacggatggacggacagatggatggatggatggatggttggatggatagacggatggacagacagacaggcgaataagtaaatgaatggttggataggtggataggcaggtgggcggatgtgtgggtagataccagtgtagatgaatggaagagtgtgtaattgttttataagattaaaatattcttttgatggcaggacacaacacagtgacactcagataaatgaaaggtagaacttttgtttcttacagctccaaatgagaggctgtcaggctgggccacacaggatgtgcaactggggacagggtccaagcaagctggagctataggcggcagctatgtgtggcacgtagggtggtgttaacgaggtttccttggctccctatggattggctaacttaaataagtttgtgagttccagatgatgggagctgtccattattgtttggtacctggctccaaggccatcagggcaggtggctagtggcccagagtgtgagaacctggtaagagaaagggccagaatgtgaacttaatcagctgctcatgaactggctggcctccagccaggacctcaaaactggtttaaagtagcctttttaaaaaactatatgacagagatggatggagatgtgtgcagatggacagatgtcttttagagatttctgtcaatgatatttacagaagcatcaacattggattcagatccttgaggattttcaactcatagatacagagctctacaatatctaagttggaagagacttcagagggtctctggacgctcatgcaggtctcaatatgttgtggatctcagagctcttcaatattttagtgaaagctatagatgaggctccataggggataaagcacagacacaccttttcagagggcttgtggactctgggcagcctgtccatagacctctgtccccaactggcaagtcaggaaactccagattaaggagccccaatgtggttgaacagccaggtgcacagatgagtcaaccacacagccaggccagggagggccttcactcaagagcctacagccagttcacagccaagccagggctagcgcccaggccacccataaactgatctgagactctgtttccctgtctccatgatgatgggatcaggcttgattgctggtttgtaggcttgttatgaatcaagtcacagggaagaggagctgatgggctggggggacgtcctctggccctcctgtctcttccccagatccactgggcccactcttatctgttctcttctgaaggaagggttttaaggcttcaaaaaaaaatgttttgaaagtccctgccctttccagctcctaccgtctcagccctgggagtgtaaagtgctgcagatagttagtaagtctttgagcaaaactgagaaagccagcctgagccttgacatgggagaaacctccgccatacatctccgaagaaacggccgcgtgtctcaggggagcgcaaacacccgtacccaggaaacaggacagcttctgccactgtcgcccttgggagccgtacgtggcatacaaagaaatcccaggactccgcctgcccacctggccaccctctgtttacaccttccgcgtaaacgcccactgtttacatccaaaactcagacacaaaataaccacctcaagaagataaataatgataagaaataaatgttacgcgaggcaaatttattcacatggggcttcccaggccactttgtggtcagccgggagggacgtttttgccgtcccacgactccaacgggcagccgggctacgcaaacatggaaatcttccaagagcctccctggcccccagggctcagagggtggcagagcggagagcgaaggtggccgcagccttcccggccccacagccagcctggctccagctgggcaggagtgcagagctcagctggaggcggagggggaagtgcccaggaggctgatgacatcactacccagcccttgaaagatgagctgttcccgccgccactccagctctggcttctgggctccgaggaggggtgggga

SEQ ID NO: 13009 - DNA, 2300 bp, Homo sapien
ttcattcttcccctctgaatcaccagcaaatgatagaccgtcaataatttgttaaatgctttttaaaatgaatgctttaagccgggtgcagtggctcacatctgtaatcccagcactttgggaggccgaggcgggtggattgtttgaggtcaggagttcgagaccaacctggccaacatggcaaaacctcatctctaccaaaaatacaaaaattagccaggcatggtggcaggcacctgtgatcccagctactcaggaggctgagacaggagaatcgcttgaacccgggaggcagaggttgcagtgagccaagattacgccattgtactccagcctgggtgacagagagagactccgtctcaaaaaaaaaaaaaaaaaaaaaaaaaaattacgcttcaaacacatgatctctcaccactgttgaattttctttctatgagcccaggagggcctctcagagaggaaagctcctaggtcttcctttccctctgcaaactccctgccttgaaggatcagaaggactgtgctgctcgttgcatcctttgcaagttccaaaccctgatcccagctgtgcttaggggttcctgcaaaccttttccaggtgttaattacctcccacttcatttcctgtttaccaactcagctttttgttttagtgtgtttgaattccctgaactgaccgttgtctgatctccacctcccaactgaattaggggagctgggcttctggaaacccaggtgccgggtgttgcagagtggctgaaagctgggatgtggcagatccgtggctacattcatgcacacacacacacccacatacccacacatgcacacacacacacacacctgcactcacacacttgcacatgcatagaccacagctttccacacccttcctagacaggggtcacttggtgtcctggagagagtgtgaagtctggaagggaaagaggggggattaagccccacctctagccatgggactgagacaagtcacccccacccatctgcgccttgtttcctcctctgtgaggcaagcacagagcccatgcctccctccctggatgggagtgatgtgaaacttgaagaggggtagagacaagggtcgtcaatggaagccccttgggcaaaaaggccctttcaactaggggcacagaggaggccctgggctgagaacttgacagcaccttgtattggtaaccagccggagggactggaaatactcagatgtgtctgtctcccttattaggttcaaagtccctcgagaccctgtctccatcacagtgctccagtccagacccctcctctgagctccagaccctgctggacccaacagccatccccatccccacctgcctggaattctccaaagaacctcccctttaacagttccagcctttaacagttccagtctaaacacatgacctttctcctctaaatcagccccccatctctgcctttgcaggagatggaagccatgacacctgcctcgcccctgtcctcaccccatccatgtccaatcaagcactaggcatgtcaggtttaccctctaaactcctctggaatccagtctctcagtctccatcatcccaggtcgaagctaatgggctaactggtccttgcttccactctacccccactgcagtcctgacttcctgagcagcagccagggcctaatccatattcacaccaagcgccttcctgactgagatatcctcctgcaccatcatccctccaccctgtttagttctgctcaccctcagtgttctcatcaataatccactcgccctcacaggcgcgtttgggaccccatgttctatgctctcacaggaccttttgcttgatttttcactgtactcaggtcagtttgcagttattaagtgactgagcaatgtctggcttctccagtagactgtcagctcctagccattgtatccctagcaccgctgtgtgggagcacttcacaaacgtccattgagtcagggactcagcagtctccatttctcctccctgctggagaatgcgtgtattttgcaatccccagcccctgtgccatctaaccatcttttcttctctgttcagcccaggtgtggcctcactcacatcccactctgagtccaaatgttctctccctggaagatatcaatgtttctgtctgttcgtgaggactccgtgcccaccacggcctctttcaggtgagtcaaagggattcctcagttcactagttaggggaggtgggcagacaccctggagaactccctggaaagctcaactctcatgccccggacaacagttgaagg

SEQ ID NO: 13010 - DNA, 2300 bp, Homo sapien
cccaagtacccaggggacttcatcaagcacagcacacatcagactgtaaggtttaaccaaaccttatagaggctgtgggaattacaaacaactaaattcagaaaaggcaagcattggccgggcacggtgtctcacgcctgtaatcccagcactttgggaggccaaggtgggtggatcacctgaggtcgggagtttgagaccagcctaaccaacatggagaaaccccgtctctactaaaaatacaaaattagctgggtgtggtggtgtgtgcctgtaatcccagctactcgggaggctgaggcaggagaatcgcttgaacccaggaggcgaaggttgcagtgagccgagatcgctccattgcactccagcctgagcaacaagagcgaaactcagtctcaaaaaaaaaagaaaaaaggcaagcgaagcctcagaagagggtcctcagtgcctacccacttcttagtcccctgctatcttctgccacactatagggacctgcttttctttcacagatttggggtcccctccccctgccctcagccccactcccttggccccagagacagtaggagaccctctgctcccctgagcccgggcctgtctcgcatttcccgtggagatgagcaacaaggggaaacgtgggtcttcttaaagaactttcctttccgccctccaccaccttggcaaggcagccagatgcatctccgaagtccagctcactcaggccagctctcttcacagactgtcttccagcaagaggcaaagcagagatgagacctgcacgtgctctttgtggcagagctggccttatacgcactcctgggtgaataaacagggagacatctcctaagaacaaacgcttctcagaaacagtatagtctaaactcatactgaagggagaataagccagccacgggctggagagacccccgcctacattactaagtaacaggaaaggctaagatttggagccttcctccggttcagatctatcccgggagtaatggaagatgcttgcctgttgacaatttttttttattaaaaatcccacccaggaggtctctcctgataggaggggaccatcctatcctctaaggcaaattccagcttcttccctgaaatgtacatccgctactgagcctcagaatgctatttgttccacctacttccacagttttaaggtcttcagcaacaggagaagacagcaggaaaacttgaagtgcagttggctcccgctgagatgtcactagcagaaaaagggaacacaagcaaaaggcaagattctaaagacagaggtgacaccttctgctccaaacatttggagggtcacctttccagaagtcagactcgaagtcctgaattctggcatgaatgagttctcctacgtgtagggggtggcctggaaagatcttaatttgtaagttgacaggtaaggggccttcagttggagaatcttgtcacctgattctcaaagccaaaaatatcttactgtctgaaacatgaggtcttgagtagttcaacttgacccatgcagacataatttgagagacgccaaggaggattaggaaaaaatgtatctggtcttactcaactctgaacattgcatgagtcaaacgttttcctagctctctgtttgtgtgatgggtccactctgatggattcttggcgatgtatctttcatgaccaaaattcaaaagaggccattcgaagtggctcccacaaaagctgctgcagagccccagacattcagaagccaatagtgaaggggccaaaagccatccctcaatgttcactgacactttgcgagccttggggcaagttggcgatgtcaaaacatgtttttagggcgtgtttgccaacatacaggtcttgggcaggattgcagacctctgcagatggtaccaaagtaaagggggagatggtagctgaataatctcttatcatccctaaagtgcaaagtgaaatgagagtggatttttccttccaaatccacttggagtgagtcccgaaagactcacttttgcggcaatccccacaatgacatcactggagcggaggttatataatttaaagcaaccacatctccacagcacttcccagaagagaaaactcctccaaaagcagctctcactatcagaaaacccaactacagttgtgaacgccttcattttctgcctgagtaagtaaatgaccaccttttttttttcttttatgagagtacaatatgagaggaaatctgtgtctcttagaaaaacaaaaaacttccttttacacctacctattggcaaaattttccactt

SEQ ID NO: 13011 - DNA, 2300 bp, Homo sapien
ttaagtattgccaaatgataaaatacacatagttttggatttatgccctgcaaaaaatgaccaaactattgtaacaagagcctccagcctcctccatattatgctctgggtggggactgctcagcttccatgtgccatggacatttcacaaccaccaaatcataatttcccatgtctcctgttgatctgtcaaccggcagctgtgcaacttctgctcttttatctactctctcccttggtgatttcatccagccttgtggctttaaatgccattcctatagttacaactcccagttaggtctcatcatcccagatcttgtccctgaataccacacttgtctacctaattgcctgctggatgtccccatgtgatgtccaatttatatctcaaccttaacaattccaaagttgaactcctgttcttccccaccccccacaaaaaaaactgcttcatcttcattctgtcaccttcatttcagctgatgacaacttcatacttcccagtgttcagtccaaaaaccttggcattgtccgatttctcctttctcccacccagatccaactgaaaatcacggtgttactacctccaaaacacctctagagtttgatcacttgatcacttctcaccacctgccctgctactctccccagctgtcacccgccagcatgtttatttagtgtgtgtattgtttatcaacttcttcctcctgctaggcttatacgcacactgagagcagggatttttgcctgctgtattcactgctttgtcctaaatacctagaacagtgcctggcacatagtacattctcagtaaatacttgttcagcaaataaataactggaggaaccagtgaattataccccggtgtgaataactccatgtgagtgacatgacagaatgtcagagctagaagggcctcttgaggacatcatgtcttccttagatgaggaaagtcaggctcagagacatgaactgactctcctgaggttacacagccaaatatgctcttccaaggttaattctctgctacacaatagcttttgttggtatctgtgaggctttgcggggttgaaggaatctcaggtgtcacccattaataacaatcatgacagtgacaactaatgtttgccacgtgcttacaataagtcaggaaccctgccaagcaccgggcgtatattaacctatccaagctggggaagaatgtttaggctctgaagattgtctggagccgcataaatcccgcagtgtaggcagctgctcattctgcagatagtattctgtggatccctgagttggctgtggccggttttgccagcaggaggccacgaagccatgagcacaggatgggatctaccccttgtgggatcgcagagggctgggagatgcagtcctccctatggaaagagacagagctttctatccctctcccggtgaaactcagcatgggagcatgggaggcaggtcagctgcgtggctatgaacatgagctatggggtgcatgcagaccaaggttcatagtgtacactgtacccaccagctgtagctcctccagcaagcgtgggaggccagtcagctgcatggctgtgagcacggcctctggggtccatgcagaccaaggttcctggcgtagcactgtaaccaccacctaggtcttctccgacaagctggttaacttctctgagcctggctttgtcattcatcgcgtggggacaggtgcagcagaagagagcagacagaagcacaggatctcaatcaggctcttgaatcagactgcctgggtttgaatccaggccctactgaccagctgtgtgacctcagacaggcgactccgggtctcagcactcaattttctaattggccaactggagatgacaatggcccctaccttgaatggctgccaggaagattaaatgagaaaatacttaaatgtgaaacacttagaatggcgcctggaacacagaccattaataccatctaacagatgttagttgttatccttatttattactcatgctttcctttctcttttttcttttctctctctctctctccttttttttttttttttttttgttgttgttgttgttgttgagacagggtctcagtccgtcggcccagactgaagtgcagtggcacaatcatagctcgctgcagcctcgaccttccaggcttaaacgattctcccacctcagcctctcgagttgctgggaccacaggtatgcaccaccatgcccagctaatttttgtattttttgtaaagacaggatttcaccatgttgcccaggctggtcttgaactcc

SEQ ID NO: 13012 - DNA, 2300 bp, Homo sapien
attatgttcgtgtgatggatatggggcttttggagttaaccataactgcagtgaagtctgattctgatggagagcaagtgagttattaaaataaatgaaaattttaagttctattttttaagagattaaaaaaattgagtttaacatttttccgtgtacctaattttggtcagaaatagagtaagtatattaaaaatggatttatttaaatactttttttatgtagcgagacagattatcatgaatcttatttaatgtaaatctatgcaaaaaaagaaacttttgtctcatttggaaaacattttcatccctttttctgtgtcttgtccagactgagccccgctttgagttacactgttccagcgatgttgtccatatcagaacgtgctcagactcttgtgctgcgttaatgaatctcattcagtacattgcaagctatggtgacttgcagacacctaacaaggcagatatgaagcctggagcctttcaaagaaggtctaaggtacagtcagcaatgtgattcctccagtccctgccatgtcgtgacatgtttacattattgaggtcttcatgacagtcataaggtagaaaagaaactttgaaagtcattcatctgttctttaccttcagaataatggggtctgaaacggtggtttcatgggcctttttggaaaaccattctgctgttttgatattctttgtttccattaatcttcctagcaaacatcatacttttttttttctagacttgttattttcatctgtcctaagggaagaaagaaaacatttatcatgcaaaagcttgttctatgcaagttgtatgtaaaaatgctatgaaaagatagatggcaggtgttagtattgttaccagaagacttacttatatcatcatattttccctatttttttatctctaagacaatccagttttcagtgtactttgtcatatatgacttccttttcctttcatgatgacctggtgagatagagaggttaaaaattaataagacccagagaatttagatgattgctctaaagagtagcagaaacagcaacaaacccagatattttggtgtccagttcaatgcacttttctgccccaagtgtcacctttctaacttctcttatgtccaaattgaagaatgtccagtttgtttagcattttttctttttcattgttattctttgtggtctctcttatgaacagaaatctcagtccccttaggttctagagcctctgttatgtactctagtaaaggcctgactggcatcgtgtttgttgtcttttgttcaggattattttacactttatttgtgttaatttctgtttgtgactccttgttcctgctgtattctcacgataaggtgatttatgacaccccgcctactatttattcccttttaaaaaacattcttcttattttaaattatccctttcagcttggaacttgctattttagagtcatgctcacatataaaaagcacgatctgggtttaatgaatctacagttcaccaaccattggtgaagtatttggttaagtatttggtgctggaactgagctctgaatcaccgtttagtatatttcccctgctgtgtgtgccccctactgttgttaggtgtccaagaaatgaggcctcgtcctacaggggctttatgtcaaagggatgaaagtcattgcaaccatcagagttgaggagatcaaacttatttagttatcccttctttcccagctttattgcagtttgttcaacttccctgttttcaaatgcattgcctcttcaagatcccagttcactgtgcttgctttgaggtggtgacacatttattgctctttgccagtatttgttagggtgataatactaaaaacttgaaatataacagctgctgggcatagaaaaatgagtaggtttctatttctgatgtttttgtacaatgtaatgtatttttgggataaaataaatgtaagtagtttggtttttaagagcattttcagttatttttaattaggttttttggctataggtagattccagtggtcgatcatcctcacgtggtccagtacttcctgaagcagatcaacaaatgttacgagatctgatgagtgatgctatggaggagatcgacatgcaacaaggcacctcgtcagtaaaaccacaggctaatggtaagaccaggactcttctcagggagcactgatgttaatgttggggcttactttatttgtgttctcgtaaatttaataagtcacttattaaagacgcatatgagtttttatggatatctgttaatcattcagct

SEQ ID NO: 13013 - DNA, 2300 bp, Homo sapien
tatttttattatatataaggtgaataacatgtcttgatatgcatagtaaaatgcctattgtagtcaaacgaacacatccatcagtatccattaccttcttttctgatgcaagtactttttgaaactaattccttcaaaatgatgatttttttccttttaccgttatgattttccaattaaatgattttttctgtgagatattctggtttacattggtattaaggatattatatgaaaccttttttttcttctaaagcagggcgttttaattttttgtgattatagattttatacttcttgaatattgctgatgaacctgttttgggatataatcctccaacttcatttacaacttttcatgttcatctttggagctgtgcacttgattataggtaagttcacaaatggaacaaaataaagttttatttaaaatgctactaaattttgaaaaaaatacataattcagtagagttaaggttcaaattgttgttgttgttgttgtttttaatagagtttctggagccgtatcaaactgatgttcttttgtttctctttggcattagacccctttatttgccaatccgatctcttcttaccgtggaaacattcagtgtttccagtagcgttgcattggataaatcttcctctactctcaggtacctgtgtaaacttcattgtatactaaacaaagctgttcgaaacataccaattgatatttacctaaaccattttattaaagtctcaattttttgttaaacgttcttttactaatagttataaccttttacccaaattacccaatttttctcaggtgacatgtttcatctacccatttattattgcatttcatttttagggaagaaattaattctggagattctttaaaaagtttgcattttaaaacatatggtaaacttcccatgctacctgatacactttatactttttatttaatttttttattttttagagacagggtcttgctctgtgtggcccaggctggaatgcagtggcatgatcacagcttattacagctttcaactcctgagcccaagtgatcttttgccctcaccctactgagtagctaggactatagacgtgtgcctctatccctggctgattaaaaaaaaagttttgtttttgtagagaaggggtcttgctgtgttgcccaggctagttgagaactcctggcctcaggtggtcctcctgccttgtcctcccaaacggctgggattacaggtgtgagccactacatctggcccactctatctttatactatagtttaaaccttgtgaatttgggcatctctttaaaaactgccaaaaatttagaattaatttgagtagatgatttaatctaattctttacaccatttaaatattcctagcattcataaacagtttttaaaaaatgttagatgacagttataagttagaaactgcttatgatttcaacaatgttcataccagaaagaatgatgcaattaagcatatagtgattatggggtatgatactcaaagcttagtttttcagatgttggttttatctttcttgcctcagaataatcttggatgaagctgctttacatctatctgacaaatgcaatactgtcactataaatctgagtagaggtaagagttaaaaaacaaatggagtagataaattctgctttatttttgtgcgtaaataattttaaagcattttaactctgggataatgctagtgaactaagaatcttattaaagatccttaaagattaaagggtctttaagtatatagtgatcatgtggtatatattcacagcttcatttttcagatactggtttttcagtttgaaattgtaatgttcttataatgctagttaagtacatcaaattactatatatactacaaatttttatttaagataatttttgtttctaacaaaaaataaagtgaattttaggacttctatgggatgaaactattttcattgcattataattatttgtagtgctctctgcaatgaattttaaaggaatgctagttgtattgggtgttggttggatacacatttttgaaagctgtactgaagagattttcttaattttaaaaattttagattatgttcgtgtgatggatatggggcttttggagttaaccataactgcagtgaagtctgattctgatggagagcaagtgagttattaaaataaatgaaaattttaagttctattttttaagagattaaaaaaattgagtttaacatttttccgtgtacctaattttggtcagaaatagagtaagtatattaaaaatg

SEQ ID NO: 13014 - DNA, 2300 bp, Homo sapien
tggtatcaagactgtgtttagaccaaaatataaataaggagaacataataggtgagtggattataatctcctgagagtcacaatcctcagtcctggtgtacaccttctaggacttcagaagctcaagaattgtcctggcagtggcttctcacagaagggggcagggctgcctcaccacgcggcgccttgaccggtattcacaccaggctttacgatgagtctgggttttggcagcacttccatgtgaatcattcactgtcctcaccaactgtccgtgcctgttatgtgacagccactgtgctaggcacatgtagagatgatcgacacaagtccctctcttgggcggcttgcagtctaaaaaggggaaacgagaaaattcaggagggtgctgtaggtgctgtgatttaagtgggtctgtgtgaagcatatgctgtgggtccagatcttacgatgggtttactagaagacgtggtgaagtttgagttttcttgaaaacttcgaggatggatgaggggaggaggctaggacaggggcatctgagcagtgacaggtagttctttgaaaaagtaggatgtggtgacagcctaggtatgacatatgccttcccattggttgccagtattgattgggctagtctcgctagtcataagggtttttctctccttattttttgctccatatgcattcttcatctcatgaagtcttcccagtgaagctgtgctttctgttgctgatgagagaaaaatcaggtatttctagggaaagaactgaattgatcccacagataaatacttgccttaaaaaaagaactgaattgggagctggatgtaatctacataatctggactttcatccccatttttccactaattagccatgtgactttgggaaggtcacataacctttatgagacagtttcttcaggtgtaaagtgagaataatgattctgccctggacaccccacaggactgaggggagggtcagtgagatgatgcaggatcagttccagtttacaaagtgctctcatataggtgagccgtcctccttttctgttctttgtgggtttttatttttcatgagcttctgtttctaaggtatattttgaaatgtaatatgaatttgtaatttgatgtatataacataggtaaaattaggcaagtatctatttaggtatctaattgtgcagattcttttgtcactgccctgcattatagccatatcagttattttttcattgaaagaatgcagttgttatttttgttgtttttccaaattcttgtaggatctaatttccattttgccgtttaaaaaattattgttcatacgatcttttaaaaggatttttttttaagtttgccttctgttgaactaggagttaagtacttatttttcaacttttgtctttataggatctttaatgacttgctactgtgggaaccaacagctccttcaccagtggagacattcgagaatatttcctatggcattgggctttcagtagccagtcagctcattaatactttcaacaaagatagttttagtgcatttaaatctgcagttcactatggtaatatatttttaatttgttttgatttaaaatgcctagtttatcaattaacaaagtactaacctttgaattgtggatttaaaaatctttatgtttcattgtaactatattttgcaatttcttttagtaatttataagaatatttccttatttctatctgtatattgagaatatcattatcacttaaatatgttctctttagaatgatagtgtgcacattgtttgaagttcaaagctaaagagaaaaacagtatgtatttctgtgttcacaccatattctttgtaaaactaagcaggttatataaaatattttcatgatcatttttatgttgctgttttaatatgctatcagaatgtaattgtatgtttatttctcatagatgaggaaagtggatctgaggaggagactttgcagtatttttccactgttgatcccaactatcgttctcgcaggaaaaaaaaattagactctcagaacaagaactctcagagttttctctcagttcttctgaatattaatcatggattaatagcagtgttcacagatgtgaaggtgaggtttacaaatccgaagtgttttttcaaatgtatcttactttaaataaatctgctaggatacatatctagtgattgaagtatttgatattttgaagttgtttcagggactgatgaagaccagtgtcctggggcaaaccatgatgatagcaactttggggatttagctttcgttgca

SEQ ID NO: 13015 - DNA, 2300 bp, Homo sapien
gatcctttcatgggttgagtcttaacagatgaggagataattgaatttgtaatatagttggtttttttgttttgttttgttttttgttttgagacagagtctcactccatcgtccaggctggagtgcagtggcgcaatcttggctcactgcaacctctgcctctcaggttcaagctattctgcagcctcagcctcctgagtagctgagattacaggcatgtgccaccatgcccagctagtttttgtatctttagtagagatggggtttcaccatgttggccaggctggtctcgaactcctgccctccagtgatccacctgcctcggtctcccaaagtgctgggattacaggcgtgagccaccacgcccagcctttagtattgttaacatgcaaactctgttttacaattttaatgtgaaagtgatctataaattgttgaatgacatcttatacggtggtttaaacatatcatatattagtatttttagaaaatactttgggcgtttatttaatctttttaacttttttaaagtatgaaaattgatatgaaaagtagttttacacctaatacaagaaaaactctacaggttaggattatagtatttatactcaaactgtaaaaacattttgttttcttccacccccctttttttttcttgtatttttaagagagatggggtttcaccatactggccaggctggtctcgaagtcctgacctcaggtgatccgcccaccttgtcctcctcaagtgctgggattacaggcatgagccactgtgcctggacttttttttttttttttcccatttttgacaaagtttcaaacatctgccagtaggaaaatagaacaaaagcggcagaaaatataggtagacctcatttgggcttcaccgactaaagtttttgaaatattgcataatgtttttagataattttaagagactatttcatatattttacagatctgaaagattttgcctttgcaatgtaaatttttaaatgtggaagacgaagggcagtgttgggaaataaacagatcctggaaaatttcccatcaacagaactgattttttatcttaaggaaagggaaatttgaagcaatctttctggttaatttccttaggagtattaattattgataacttgaacttgtcagactaggtggataattgttacattttaacactaataatcttaaatggtgcattttttataatagatttataggtactggcattaaagtatcctatgaacaaagacaaagatcagcttcccgatattttagtactgatatgtccattgggcaaatggaatttttggagtgcctatttccaactgattttcattctgttcctcctcactatacagaggtaaatattgaatactttttctttaagattattttttaaatctaccttgctttttaatgattgtatgaggcaatgattttctttaaaaatgtatagaaagccataggaggaatattgtcattttctttttgcacttgtgttctatagaaatatatttaagaatgtcactcaacatcgttataaggatctgttagaattttaaattagagttgacttgtttaggagtgacaggtgggttatgagagaaatgacttcatttcactcatgttcaaagcactcttcatttcagaagaatttgattattgaacaaataattatcgaatgcctgctgtgtgctaagcattgtttaagacaagttaaatgtcttgtgttcattcaccatttttctgatatttttcctaatgtaaaagtgtgacctaaagaaactttagaaaactgtcaaagttatgttcattgctgttactttgaccctttatagtgttttatttcaaaaacactttcttggaaatgaatttatttgaatcctcgcctacattttacagatgagatatcacatgagttaactaacttgtctaaggttcacattgctagtaagtgacaaaaatgaaacttaaaaccagatttctgacttcagaaagcctttctcattattgtatgggcacctctgtaaattcttgtgattaatacatttaatttatcttcatctttacttttaagcttttaacgttccattccaaagaagaaactggttcccattcccctgtgtgtcttcagcttcattataagcattctgagaatagagggccccaggtaagagatctttttctataattgccacctgtaaattttaatctgatatatattttgtcacaattataaggttttaacccaattatatagtagtttttagtgattgtattaatgcctttt

SEQ ID NO: 13016 - DNA, 2300 bp, Homo sapien
tattaatgcccaccttatagggttaaagtcattaaaggataatgcatacaaagcccttccacccacaaaaggcattaataaatcctgaaccctcttttttcaagataacctattcataactgtatcaaaagtatagaatcatgggttgttgaattcaaaaatatccttcagaatccctatcttttggaagaattacaggaatacaataccataagacggacgacacagagatgaagtgtgtgctccattagtgtttactgaactcaggtgaattgctaagtccattatcactcggctaattgtggcggtctggagagtctctccaggggtaggactctcacctcctggtgagcgactgggtcttactgctctcaaaccagggctctttccactatcttgtgtcctctccctagtttatgtcaggtacatactgataaaattatatactgatttatagtctctagcacaaattcgcttaagggtcataataaggtatttccataatttaagattttctgtggctaaggaagtaagggttgggcaaagggtagaagtcactctattcctgtcaaacccaaaagtgaatatactttaagtaaaatgctatgcattgaacacacaaatgcaggtacgactgcatgtggtgagtcgaaattcagatgaagcacctgtatagcaatgagtgaattcacagcctctagatgacaagtagaaggcaggttttaaaatgtctgaaaattgcaacttcagcgcttttgcaacacctgcttttacgatctgtcacgtggagcaaagaggcataactcaacagcactactagggccagacgaccattcacaggctggatacacaaacctatcttgtaaacatataatcaagcaaaagcaggcaaaccggcacaagaggccttcacctaactttcttccagatggcaaacgctgcacgatgacaaacaaggcaaacatggtgcgcaagcagccaacccaaaacaaataactagggattctgacatccaaaggtcctcttcatccttaatccttccagaatgtcatcccacaaggcagggtttgtttgccacaaaaccctgcggcccctcacatcccgagggacagttctggtcacctcctcccacggacctattgagcctgcttcacagacccccgaagcactgactcaattattcccacagtgtagattccattacatctgttaaagtttccggaacacgtgatttaggagagcaaacttgttagaaacagattaaacaacactctaacacatttctctgagccgtgtcacactcgggtccaaacaattcccaaggagggactgactgtcaccaatcttggatggcactggttcaaagcgccctaaagaggggagcgagccccgcccggctcgccgccggcagctcttacccatttgtccaaggggacctgggcgagggacccggtgccttggtacaggtccaggctgagctgctccaggctcagcttctcctgcagaaagtggcccaggtacctctgcaggaggtaccggcaggccctcttcttgatggactccgaaaacggccaaggcatagtgactgctggcagctgggctgactgcggctgcgggttgcgacggctccggcctcggggtagcgactccggctccaggccgcggcggggcctaagcctggggcggcccctccatccctatttggtgccgggagtccctcagggagaccccatcgccggcgccgcaccgctcgcgctgggcctggcggaggcaagacgcagaggggtcctcctggccccaggccaggggacttccgaggagggtcccaaccggctcggagagagtgcaagagagcgcgagaggaggcggcaggggctgaggcagccaccgccactgccgccgcgcgacgaatttgttgtcatccgcgaggcgcgttcccggctgtagggacgctcctggcgcgttcacgagacccagactcccggcgcgccgccgggcgctggcggaagtgacgccacactggggccgcggaaggcgggcagaagggcgggggctggagcagttccggctccgagggggcggggcggaagaaggcggggagggagggggcggcaccgccggtcggctccagtcgcctccggaggaaggaagaagaggacgccgggcgcgcaggtgagcggcagccggggtggctgcgggcgaggggcggcccccgagaagggctaggggctcggggcgccggcgggccgtcaggccttccggatggggacgcgacgccatgcagctggctgggccgagag

SEQ ID NO: 13017 - DNA, 2300 bp, Homo sapien
agcaaacttgttagaaacagattaaacaacactctaacacatttctctgagccgtgtcacactcgggtccaaacaattcccaaggagggactgactgtcaccaatcttggatggcactggttcaaagcgccctaaagaggggagcgagccccgcccggctcgccgccggcagctcttacccatttgtccaaggggacctgggcgagggacccggtgccttggtacaggtccaggctgagctgctccaggctcagcttctcctgcagaaagtggcccaggtacctctgcaggaggtaccggcaggccctcttcttgatggactccgaaaacggccaaggcatagtgactgctggcagctgggctgactgcggctgcgggttgcgacggctccggcctcggggtagcgactccggctccaggccgcggcggggcctaagcctggggcggcccctccatccctatttggtgccgggagtccctcagggagaccccatcgccggcgccgcaccgctcgcgctgggcctggcggaggcaagacgcagaggggtcctcctggccccaggccaggggacttccgaggagggtcccaaccggctcggagagagtgcaagagagcgcgagaggaggcggcaggggctgaggcagccaccgccactgccgccgcgcgacgaatttgttgtcatccgcgaggcgcgttcccggctgtagggacgctcctggcgcgttcacgagacccagactcccggcgcgccgccgggcgctggcggaagtgacgccacactggggccgcggaaggcgggcagaagggcgggggctggagcagttccggctccgagggggcggggcggaagaaggcggggagggagggggcggcaccgccggtcggctccagtcgcctccggaggaaggaagaagaggacgccgggcgcgcaggtgagcggcagccggggtggctgcgggcgaggggcggcccccgagaagggctaggggctcggggcgccggcgggccgtcaggccttccggatggggacgcgacgccatgcagctggctgggccgagaggggcggcaggctgcaggggccccgcgcccgtgttaagaggggtctgggggccggtctggccggcctggctctcccggctcccctcagacctcggcgccccggaaacgcacacttggggctccgccgtctccgctgggaggactggagcccttctcgagcatccccgcccgcacccgagcattgaccggtgcccattgtcagcaagttcttcggcccccgcctcattcaggtattgtttctgaggcagcttcttcgttgccgtttgcctggcggtttgcagagcgcttctcgcatacgctcgcttaatcctgggtgtgtcatagcaacgatcaggaaacttgggttttcgaagcatctgtgggcaaaactgcattccttgagaaatgctaaaggctcctgaccccgccggaacctgggtgaagaacttgggctgttctggcagtctgcgcaatcgtatttctgccttttgggaggtaactcctgcagaggcggagccggctgttaagttaagtcaacctcgaaaggcctgggtgcgggtgttctatggcccagaagccagatgtccttcgttagaatcccggcactgacacctattagccgcccagccactttgagcggccactgccctccccgagcccacgttgcctcctttgccgagtgtgagcggattaaaatcttatgtgcatggatttgttgggaagattaaatgatatgagtagggcacgaacctgaacagagtcctgaaacatacagctgtttaatcacagtgaattaagacgaccagtttaaggagtgaaatgtttactgtctcggcaactttcatgaatgccttggaaatacagcccaaaatattggtagatggagaaacatctggttcccctttccacaaccaccttttcgttttagaaccagggtactttgtatgcagttgcttggattgttgatttccctcattctttgtagactcatctcaagtattctcagtaacttagattcccttgctcttcattcagaaatatttgttaaggtccattaaatgaaagtcaccacagttgatcatgtgaacagtgtcaagaatcaggccgaaccttcaaggagtttatgttctaaaacggaagcatggtggtacctgcttgtggaggctgaggcggaaggatcgcttgagcccaggactttgaggctgcataattgcattgacgctatccatagagtgcctgcaatttcaaatatcagaaagga

SEQ ID NO: 13018 - DNA, 2300 bp, Homo sapien
cactcactcttgatgttccctaaattcatcaagcattctcccgtgacagggcgttgcacttgctgttccccttgcatggaaaacaactcttccaggtatacatgtgcctcacttcccagctttctccaagtttctgctaaaatgtaatcttattaaacaagagaatttctcttaccatctcatataaaaatggcaagtcccttctctcttccccatctccactccctttacattgctttcgtttttccaacagcccttatcaccacaaagcatattattcactcatttattgtatgtctcctcccttcaataaaatgtaagttccaggaaggaagagatttatctgttcactgctgtaatcccagtacctagaacagtgcttggcacacagaaggcaatcaataaatatttactgaataaatgaacaaacttccactttattgagagaaagggtcttgctctgtggttcaggctggagtgcagtggcatgatcatagctcgtacgatcctttctgatatttgaaattgcaggcactctatggatagcgtcaatgcaattatgcagcctcaaagtcctgggctcaagcgatccttccgcctcagcctccacaagcaggtaccaccatgcttccgttttagaacataaactccttgaaggttcggcctgattcttgacactgttcacatgatcaactgtggtgactttcatttaatggaccttaacaaatatttctgaatgaagagcaagggaatctaagttactgagaatacttgagatgagtctacaaagaatgagggaaatcaacaatccaagcaactgcatacaaagtaccctggttctaaaacgaaaaggtggttgtggaaaggggaaccagatgtttctccatctaccaatattttgggctgtatttccaaggcattcatgaaagttgccgagacagtaaacatttcactccttaaactggtcgtcttaattcactgtgattaaacagctgtatgtttcaggactctgttcaggttcgtgccctactcatatcatttaatcttcccaacaaatccatgcacataagattttaatccgctcacactcggcaaaggaggcaacgtgggctcggggagggcagtggccgctcaaagtggctgggcggctaataggtgtcagtgccgggattctaacgaaggacatctggcttctgggccatagaacacccgcacccaggcctttcgaggttgacttaacttaacagccggctccgcctctgcaggagttacctcccaaaaggcagaaatacgattgcgcagactgccagaacagcccaagttcttcacccaggttccggcggggtcaggagcctttagcatttctcaaggaatgcagttttgcccacagatgcttcgaaaacccaagtttcctgatcgttgctatgacacacccaggattaagcgagcgtatgcgagaagcgctctgcaaaccgccaggcaaacggcaacgaagaagctgcctcagaaacaatacctgaatgaggcgggggccgaagaacttgctgacaatgggcaccggtcaatgctcgggtgcgggcggggatgctcgagaagggctccagtcctcccagcggagacggcggagccccaagtgtgcgtttccggggcgccgaggtctgaggggagccgggagagccaggccggccagaccggcccccagacccctcttaacacgggcgcggggcccctgcagcctgccgcccctctcggcccagccagctgcatggcgtcgcgtccccatccggaaggcctgacggcccgccggcgccccgagcccctagcccttctcgggggccgcccctcgcccgcagccaccccggctgccgctcacctgcgcgcccggcgtcctcttcttccttcctccggaggcgactggagccgaccggcggtgccgccccctccctccccgccttcttccgccccgccccctcggagccggaactgctccagcccccgcccttctgcccgccttccgcggccccagtgtggcgtcacttccgccagcgcccggcggcgcgccgggagtctgggtctcgtgaacgcgccaggagcgtccctacagccgggaacgcgcctcgcggatgacaacaaattcgtcgcgcggcggcagtggcggtggctgcctcagcccctgccgcctcctctcgcgctctcttgcactctctccgagccggttgggaccctcctcggaagtcccctggcctggggccaggaggacccctctgcgtcttgcctccgccaggcccagcgcgagcggt

SEQ ID NO: 13019 - DNA, 2300 bp, Homo sapien
ataagtgcttataataaggtgtctgctcaaaatatttttaccttctggggtacataatccaaagtgtggaagctgcttctcaagtgtcggtcaacatagcaacctagctgctcactgctctgcctctgtaactcctgtcatcaccagctaactgacttcatggtttttggctcttttcaaactccttgagagagcatctgattagctagaccaccatccggaagtagttggacaaagctcttgacttgggacataaataaaccccttgccaaccttgagatggtgcctttaattggaatacccatccccagtacatgttgctatgatgatgctggaattaaaatacaaagcatgaaacctatgattcagaaacctttccagagaaggcaatgggcttggcaagtactctaggcttccttttaagagaagcatgtaaactgcttagcaccttatgttgcccatcaaatgtgttcactgaaaataaattatggccaagcgcagtggctcacacctgtaatcccagcattgtgggagaccaaggcaggaggattgctggatcccaggagttcaagactagcctgggtaaacataggaagaccctgtctctccaaaaaatagaatcacccggacctgatggcacccacctgcagtcccaactacttgggaggttgaggtgggaggatcatttgagcctgagattgtgccactgcactatggcctaggtgacagcaagatcctgcctcataaataaataactctccaaaaaaaaaggaagagcagaaaaagaagtcatttgaatgtttttattatgttaaagattgaggaaggtaccataagctaaggaattcagatggcctctagaagtgagaaaaggtaaggaaacagattccttcctgaagcctctagaaggaatacagacctgctgacatcttgcttttagacttctcatctccagaactgtaagagaataagtgtgtgctatttgaagccactaatttggtaatttattatagtagcaataggacactaattgatatccaaagattttggatatttatctataaagcttttattaagcactttctacatggcaggcacaaaaatattcatcatgatcacccgagctccattttctaaacctttttaccttcatagggctgttatagagctaaatcaatcactgcctttcattatgggtagactcctaaatccaatagaatgctttctgttgcccgtaagataataggaatttgttggctccgataactgaaaagtgcaaatcctgggaaaccagcatgggctctggccacatttctctgtgaatctcttggctctgtttttttctgttgtcagcatcatgcttgggctagtggccccatctcaacatggctacttggaacagcttgagctgtgtgctgtgactgaactaatctgattaaagtgaccaagaagtccgggcgcagtggttcatgcctgtaatcccagcactttgggaggctgaggcgggtggattgcttgaggtcgggagttcaagacaagcctggccaacatggtgaaaccttgtcttgactaaaaatacaaaaattagccgggtctgtaatcccagctactcgggaggctgaggcgggagaatcacttgaagccgggaggcagaggttgcagtgagccgagatcatgtcactgcactccagcctgggcaacagagcgagactctgtctcaaaaaagtaaagtgaccaggaagaatttcatgtattaattagtttgaagagtctgtatctggggattggagtcaatctcagccaaattgcttggttactttacttagtacgggaagggagcattatggttgcccttggaaaatatgggtggtcataggcagggaaaaggatattggtaaataatcaagaacctgcttcaaccaacaaaaaacaagttgtaatcataccttaaaataatagctaaaaatgttatttatgtaatgctccattactttaatttatatgtatcatcaaaagttctaaattgtatgttattcaaagacatttcagggaaagtgtcttaaaagttcagtcttaggaaaggtgtcttcctcttttttgcagctcggtgctgattatcacaactgtttggtgacctacttcactgacctgtgaggattccttcccttcaggtactggattcttgatctttctgcatcatcaaggtcctaattgcaatgaattacactcttgcttaaaaaaaagctttataaatgtaaaactttctcatataaacatctttttatgtaatgatcattatt

SEQ ID NO: 13020 - DNA, 2300 bp, Homo sapien
ggatagagcaagactccatctcaaaaaaataataaatttggtatgagcaaactgttcccaaattgagttggcaaaacttcaaagcgttagtttatcaaaacaagttttaatgagagttgcatgtatagaaaagaaaatggggtggggacagaaaaacgaaatataaaggctcccatctgtacaagtgtgccttagccttgcaggaaaaaaaagcaataatttcacctttggcgaccacttcagaaaatgcttcacatatgtcttatttaatcctaacagccttgttaggctggtggtatcactcctattttacagacaatttaacagcatagggaaagttaaaagattggtcccagcctcccacaaatcactggagagctgaaactcaaagccaagtctcatgagtgcctgaaagcccagagcctccaagctgtctgaagatgttgggccacctccgttttttgaaacaaccagtattttttaaaaagaagaaggccaggtggggtgcctcacacctgtaaatcacagcactttgagaggccgaggcgggtggatcacttgaggccagaagttcaagaccagcgtgaccaacatgctgaaaacctgtctctactaaaaatacaaaaattagccgggaacggtggtaggcgcctgtagtcccagctacttcgaaggctgaggcaggagaatcgcttgaacccgggaggcgaggttgcagtgagctgagattatgccattgcactccagtctgggtgacagagcgagactccatctcaaaaaaataaattaaaaataaaaagaacaagaacgctggcgtggtggctcatgcctgtaataccagcactttgggaggacgaggcaggagagtttcttgagctccggagttagagactagcctgggcaacaaacatagtgagaccctgtctctattaaaaataataaaaagaacgagaagaaaccacgcacacacaattgctgcaagtgttaaatatttgcatttaaggagttaatgcttaaggcatgaaaacagttcaatatgatcaggctattccaagggaactgcgtattcttagtccaccacaacctttatggtccagtgatcaccgaggtgaatgttatcttttaatttgtggatttatctcagcaactgcatgtataatctcttgtggaacggtcaagtctaaatttcttcccttggtgaatgtgagcgaatcccgggcgcctacgggctctggtcgcccccagccgacaccaggggtcttcccggaacgtgcgtctggaaacaacccccaagggagctgagccggcggaccaagccgcacctgccgcaaggcgggaccacgctagcgtcgctcgggtgttcgggagcccgaaactccatggcaacagcttttcttcgcagctgaggcttacgtcccgtcgccccggccagaccaccccatgggagcgtgctgagtaactcccacgtgtcggggagaggcctaggctgtgggccattccctcttcttcagaattctcattatttttagtcatcgggtcaagcggacacagggatgtgtttccagactttccgaacaatggagattaaaaaggcacagcaatcacatggccccccgggacagacgcccagggagcttcggaaagaaaccatgcactgcccaagggctcccagtgggcagcaagccagggtgagacccgggctgcacgcgcggcgccgcggaaagcactcgcagggacatccgcctggcgcccagcagccgacagcgcgcgcagttgcgagccctgagccccgcttcgcccggcgcgccccgcccagcccactgcactacacaccccgccctgcccggcatgccccgcccaaccccccggcacgactcgccccgccctacccggcacgccccgcccagcgaccggcacagcctgccccgtcccgcctggcacgccctgattagcgccgggcacgacacgcaccgccccgcccggcactccctgcttcgcccacgacacgcccctccccgcccggcaaactgcccggagccaaggccccgcccccagagagaacctgccccgcctccctggcccgggccccgcctccttggcaagcgagtggcgctttcaccttagcaaccagcgcggctcccaccatggctgaagaagaggaaactgctgctctcacggagaaggttatccggacccagagggtgtttataaacctgttggattcctacagcagcggaaacatcgggaaggtgagcggcggcggcggcccagagcctcacgccagctctcagctcccagcc

SEQ ID NO: 13021 - DNA, 2300 bp, Homo sapien
ctcccgagctcaaggaatcctctgcctcccaaagtgctgggattacaggtgtgagtgagccactgtgccaggccccagggcatatctttacaagctgctttgaagtccatagccttaatacattattgaattatctggatctcagattttcagtcttttagggacaactatgctactgggtctccagccaaagccaccttgatgacaagaggaaaagagactaaatggaagaaatgacaatcaaatataagtctgtttgcagatcagcactatttaatggaaatgaaggccacatatataacttaaaattttctagtggtcacatttaaaaaaacaggtaaaattaattttaatagtatattttcttttttttttttttgagacaggatctcgttctgtcaacgcaggctggagtgcagtagtgagatgacgactcacggcagcctccacctcccactccagggatcctcctacctcagtctccggagtaactgggaccacaggcaggaactaccatgcccagctaatttttttttcttttttctttttttttttttttttttaactttttgtatagacgggggtttccctatattgcccaggctggtctctaactcctgcccaagcgatcctcccacctcagcctcctaaagtgctggatcacaggtgtgagacaccgtgcccggcttacattttctttactgcaatatatccaaaatatttcaacgtgcaatcaatataaaaagtgatcagtgaggtatttcacattcgtcgaactgacacccgtgcgtattttgcacttccagtgcctcctaaacgaactagcctcatttcaagtgctcagtggccctaagtggccaaggggctacactaatggacagggcaggtctaggtcctgtgtttttcccattcggagtcaccagtcctactagacattctgtgaaaaaagggaaagcctttgtgaaacttcctgaggactcacaaatgcacattattacatttagagtttagaactttggttaaggcagcgtcctgtatttgattctttccctcttcctctccgctaaccccctatgtgacaccgtagaacttataattcgttctaattcgcagatggagggcatatgagagaggaggctctgcctcaaacactttctcaaacttttgccgaggggtggcgagaaggtagacttccaggtcccacccgatatagattaagggctggaaacacagtcaaggggaaattatgaccaagacaacctttgctaaaatgccagcggtgactgccattgatgttcctataaaaggtcagctctgtcaggaagttccagtgcatcatttgttcaaaagtaaaatcagcccgtgttccagaattcgcggactgtcgtcagtcctaacctacacatttattcgttcaacaaatatttcagcgcctgggtcaggcatcaggaatacactggtggttaaaacagacggaaagctccatctggtgggacgcagtctgggagggaaagggagtcctggggacatgttttcgtcggctctaggctaagcacctctcgccgtagcacacggggtcggcaccgctgcccggcgaagtacttgttactttgcagtccagtacgaagcggcggagtaaccggttccaacccaaggcagcgactcatgcgagtcgttctaagcgccgcgctggggggtacatacggtgcacgcgtgggtgcctcaccccctggcagcgcctccagggacgctgctccgggaaagagcagccgccgcgacctcaggcggcgggaaaggtgggacctcacaatgcgccggaagcggtgcctcgtggcttgggatctctccgggttcttccttgcgccgtccacgccgcactgcccacgagggcgtccccgcccgagggacaactcaccgcccggggcctccctgagcgttcccttccaccatctgacacccactgctaagtgtgagaggacccagggggtaattgccgggccgcaggcggccttaggaactccgcttcccgtgaggcttcgcggcggacggcgctggtgcgcaggcgcacgcacggcgtgcgtggtggcgtcagcagttctagaacgttgctgtggtagcgctcgggcgccatgttaggacgaaggggaaggaggagaagcgcttaaagcggcgggagcggtgcgggagaggggttggacccagggctgaggcaggcccccccctccctcccgcctcagtggatcatgcccagggcggcagcggcggcggttgcgggggggaagtgactgggcggtgccggc

SEQ ID NO: 13022 - DNA, 2300 bp, Homo sapien
ccggagtaactgggaccacaggcaggaactaccatgcccagctaatttttttttcttttttctttttttttttttttttttaactttttgtatagacgggggtttccctatattgcccaggctggtctctaactcctgcccaagcgatcctcccacctcagcctcctaaagtgctggatcacaggtgtgagacaccgtgcccggcttacattttctttactgcaatatatccaaaatatttcaacgtgcaatcaatataaaaagtgatcagtgaggtatttcacattcgtcgaactgacacccgtgcgtattttgcacttccagtgcctcctaaacgaactagcctcatttcaagtgctcagtggccctaagtggccaaggggctacactaatggacagggcaggtctaggtcctgtgtttttcccattcggagtcaccagtcctactagacattctgtgaaaaaagggaaagcctttgtgaaacttcctgaggactcacaaatgcacattattacatttagagtttagaactttggttaaggcagcgtcctgtatttgattctttccctcttcctctccgctaaccccctatgtgacaccgtagaacttataattcgttctaattcgcagatggagggcatatgagagaggaggctctgcctcaaacactttctcaaacttttgccgaggggtggcgagaaggtagacttccaggtcccacccgatatagattaagggctggaaacacagtcaaggggaaattatgaccaagacaacctttgctaaaatgccagcggtgactgccattgatgttcctataaaaggtcagctctgtcaggaagttccagtgcatcatttgttcaaaagtaaaatcagcccgtgttccagaattcgcggactgtcgtcagtcctaacctacacatttattcgttcaacaaatatttcagcgcctgggtcaggcatcaggaatacactggtggttaaaacagacggaaagctccatctggtgggacgcagtctgggagggaaagggagtcctggggacatgttttcgtcggctctaggctaagcacctctcgccgtagcacacggggtcggcaccgctgcccggcgaagtacttgttactttgcagtccagtacgaagcggcggagtaaccggttccaacccaaggcagcgactcatgcgagtcgttctaagcgccgcgctggggggtacatacggtgcacgcgtgggtgcctcaccccctggcagcgcctccagggacgctgctccgggaaagagcagccgccgcgacctcaggcggcgggaaaggtgggacctcacaatgcgccggaagcggtgcctcgtggcttgggatctctccgggttcttccttgcgccgtccacgccgcactgcccacgagggcgtccccgcccgagggacaactcaccgcccggggcctccctgagcgttcccttccaccatctgacacccactgctaagtgtgagaggacccagggggtaattgccgggccgcaggcggccttaggaactccgcttcccgtgaggcttcgcggcggacggcgctggtgcgcaggcgcacgcacggcgtgcgtggtggcgtcagcagttctagaacgttgctgtggtagcgctcgggcgccatgttaggacgaaggggaaggaggagaagcgcttaaagcggcgggagcggtgcgggagaggggttggacccagggctgaggcaggcccccccctccctcccgcctcagtggatcatgcccagggcggcagcggcggcggttgcgggggggaagtgactgggcggtgccggcgccggagacgatgccgttgtaagtaatttgtattctgttttctttcgctcgccggctgggccttggggggcgtccgggaaggggaagaggtaggcggagagggtggcacgcgagcccgaccctccccgctggtaggaggcaggcaggactggggaccttcctgtttcctcgctcgctcgccgccgcacttccccccgtgtgctgggttcccgcgtcccccgacccttcctggctgggtcagctgccgtcgggccgggggccttccccttccggaattgctggcggaacctctaactcgcccggccactccagcttctccgccccgtccacaaagaaaatcaaaacaacccgaaaacaaaacattgcctggtggtggggaaccacgaccctgctgcacgcgggatcagcacttggggttcgggctcgctctcggcgcccctcgggcccattcgatgttgcttttctgttcctggtctgtctca

SEQ ID NO: 13023 - DNA, 2300 bp, Homo sapien
cccgtcttccattttacacacttgaactaactcgcgaagaatttgaaatacctaaggtctttcacagaaatgtataccttccctcttcaaagaatgttgggggaaagtaggtataaaagtacttttaattcctagaaataagacacaaattacttaatgttatttcttcattgaagccttttaaggtttacatctatcatttttaatgctggtatgattatcagaaaaagaagtcccttttcaaagacagcaaaatgttaacttaataacgcagtcatcacgacatcactgcaaacatttatctcctattgaactgagaaacaccacaacaatcttgcttagactcagttctcctagggtctcttattctatgaaagggaaaaatcaataaacagaaaccatgcagattccaagattttagacctgtatagttagttaagtctaacaaacgttttcatcacagaagtaatgtgatagacttcttaataacctaagggggtgggtgggagccatggaaaatccttttaaaatacataaattgcgatagaagtcattaaggtctgtgccaaagttagagtctcacctgtaaagaaacacattcacacacatatataattgtaaaactacaatcggtgattatgtgctaaagaaattatccttacttacaaaaaaaaaatagacctgagttactacattcgatgtctagaaaccacaaaaatctttatcctgaatttaaccaaaactttgagtgtcaattacatgttgcgttttgaggctactaagatgaagaaaactcggtccctggtctcaaagaggcactcttacgcttcaatattcaaaaatggaagaaatgcagtctcactatttaggcctctacaatgctgtatatttgcaggaaaaaaaaaatccgtaatctactggcaatgagctgccaaattatatctcattatcagaaagggggaggggagaaaaaaactttttaaaaacccaccaagaaaagaaaaaggcgcagtggcattagaaagcataaagagactagcttcaagccttacaaccaggaaaaaaaaagtatcaccagagatagagaaagaaggaaacagaatgaaacctggttaccccatcaaaacaaaacagggaaagcaatacataagtcgttttggaggagggcaccctgtgaagtgcccccttctccgaccgcctgtgaatgctagggaggcggaggtggaggcaggcggactcaacgctcaaagctgggcttttaactcgtgctcctacattcagacaaggtcagtggaaaggggctaactccggcgcacaagacaggcatctggaaatgggaggaagagagtgagcaaactgagacagaccaggaacagaaaagcaacatcgaatgggcccgaggggcgccgagagcgagcccgaaccccaagtgctgatcccgcgtgcagcagggtcgtggttccccaccaccaggcaatgttttgttttcgggttgttttgattttctttgtggacggggcggagaagctggagtggccgggcgagttagaggttccgccagcaattccggaaggggaaggcccccggcccgacggcagctgacccagccaggaagggtcgggggacgcgggaacccagcacacggggggaagtgcggcggcgagcgagcgaggaaacaggaaggtccccagtcctgcctgcctcctaccagcggggagggtcgggctcgcgtgccaccctctccgcctacctcttccccttcccggacgccccccaaggcccagccggcgagcgaaagaaaacagaatacaaattacttacaacggcatcgtctccggcgccggcaccgcccagtcacttcccccccgcaaccgccgccgctgccgccctgggcatgatccactgaggcgggagggaggggggggcctgcctcagccctgggtccaacccctctcccgcaccgctcccgccgctttaagcgcttctcctccttccccttcgtcctaacatggcgcccgagcgctaccacagcaacgttctagaactgctgacgccaccacgcacgccgtgcgtgcgcctgcgcaccagcgccgtccgccgcgaagcctcacgggaagcggagttcctaaggccgcctgcggcccggcaattaccccctgggtcctctcacacttagcagtgggtgtcagatggtggaagggaacgctcagggaggccccgggcggtgagttgtccctcgggcggggacgccctcgtgggcagtgcggcgtggacggcgcaaggaagaacccggagagatc

SEQ ID NO: 13024 - DNA, 2300 bp, Homo sapien
tgcagtaagccgagattgcgcccgttgcactgcagcctgggtgacagagcgagactctgtctcagaaaaaaaaaaaaaaaaattacacacataacttgtctattagtgtctatagtgatggttaaatatgctcttaaaaaacaggagtctctgactgtttagaacttggctttagggtttttttggagtatgaaataacacttcattttatgtcctttttcttttttttgagaggaaggggggtggtcttttacatgttttggtactgaatagatattttattatactgaggagttaggtaaaaggaaatattgactaaacacttcataaaattgtttttgtttggacagaccttgtcattcttacgagcagggccattgaatactaaaccgtaaagcttgggactttacactagtgccagggccaggaaggcagtttttgaatgctttctccctcttcctgatgatgctactctttctgagtaagaaaagaaaatttagttgtttctaaattacttcactaaagccttttggaaatctaaaaaactaagcaattatttaccaatattggctttttcttctctgctctgctgtccctttccccttcccgttccccttccccttcccttcttcccctcttccccttccccttctctttttttgagacagggtctgactgtcgcccaggctagagtgcagtggcgtgatcatggctcacgtagccttgacctgtaggactcaagcaatcctcccaccttagccacctgattagctgggactatatgtgcatgccaccatgcccagctaatttttaaaacattttttgtagagacggggtttcacatgttgccgaagctggtctcaatctgggctcaagcaattggcccgtctcaccctcccaaagtgttgggattataggcgtgagccactgtgtgtggctactattggctttcaagtcacttttgatatgataaaaaaaatactctaatatgttgtgggatatttggtaaaaatcgttgaatataatctttttctttaaagcaatcagaatatgtttttattatactctaaattggtgattcattttatatacagcatctttgtcatgaataaagtccccgattctaacgtgctcctgtgggattacatgatcttctcaatcacagtcttctttatagtagtttctagaaatagggcaagaatctaacaataaagaataaacctctttaaaagttgaaaatggtttgaatttcaaatatgattgatctgaggggctggtattttttaagaacttttatagactttgaataccctttatataaatttacactgtaatctttcttggatccactccctcaccccagtatagtatcatttgaatagtttcccttgtgctccactggcaaaataaccattttttgtttcaacagaatcttccacaatctgtaattgaaaatgttggaggaaaaatttttacatttggatcttacagattaggagtgcatacaaaaggtaagtattatttcatttttcttagaaagggaccctttagttcttaaaaattatgacatacccgtctcagttacttgtgtatcatatagcttaggcttgcatggaagagagagtgctttgaggagtctaaatttttcagtaagaaagatgtaaaataatgctgacttctatatcgccactgtccaaaagtattattaagattaaatgaaattagcttagtgtggtgactcatatctgtaatcctagaactttgggaggccgaggcaggtggattgcttgagcccagggaggtcaaggctgcagtgagctgtgattgcattgctacacttcagcctgggtgacagaacaagaccccgtctcaagaaaaagtaaataaataaattaaaaactcagagtttcagtagaggtagccacattttatctgttcagtagccacatatggctagtcgttactgcattggaaagtacagatacagagtagtttttctgttggagagctcttttgtacagtgctgctatctacatatatatcattttccctcaccagaagaatatcactctggaaatagaacaaaaatgaattctagcttttaagaaaactcatggatgccccccgctaatacctttatagacaaattataaaatatagctaagcaaaagcaaaccccaaaaatgtgtattcatagccaatgataatcagttaatagtttatacttgtagttatttcctctatgcaaataaatacacaataaaaatgttacctcggcaaagaacatttattgagcttct

SEQ ID NO: 13025 - DNA, 2300 bp, Homo sapien
tcagtaagaagttatgttgaactctaggattcaaaactttgaattgccagcaaaaccgtgtccaaatggattgtatgttttccctttataaataaagaacattgtatatcatttaaggttttgttgaagactaaggtggttattaagaatttccattttaataatgtgttgtaagagtgatttagagactgcgggagttttgtccctgcccttagatggacccagacagctttgtgtttttgtgtacatgcctgatttctatacttcattgtctcctgttacaagtcactgtactttcgtgagagagctctttctgcatgttctttacctttttttttttttttaaccagttagccatttttaatgttttagggacctagaaatcaggttactgagcttgttaggattttgtttgatttaagagcatttggaactccgagtatgggtttttctacacataaaatacatgattttttaatgcttttatatgacttttgttgatttatttgggccatctgtgcttgctcatgtatttgacatattccaaataatgctgagcaaattaaactggtaaaggaagtattggtttgtaggagtttggactgcatattcacatatccctatataccttgttttttatatatctatctctgttaccttgagtttatagacttcaagttaactccattgaactttacaatacctctgccagtaaaatgtgtactattatcccattttacagatgatgtacacaagacttagaattgcctaggattacatagctgtgaagaattaaaaccatttttcttttttttgttttgagacggagtctcgctctgttgcccaggctggaatgcagtggtgcgatgatctcggctcactgcaagctccgcctcctgggttcatgccattctcctgcctcagcctcctgaatagctgggactataggtgctcaccaccatgcccggctaattttttgtatttttagtagagacggagtttcactgtgttagccaggatggtctcatctcctgaccttgtgatccgcccgcctcggcctcacagagtgctgggattacaggcgtgagccaccacacccggctgaaaccatgtttcaaatacatttttttaaaataagtttggtagtttttctctgggtctaggtcagatttttgctcttggttagaaactatacttataaaatgtgttagaaagtattaggaaggttttagacttttcaaagagtaaaataattttaaaattgtggttatactgctacttttgaaactagtgtcagtactagatgatgtcagtttgctttttggggtagagattctggtgtgaaatttggcccccagcacttctaaaatgggtactgtagaagagtatattggattgaacttttttagtcgtaggaaactgaatcattgtagttacattttagttgtaaatagtttgttttaaaaagacttcattatttatttgatcatgatgctattttctgaagtgaaaacttggcttttgtctaatatgaatgggattgagttttggataaaaatcagatttctttgttgctgtcatgttagtgattttttttttcttttttgattatagaaatgtatactcttaaaattgggaaaaaaatcacagggcctaactgcagtattcagtttaattttcactactatttcatttgaatttaaaagcatgatgtgtttgatactgtttttgaagttactgttgtagtatgtgtatttagtgataagtttttgtgtctaaagcaatggtgttttgattctattgaaacatttttgttataagtagattatattttagtgaacagctctttaattttataggcagagcactcaatcggtgtcattgagcaaaattattaatgcttatttatgcttcttgaattaagctgctttttggtaattattcataaagtcactgcctttttcagaagaattaaactcactagtagttagaaacatggaatttagcatatatgattttatgtgcatattgagattgtagtcccccttgctaaattgatgtggatctataactgtaaggaagcttattactttatggtttaatatccagcacaaagcgtgtaaataaaataaatagcatgttgtctttatcttcaaaggcattatattgtacttctagcaagtgcaccaacagaaaaacaacgcctggaatggtgagtataagaatagactttacagaaaaagcaaacttcaaaatgaatcacatagccactgaacacagtaggagatgggaggaagtcc

SEQ ID NO: 13026 - DNA, 2300 bp, Homo sapien
ctttgggaaaggtcctccaactactgaaatatgaaaccaggagtgggccaggggaggggagacgcgtgtcttgtgctagggctggatctgactcgctgtgagactttgggagtttttcctcactctgggctttggttctttcttctccaaagggtgtgggggaaaggagaagggctagcccgggctccaggaggcaaattggtcacatataggcaattggttcacagctacatttgaattggttgccaacctttagaaaccaggaaatgtcaggtcaagagctagctcaccacctttcttgaagaagaatatgtggccccttcacaccattaggctggagggaacatttccacttgtcaccgtccctacctgtcactcctctcagtgacactgcctgcctggccctgcaggccctgggtgtgggactcctagctcagtggctttcaaggacccagcatccagtcccaggggtctcattccctctgaggtgggcacccctataatcctcattttcagatgaggaaacagagtcacttgcagtttgagtgacttgccaaaggtcacacagctggtcagcagcagagacaagactccccctaggcttgtagactgtggggtcggttctcagttgctggaaaacagatcttgggattgagttcttccagcaacacaggtgtgcttcagcttaagaagttttgagaaaacttgatttatttttattgttattatggaaactttaaacatgtgctaagagtagacagactcatgtgatgaactcatgtgctcatcacccatttccaacaatttttatggccagttttgcttaatctgtgcacccgcaccccattatttaaaaacaaatgggcaccagacatcgtatcctttcatttgggaagattgtagtgtgtctctctaaagggagagggttctttttcaaagtataactgtaatattactgtattgtcacactctccccaataatagaaaatccttaattatgcagggcaatttcagtgtgaacttacaccgctgatatgtctagaaaggatggccatcatgcttgctttcagaacgagccagcagcaccccagctttggaatctgaagacttgggtttcagtcttggcttccttattttatttttattttattttattttattttattttattttattttatttattttatttattttaattttttggagaccgagtctcactctgtctctcaggctggagcgcagtggcgcgatcccaggtcactgcaatctctgcttcctgggttcaagcaattcttctgcctcagcctcccgagtagcagggattacaggcgcccgctaccacaccccgctaattttgtatatttagtagagacggggtttcaccatgttggccaggctgatctcgaactccctacctctggtgatccacccgccttggcctcccaaagtgctgggattacagtcgtgagctaccgcgcctggccagcttccttactttctagctgtgggacctcaggctggccactagatctctgagcctcagtttccttatctggaaaatgggaagaatcctaaaatttatccatctcaaaaggctcatgtgacagtcaagtgagaaggcgtacatgcaaggtatcctgtcaaattacacaaagtcgtgattttaatggaggaaagcaacataagtactgggtggtggagaaatacttttgggtctcatcttgctgagactaggtaggaagcagaataagaatagcccttcctaggcgcccaccggaatgctcagcgctgccgcacagagagtccgcatccgtgcctgccaccggcctaagttatacccggagctacgacgacttatgagatgggcgactctaggaccctcattttccagacgagaaaacggaggcacctgcaggttcagtgacttgcccaaggtcacgcacctggtcagcggcagagacaggactccccccgcccgggcccgcggattgccgggtcggttctcagtcaccgcacaggtgccctggagagtgcgaccaccccctgccctccgccccgcgccggccctcggctcagtgccccgcccttcctggagcacggcctgcgcatgcgcgcgccccagggcccagccctgttcctgctccggctcctgcggggatggatgcttcacgcagtaagcgagtaagcgagccctggagaccggggccctgggtgtgcggtcggctcagtgccacgcggtgagataggcatggttatcaacccacgccaaggcggttgtgtacctggcatagaaaacac

SEQ ID NO: 13027 - DNA, 2300 bp, Homo sapien
agttttcttaacatatgtgtgtatttgtgtgggtgtgggtgtgggtgtgtgtgtctttctctcagtggattctggccacagagtcttgctgggggattccacacccatgagatgtgtgaatcttgagacttttttgctgacagattttatcgagtgctcaccttgcccatgctctgttagggtctcaacaggaagcagatgacataattccaaatagggtaatttgaggaaggttatttgcaatgagactatttacaacggtgttgggggtaggaaccacgagggaggatgcagtaacttgtgggtcagcagcagccgtgatgtcatcacttccagacctgaggcacaaagggaagggctactaccgcaaactggagggagggccagggagcagtgaccttcagctgagggacctgccaactggaggtgaccttgccagtcaggatccaggggcttaacctactctaaccaacctttctttttcctccaatcttctgtggggttctccactgggcacgccccaaagccagggggcacagggagcgcgaagtaatttgtagaggtcagcctcctggggcagagggcaggcaggagaagtatttggagcagatgagggtatctggaggggaaaatgtaagacatcaggcacaatattgccctgtctaatggacagagtgattccaggttttgtagggactgaagctcacataattttgggggatctactttaagaaaaatcagctgggtgtggtggctcatgcctgtaattctagcactttgggaggctgaggcggggtggattgtttgagctcaggagttcaagaccagcctgggcaacatggtcaaaccctgtctctacaaaaaatacaaaaattagccagaagtggtggcctgtgcgtgtaatcccagctactcggagggttgaggtgggaggattgcttgagcccaggaggtcgtggctgcagtgaaccgagatcgcgccaatgcattgcagcctgggtgacaaagtgagactatatctttaaaaaaaagaaaaagaaaagtaaaatcgacaaataaacccccaaagctatgtaaactcattgagggacctgcgcaagtgaggtcctgaagcttacgcttcattggcttcattgttaatctccctctgcctgtgacttcagtgattttgacctagaacaatgacccagtgcccaataagctctcagcctcatgggtgatggagacttagctgattataataaacacaatgcggccgggcgcggtggctcacgcctgtaatcccagcacttggcgaggccaaggcgggcggatcacaaggtcaggagatcgagaccatcctggctaacacggtgaaaccccgtctctactaaaaacagaaaaaaattagctgggcgtgatggcgagcgcctgtagtcccagctactcgggaggctgaggcaggagaatggcgtgaacccgggagacggagcttgcagtgagccgagactgtgccactgtactccagcctgggcgacagagtgagactccgtctcaaaaaaataaataaataaaaataaataataaacacaatgcaaactgtggcatacgttgattacagatgaaacactatagatgattaggtagacattgagatatgctttgaaataggcttcgaaaaacaggtaggatttagacacatatcaatgagtgggcagaataatactaacactatctgctatttattgagcaccaactaagtttaaagtactgcctatagattatttcatttaatcctaacagaaacaggaaacttattttacacccaactctctgccaatacacttaataaatcaagctactacgaacaaggctgtaaaccacatttcctagaagaccagggagcagaaggacggggatctccctttgccgctaagagactccaactcccaggatgccttgggagcgctggaccacagctcccggcattcccggggaggcgcggggctagcgtagcctccgccccgcgcctcgcgttaccactcgtcccgcccctcctcgtcgcctccgagccaatgggaaggctccatactgcagggtgcgaaggggccggcgccgctgccgagttacgagtcggcgaaagcggcgggaagttcgtactgggcagaacgcgacgggtctgcggcttagggtagggaggccgcaggcgacacggctcgaggactcgcgcgccgagccgggggcgcggaggcgggcggccggggctggggccggcactgggccttccgggcggcctgtgggtccaccggggtgcgggagtc

SEQ ID NO: 13028 - DNA, 2300 bp, Homo sapien
gtgtgtgtgtgtgttggggggagggcagggaggtctggggggtggagcttatcactaatgccaccctctgggacaaatcacacagaacttgcaaggtggaaaacaacacacacacgtacacacaccctttcaagagttgtccaggcctatttttcttttactgtaccccaaactcccttgagccttttgttttatgaattgggcccttctattttacagccagcaccatttgcacttactgcagagctgtattatggccaaagactctttttatttttttttatttcttatagtcctggaacatggccccctggagaatgtcacttcacaaagcaatggccagtaaacttggctcatgcgtcagcgaaacacttccaacgaaagtgcatcaacttctgttcttacacattgtcgtctttcaccttaacaagcacaccccaaaaaaagtcctctggtttctacggcttgttaggtctatcatctttttaattaatagtgtttttacgaagccgtctgaactgtgtcatttccattatcagaaacgcattgccattaatgaataattttcatttctgatccctggtatcatgctagttgatctcctgtttccatgccttcaaatgatagcatcgttttctgcccacgatcaaatttaatttggactctgattatattatgctgttgcgactgaagtgtcaatttttgtcaggcaattaggagctataacctgtgaagttaagtttgataggcattgtaattggattgttacagtaatagcctggaacgttccttttcctcttgcttctttgattcttgatgcatactctcatcgtgagaacaaagacatttggttattatacaaccttaggatgtttgagacaacaagatcacaagttgaagtttttgcagtggagtgggcttcgatgtaactcgaagtgtgggacgttgaaagtttgagagatttggaaaaaattagaacaaagggaaagaagtatcacagaaagcattgtgtaagaagaagttaacaggtccccgaagttcacttcaagattccagataagttgcaaacaaagatgaatcacaaatagcttagagtcacctgagagttcctctcttcctccctccctccctcccttcctcactctctccctccttccctccttccttccttccttccctccttccttctttccttccttccttccttccttccttccttccttccttccttccttccttccttccttcctttcttccttccctctctccctctctcctttcctcctctcctcccattattcctttctccctccccctttcttttctttccctcatttctactaatttattgacactggactaaatacattaaatattgtcatggaaaagacaagccctctatcctcgtgtggttcatggtataataggggagagatggaaaatgtcacatcaacagaatgatgtgacgagatcctttaacagaatacctgcgtgtatcagcagattctcacttgaagaatgggagcttgcctgcaatggggaggagaggagaggagagtggtgcagtgtgtgggcacagcttttgcagagacctgggcacagcaaggatttggggccatgagggagtggcgagaagtgcagcaggatgggtgcctgtgatgcagcaggatgggcgcctgtgaagcctgtgatgcaggatgagcacctgtgatgcagcaggatgggcgcctgtgatgcctgtgatgcaggatgagcacctgtgttgcagcaggatgagcgcttgtgatgcctgtgatgcaggatgagcacctgtgttgcagcaggatgggctcctagctgcccgggtggcaggaggtggggctggaaggaagtggggcagatcacagggaagggggaagctggcccaggcatctggattttatcccaaagctcatgaatgttaaaaggcaggtccgagggtaccctggaggacttccatagcatctttatcaggcctgatgccatggcccctaaaactcatttgctttattgctacccgaataccctttacaaatgcaaatccgagcaatgagcacactgcctgcaaccctcagggatcccgactcttacagtgaagacagagctcttcaatacaccctgtggaaaggctggccaggtaagttactgttcaaatcaggaccatttgtgggagtgaagtgtgtgtgtgtgtgtgtgtgtgtgtgtgtgtgtgtgtgtgtgtgtgttggggggatggcagggatctttagggggtggagcttattactaatgcctcctctggg

SEQ ID NO: 13029 - DNA, 2300 bp, Homo sapien
gtggctcgtgtctgtgttatttttctgattgtctccatgcagggtcacagtaggattcacatggggtcacttaggctctgccctggccggcaaacactgcactcataggtcccctcctcagagctctccagccccaggacagattgggggtgatatcaggcaggaggactgtgctgggatgtgacccactgggaggcctccatgtgggacagagccagaggcagcacctgggccgtgacaccagtgcctggggacgtggtttgcctgggagccaggtggagctgatcctccttctggtgggtgctctgtgcctgaggcatagctgggctgcagggggtggaggactcctcattctgtcactgccactcacagggcctggagagctgtgtctgtttctggaacctctgaatcacagcctccttgggttcttctgaaggcacattgcaccttctagaagggtatgactcagaaggaaagagagaaaaacctctactggcaagaggaaatggctgcagtgtttactttatctgaaaatggcacacgcttttattaagacataaatgccagtgatggattctgctcttggcgtgtggctgtgctccccagccctgaggtgagatggtcaggagatgtgagaccctacagagaaaatatttaccatgctgagctgtcatgagacagagtaagtgggcagagggcagctggttcctttgaccacctcattctagggaaaataaacagggaccctggagcagtcactaacagaggggagcaagtatcctctctctgcagtagaatctctgaaaattcggataacgttaattgtgccactgtggtggcagtgcaagaaattcctgttcatcccgctgcaatgatgattaaggtaacaaacacccagtcgggaagtcaggctccggccctggagaatagttgaggatcgcctgtagcatattgttccactctgctggcatcctaactagacagctttagttttagcataaaatccatattccagacctttatggagcagagaggcaaactccaatgctgccgttgcaagcatcaaacagcattagaatgaattaaggagatttaagactctcgatgctgtcggggctcttctccatcccctctgttttctccaaggagctgttttaaaggcgtggggggcaaattggaagaagggagtgggaaaaacgcaaaccaatcacgctaacctcgctccggaatcgaagtctgactctgtaccacgcatggatttaattgggagagaggtcttttagagacactctgggtgggtgcatagatcagtctggagtttcacagtacggcttcttccaaggtcagagcatgtgtccagggtcttccccgcttcctggtggacgggaaggcgtcttcggtccggtggttgacaaaaaatccaaagagggcgtcagatgtgtgcactctggtgtttggaatttaagtaaaatctgtaattttcctcctgcatttcctcagagaaattagctattctattcactgcataaattttcaggttttgctagcacgacactcagggtgttgaattttttatgacaaaaatgctgtaataattgttgaacagatgtaagtgttggagactcggctctggcagacctcacgaaacctcgattagcaatttaaccctgtcctccctcctgtccgcacgccggggaagaggagttgcagttttgaatggcttcactgggatatgcacaaaggcagagaaagagttttctggagagcaggggaagtcctttaacgagctcttatgcccagccagaaaaggaagaactcggtgcagcctaaccctgaaattaccacattaccaagttgtctagctgggtgattaataaactaattgacacgggggacacttgtcactggcgaagcagctccctagccaaagcgaggagcaactacatagcgtctcccggggagctgggaagtgacagtctacacccgcttccgggctccccgtgacataggccagccgggcctccatttacacctcaaagcaaagtcacagagggatccgcccctttcctggctgcctacacagaaagcagccatgggagacttgccgaggactttgtccaccaagtgatgaaagcatgcaaatgcctccgaatcaaaggtaaatcaaaagaaaatggcagcccgcaagaggaggcggcggtgacagcccgtcagccgtacagccacccgacaggcctggtggcagcgtggaggctgccaagagaaccgcctgaggaggctgccgccaagacagatgtcac

SEQ ID NO: 13030 - DNA, 2300 bp, Homo sapien
gctatggcaatgagggagccagcgcaataaaacaagatcagttgctccacgagatttggaagcgttcatgtctccaaatgtcaggctgcgaatatttagatgccacaaatatttgctcaactcccataagctaaagaatgcactcctcacgaatctcattttagcattatttttattaaaatcacatttcaaccttgaaccatcaggacctttcccactagccggaaatgattggtgagccagatgctgggtatagagtgtcacgaggtttcaaatttgatgagagtgactcctctctggaagaatcgatggtgactcacaggctgggaggactgcgggagctggggaagtgggggtcatgctaccaggctgggtcccaagagcagcagaaccctagcaccgaggaaacacaaagggccaatctcagcattactgttgttaagagacataattcaagtattttacacaaatccaaaacaactttttgaaacttagactttttaatctcacagtgattcagtttaggacatgtagcctcattgcagaatcttttggaccacaggggacattatgacacaggctcatgtgtccataagggagtgtggtgtgctgatcaacatgaggagtgacagtcttgtggcagtgatgcaatcttgggcatggtggctcatgtctgtaatcctagcatgtggagaggctgaggtgggaggattgcttgaaaccaggagttcaagaccaacctaggcaacctaggcaacaaagaagacctctgtctctacaaaaattatacaacaataattagctggtcatggtggtgcatgcctgtgtcccagctactcaggagatctaggtgggaggactacttaagcccagaagtttgaggctgcattcagctatgatcatgccacttcactccagtctgagccatagaatgagactccatctcttaaaaacaaaaaccaaacaaaacatgtgagtagtgtgggcgctgctaactctttctacacaggtgacctcttcactaacaatgtacttatccccaagtgaaattagggtgattttgagacggagtctcactctgtcatcaggctggagtgcagtggtgcaaccttggctcactgcaatctccgcctcccaagttcaagcgattctcctgtctcagcctcccgagtagctgggattacaggcctgcaacaccacacccagctaatttttgtatttttagtggagatggggtttcaccatgttggccaggatggcctcgatcttctgacctcatgattcgcccaccttggcctcccaaagtgctgggattacaggtgtgagccaccacgcccggcctttccggtttttttaacgccacccagtttgtgaaactctgtatgacatccttagcaaagggatataggcatatactgaatgattaactgctaacagggaaggccttcattgggttgggaatccccaacattaacatgacaggtagtaaaagctccctctttaaaaggaccaggggagagtagagcttattgatcaggagctgagcttttgaaaccagactgcctgctttgtcttccttctctgcctctttctttctatgtgtctggtgcctcagtttcctgatctattcaatgggggacatgctaatatctaaagggttgcagggaagagtaaattatgtttcacaagtacccgcataatgcgtggcactagtaagcggtcaataaatgctagctctcattaccaagcttgtcttcctttgagtttttgcagtgaaaactgttctctgcttggtagaatttgcccgcaggcccccatgtgacagaggctcttacaaaagagtttgtttacatgcatcaagttaccaacattttccaagaaattagggtgttgaccaatacaatctcattgagatggggttatgagagtggtccctaattcagtatgactgtattcttatagaaagaagggaatttgaaggcagacacacacaggaaggggaacacatttagaagatagagatacagattagatttgtgcaatggcaagccaagaaataccaacggttgatgacgctatggtgtgaagatttgtctcctccaaaactcatgttgaaatgtaatccccaaggtagcagtatggagaggtagagccttgaagaggtgattggtctgccctcatgaatggattaatccattgatggatcaatgggttaatggattatcataggaggggaacgggtggctttatattaggaggaagagatacctgggctaacatgctccacttcctcatcatgt

SEQ ID NO: 13031 - DNA, 2300 bp, Homo sapien
tggggaaactgggtgtttgatttagcctgggtttgcccatccaggagttacaaatcatactgactaccacatggatttgttctgaaaattaataggctccagcggaaaagaaactatcactttagtgagggcatgaaccacgggacatataggtcatgcctctttcttgcttccttctcagcccttttttgtgaaatgatgttgagagagtagaagaagctacatcttggatcttgggacatttactgcaaagcacacagaattcagcaaccttactattgttaccacacatcataggagaggggaatagaaatgacaaagaaggcttggtggccaactggacctgagttttagttttatctcagccttaatagatgtaagacatggggtaggttgctctctgagcctcagttttctcttttgtaaaattgaactaataatacaaacatgaaagactattgtgagacttaggtgccaaaagggattcactcttggagcctgcagagggaaccaacccaatgacaacttgatttagcccccagagtctcatttaggaattctgacttctaggtcggaattattaagagaatacatttgtgatgttttaagccactaaggttgtggttaagttgttaacagcagacataggaaactaataccctttagaaaactacagaaggcctccttctcactgtggatttccatcatgcttacttggtgactggtgattttgttgagagcacccaagcgcccataaacatcttcttaggaccatggttcccactcaatgccatttgggcagcagggaggttgaccttgatacattgaatcacctgggtcagagttaactgcaatgatctcttgtcagctgtcatgtgaataaaagtgggttacagccctgtcagcattggggtggttacacaatggctcagagatgcacagagaggactggagaccctcacacagcctacagcttctctgctcagggagggggctcaaggtaagtgactgggcatgaaattgcagggttttcatcctaatctggtaccataaagttattcctgcaaattaacaactgctgatgggtctatgatgggcatccattgagatgttgaacctccttagagcccactagcatttctgtttttctaaggaagaaagcaagtgttagagaactttcctaacacacagagaacaagtctcagtgacttacctaaaggcatataggtgagatttgtaccaaagccctctgataataatccacccctttctgtgcaggtgacataatattgtctctagatgcagactcccagggttagaattcctgttcaccttctgtacaaggcatttttgttattcaagcctcaattgtgtctcctctaaaacagaggatggccagagtgagccccaaatcgactagtccatgtcacagtcaagcatggcatggagcttgtattaagtgccagataaacattagcttttatgagaaagttacttatttagggattaatatatatattccatctcactccaaatactggttttagggaatttttggaaattgttacccatgataaattgttttgaagaccctgcaagaactcatgttagttcgtctctctcagtagaatccacactacctttcaatcaaatcaagccttatgcttgatttatctagcatctagaaatctagatttctagatcttctagaaatcgtcttttccctgtcctgttctatcgcacctggctcatgcctctgtttaacactcccatcaacccttctacactccattgggatttaggtccatcctttccatttggtttcaaacacctttagatgaccaagtggatcttgttcagatttctgtgtttatttgggagttgtatcattcaacaaatgtatcattcagggttcagaaaagaaaacgaaaaccacactgcgtatttcaaatagacaggatttaacatgagaatttgacaaactaaaagagcaaacaggaaatcaatattacccagagataataaccaaatcattcacacaacaagcagtcactactgggagatcagagaacaagagagaagtgaggataccagagctgagactcaaaagagggcagagccctgcaaagaaggtcttatcagctgctgtttgtgggtctaagaagctgtgagaagtctggttctgggaatggagaaagaaggtagagatagagtcaattgctgctgctgctggagcaacactgaaaaggaataagaaacaccaagaataaagttctttttactcctcctaacttcctgtc

SEQ ID NO: 13032 - DNA, 2300 bp, Homo sapien
tcagagaatgagaccggcttcagcttgaccctttttgctccaggaaagcatgatgtggatcatatcttactttactctcatagaaatttgctgcttcctcatgtataaataactaatcatgagcagcagtgtgctccctgtcagagcctgatcaggaccatagaggcaagtgggactcagcctgggtcttcatggctgtgggagccattactgctctctgtattccaagtggaacagtcctggtgtaagggtcttgtttcagtgtctgtgagcatgaatgggtgtgcgtgtgtgcacacgtgcataagaagcttgtatcctttcttcttctagtgaaaggaaatcccctgtacctggggattgggggagatagtgaggtgttggggagcaagagagactacaggaaaagatgaggtgctgaggcccaccaacctgtttgtcctcaccctttccatctgctgaaaggtgcctattgggcgtagaattgtctccagcccacttcattggaccaggtcatcccagttagcctgactgtcctgtttgcaggtcaagtatagagggaattttgccacagtaaaacatgctctattttcaagtcatatgtgaagaaaaaataaatgaaggaaggatgaggaaaagaccaaatgctgccaagtgtccactacaagctctggttttctgcgggggccactgaaaggtgtacaaattgttcaccataagccaaggacacaaacatgtgtgtgcgtgtgtgtgtatgtatgtgtgtttgatgccttagcacagctcgtgtttgatgcttgtgatggttctatttataaactttgtgctctcagatgggacaaccagaggcacttctttcctgcatttcaagtgtttcatttcctttttaacatgtcttttaaattaagggcatgcacaccaatgcatgggctcactctcatcttacggcaagttgatcagactagggttagttgtctgagaaacatgggtggcctttgtcacaaacaagaggagaagcagttcagggaagaagaagactaaggactagcactgttgttttggtggagttgtttgttagctgactgtctacaaggcacatgttctatcgaatattcagtgttgggtgctgactgtgttacgagccttgtacataggatttaaaccccagagccactctgtgaggccagaattgctttgggatctttcagatgagggaaccaacgtgaaggctttaaatcctatgtccaaagccacacagcgaaaccagagtgaaatccggagcatttgaatcaagagttgaatcttctttcctccccggagggagaatcgcccaggggctgagtgcaaggggaaaggctggttctgaggggaagaagctgagcatgttgcggcacaggacttagaaaaatttagaagcatctgcaattgttttccaggggaagatacccaaaaacaatccagagaaggaaataaaacgagaagaatagtaaggcaacatggagtataaaagttgctgcatttagggcgaaggagagaacctctctgctccgtggcgatattaaagctatccccaagaacgggaggtgggagtggcctgagggatgactcctccagcactgctgcctgccagctccgggctgcacagggctgagccggcgccaagaatgccctcttctggtgatattctcgaagcccaggaagatagcaaggcagccgagacctgtgttttccagatcctgggtagattcccttgtcagatgtggttctacttaagcaaatatcactaccttctctttttcctcctcagccctcaaactagtgatagggaaattatttcaataaggtaagctgtaccttagtagagtttgcttccttttttttttttttaaccccgaataatactctctatgtcatctgtatatttatgatagctcaaagacatgggtgtgtggatctaattaaaaatgtgaaagggtttagcagcctgctgcttccctgcaactctctggttgccaaatcttggcagccgtgttgaacttgagccaagcgtttagtcctcagctgaactgctgccagcctgcgcacggcattgtggggcgagagccggaggggctgcactgcaccgagcttgcacagggcgaggcgggggcaggacctgggacccagccaccccggaggaaaccggagaggaaaccagcttggtcttgctctctgcctcgtcccaatccccggctcttaccaaatgcaggtaggaccagctaggccaatttggtgaccgggtagggcttcaagctactagg

SEQ ID NO: 13033 - DNA, 2300 bp, Homo sapien
tttatttattaatggctgtcaaaaaatttaaatcacctattaagtgctttttctggaaggcagagctatcgtcagtgtcttggcatcttcctgagcaagacaatcttcagagtccactgcctccaaataactctcctccccatttcattgttgtctaaaatttagctccagcttgtttttacattttatttttattaatcactattacatcatgtatcaaataatagactcaataaaaattatttactttcatttttagcatctaattcctttctcctgggttcatatttctttttgctaaagtacatccttcaggattggcaattttctggttaagggctagataataaatagtgcaagttttgccaaacatttggcatctgtcgcagcttctcagctctgcccttgtatcaggaaagcagccacaggcaacggggaagccagagggcatgcttatgttccaacagaactttacttattgacaccaaaatttgaattttatgtaactttcatttgtcagaaaatgttaatacttatttgatttcatttcaatcatttaaaaaattaaatccatttttaacccacagaccatacaaaaacaggtgctggctggatttggcccacgggccatggtttgacgatggctttaggttgtgttgttcttccagagagcgtctgtggtaatgtgctggtttgtctatgtctttaaatttctttattttatattatacttactcttggaaactacctggaatgagtaaagtatttatgacagaaaactgttttctctttgaatatattacttaattattcttctggcatctaatattcctgatgagaaaatgatgttaatgttcattttcattcctttgcagaaaatgtgtgtgtgtgtctgtgtgtatctgtgtgtgtttgtgcgtgtgtttctgtgtatgttgcgtgtgtctgtgtgtatctgtgtgtatctgtgtgtgtgtctgtgtgtagctgtgtttctgtgtgtatctgtgtgtgtgtatgtgtgtgtctgtgtgtatctgtgtgtgtctgtgtgtgtgtgtttgtgtgtgtatgtgtgtgtctgtatctgtgtgtgtatctatgtgtgtgtgtctgtgtgtatctgtgtgtgtgtgtctgtgtgtgtctgtgtgtatctgtgtatgtgtgtgtgtgtgttttaattttctctcatagcttgtagaattttctttttactctttatgtttggaggtttttctagacgacatcagccagttcttggaatatctaattggcacatttgtagaggtctcctgtgctctcttctattcatttgcttttcctagaaaccccactgaacttgtgtcacagggccacccatcttctatgtctcctaatttttctaatgtgttttctctttgtactgctatggtcttggaggtttcatctgtccagaacatctttaaaggtacttttgtgattttcaaaaatttatttttctttttttttttttttttttgagacggagtcttgctctgtcacccaggctggagtgcagtggcgcgatctcggctcactgcaagctccgcctcctgggttcacgccattctgcctcagcctcccgagtagctgggactacaggtgcctgccaccaaacccggctaatattttttgtatttttagtagagacacggtttcaccgtgttagccaggatggtctcgatctcctgacctcgtgatccgccctccttggcctcccaaagtgctgggattacaggcgtgagccactgcgcccacgcaaaaaatgtatttttatatatggaatttatcactgccttccctaactttctgttattatttcaagacttcttttcctccagagccttctttcctcctgccatggttgctttctctcctttctttcaggatattaaaaaatgtttcacgtgtcttttcagattctctaagttcccttcttttcaccagttatatagtcctctgtgctgtgtttttgtttgtctcacttgggctctgtcttcctccagtgttgtgtaattcttagttgtgaggtcatcaccaccctgggtgatttcctttctttgaattccaggaacccccaagatgcattatcatggctgtaaacacaggttctgcacgtgtctaagttcagccccaaacccacatgaagaacttatttccagacagctcctactcttatggtggctccagaccctgccccatgcagaaggcacttctcaagttccaggaccagggcttcagccacagcactcggtaggcagacacagagctgatacaga

SEQ ID NO: 13034 - DNA, 2300 bp, Homo sapien
cctgaggttcagcgacaacctaggacttgttacaggcggtggcaggtgacaatgagaacctcatcttgctggctccccacctaatgattttgcaggactccacgatgcctctctttgggtgaaacaaaagtttattcgagttcaggcaagaaatctagggtttgaaaaaggcaagagtggccgggcgcggtggctcacacctgtaatcccagcactttgggaggccgaggagggcagatcacgaggtcaggagatcgagaccaccctggctaacacggtgaaaccccgtctctactaaaaatacaaaaaattagccaggcatggtggcaggcacctatagtcccagctactcgggaggctgaggcaggagaatggtgtgaacccaggaggcggagcttgcagtgagccgagatcgcgccactgtactccagcctgggcgatagagcaagactccgtcccaaaaaaaaaaaaaagcaagagtttcaacattttttatttccttgagtagatcttaaaacacaaaagagaagcatgaatcatattccacctttatttacaacatcttgtgtcttccaatttctacaaataattgagagttctgcagcattgagaatggtcagcaaaaagggcaaatttttgctccatatcaaatgctgctgccccttaactaggtgcctgtctggaaggctggcccaggagttccccacgctggtcccaaggaggggcacaagctcagggtttgtttctgccacctggaaggcaatcgtcagagcctgccatgtgtgcatgtggatgcctctgtgtatttttagaacgtttttaaaagggaggcagccaaaatatttttactacacagcaggcactgtttcatgttggagtgttggaaagaaaagcaagagaaagaaaagacagggaggagaagatttaagaccagcgcacagattgaaatggttaatgccttctagggctgcagaacaagcactttgagtgctgaagacttctcccatctccacgtccctaactgtccccatgcagattccaggatccacacatcagaggcatctgccactgagctgggtgtgaaatctgaagaccaggtagggctcaaatgcaagacgatactgggaagagcatttcaaccaaggcagggggagagcaaagccatgcggcatgtgggttggaatgtcatgtggaaagtcacaagggatgaggtttggaaagcaaaccgggtctcagctggggacagactctaaagcaggctctggggtgtggacactgcccatggacaaaacagttatgatgaaatttcatattttgaatagctctgtgtatctcagagtgcattttcatacctcaaagtcattaggtccccaaataacctcctgggtttgccctgttaactctattgcacagaggaagagactgaggttcaagaggatcacacagctaataagtatcagagttgggaattgaatccagatcttcttagactaccttcagggtgccttttttgcacacagggtggcttaaagatttttaagcagggtagagacaggatgtgagaccttgggtggaatcagggtgagacattgaggctgggcgagaaggtcaatatgaagaatcgtctagagcaggcatctgcaaacagtatctgtaaagggctttgcagttggtcgttgttgcatattcttctttatttttgtcatgtggttggtttttaacaactctttagaaatgtagaaatattcttagctcaagggctatgaaaacagactaagggctggatttgaccacaggctgtcatgtgctgacccctgctctagagcctggatgtaggcagccattcagaaggctgtcaaattaccccacgtgaggagcaggaagggcccaggctgagatggagaagaaagatcgagagcccattctacaaggagcctgcacgagttaggggctggtggggaggtgcagcaggtgaggggcccttggaggagccggtccctccacagtgcctgcaacaggctgggggcccagcccaacactagctcctcactgagcaccccctccatgtctttcttaaccagggtgtagaggcaagcactgaaggcccatgatcagccgtgggagccacgggaatcaattgcttccagtacgactggatgcatcggaaagagcctggggcaaggctggaggccacaagaggagctgccaggccacataagcagggaacaaagccgatgatcacacgcccatcagtgagccaacttggtgaagggaaatgcccaagttctcagcacctgcag

SEQ ID NO: 13035 - DNA, 2300 bp, Homo sapien
cagaaagagaagcttcctttgacatttgaggtgtctggactcctccaggtagcaaactggttttcatggtgcacacagaggagggatgatatcggagctcaagtacagtgccccagcaacacgtacagatcgtgtactcacagggacacagtttcacattgtgaagccgcatcaataggaagggagggaggaagggaagaaagggaaggaggaaaggagaaagggaacgaaagaagaaagaaaagaaggaatgaaggaaagaaggagggagggagggaggaagagcaaaaagcctgcagcattttgacaaaccaaaaaggaaagggatgacttctgacgtttacctattttgaggactgaacccaaaggactgaggtgacaccaaataggacaaatgttggttcctagagcatggtgacctcattgcatagctatcaaagagcacaacgtcttcagagtcaggcagatccagattggagtcacaccccctgccctgctgcttaccaggctgaaggctcctggtggaacatctctggctggtctgggtgagaccccataggccacttccccacccacagactttacttccacagagctcaccctactcgtgacatatggggttgatcaactgttaagcccagtctcttctcctggcctggaagctccaggcagggcactgtatataagactgattatagctgaaatcccagagcttggtgcaaggctacagagctcaagaaagattctccagagagcagaagccaaaatcagaccaggataatgagtgatgggacaatcatgatgaatagggcgatgacacaaagtgtagccacctttgattgagcatctattctacacccggtgccctcgtaggaacttcgggttcactgactgctgaacgccaccaatagtcctttgaagttgggactgataactccattttatagatgggggaaggatgctcagagtagcaaggtggctttgctacaaccgcatagctaactaataacataggcaagactgaaaccagctctaaggatcccctaaaacactgttctctcttttgcccccgcgtgtctcaaaggggtcctccatggacgaggtgacccagagatgcagccatggagggtagagcaagaagtgcagcctcagcacttcactgacccagtcagcggcctctgcagggctggcccagccgcagcttcagatccaccccgccagccaatcagcccacgacaggaagctctttctgcaactcatctgcccttatctcctggcagagcggctctgtgaggtcacgatcaccacaccttatcagaacatctgcacctactggggacacagcccaacaggctcaaaacagcaatttcctttaggtcttctcctcagaactccgcatcacaggcaccacaaattaaaataagaaccccaaactgaaactttagggaggtcctcccttgtagggcctagcctggagcagaggccatgggaaactataggtagcaagtaccttgtcttccaccatctggtgagctcttggctgtcctgcagaagcccagctcaaatgtccttccccctagatttcccagtgtctcctctgtcaggcctctgagcccaagccaagccatcgcatcgcctgtgacctgcacgtatacgcccagatggcctgaagtaactaaagaatcacaaaacaagtgaatatgccctgccccaccttaactgatgacattccaccacaaaagaagtgtaaatggccggtccttgccttaactgatgacattaccttgtgaaagtccttttcctggctcatcctggctcaaaaagcacccccactgagcaccttgcaacccccactcctgcccactgagcaccttgcgacccccactcctacccgccagagaacaaaccccctttgactgtaattttcctttacctacccaagtcctataaaacagccccacccttatctcccttcgctgactctcttttcggactcagcccgcctgcacccaggtgattaaaagctttattgctcacacaaagcctgtttggtggtctcttcacagggacgtgcatgaaatttggtgccgtgactcggatcgggggacctcccttgggagatcaatcccctgtcctcctgctctttgctccatgagaaagatccacctatgacctcaggtcctcagaccgaccagcccaagaaacatctcaccaatttcaaatccggtaagtggcctctttttactctcttctccaacctccctcactatccctcaacctctttctcctttcaatcttgg

SEQ ID NO: 13036 - DNA, 2300 bp, Homo sapien
gcggagtggggtgggtgcagctggactcgcccgcgaagcctagccggagccaggccccgacccgccctggccgcctccagagaaaccctgagaagggagaggaggccagccgcgtggcgcgcccagccctggaggccaggtcatcaaattgacaaagttggccacagcctggggaatggggggtgtccacgggggccgtggtctggccttgtccccgggccacggagaggccccacaactcctcttgtcctcgccggttggagatcaaacggctgacaaggcagctgcgtccttcccagtctgacaggcatttccaagtcctaccctgggccgaggagcgcggggggcggggtgtgacttccaggttgctgtgattgtcaggggcgcctcctggagtcacccacccgagtatctgcggagatttggccacacctactcctgggctggcaagtccaagtccctctcccacgtggagcgccccggtccctttaccctctcgcttgccatagacccagtttaggaggtggggtcgtgtttgaccccaggagttaatcggggtaaggtgaggggaggggacaaagatttgagtgaaaatccttttccaagtgggactcaaacaaggtctcaaacacttctcaccccctcacgtgctcttgattctgttgtcttagtgtcgtttattttgtcatcctcaccctcccagagtctgtaataccaggatttatatggagacactttttggaagttgaactccaacatctactcccctcccctcgccgcccgcgaccataaaacaaaagtaaaaactaccaagcgacttttccagggaaacgaagcgattcttactgtccccccaactcccatgtcgaccccaacccttttccacagtccacgcccccacccccaaagtccaagtccgaaagagcttttgggtgggtggagacttgcattgattcaatttagttcactcacacagcaccccgccccccttctcagggggtcctgctcccaggatggaggagatataaggacgatttttcttttattttaaaataagctgcccagtggccccccccaaccccctcccgctgttgcgcagccggggctcgggggagatgagcgcacaaaaacgcggtttgcacgtgtgtccggcttgggctgcgggtgtgcgcaactggcgactgtgtgtgtgtgtgtgtgagtgtgcgcgcgcgcgcgagtgtgtctctgtgtgtgctttcttgttctcttacagggtacaatgttaaaaagccaccgctagtcgcccccagtgctccgactctctgggtctttttgtctctagtgcagattaaacgtcacgtccgcacttgaacttgaattttatcccattgtacagaggcagccccagccatagagagaccgagagctcccagagaacccggactccgccatcttcacgttgcaatctatagctcccagtctgcgcccgcaccgacccaggcgcactgggcgagccgcccctccgccccgctccccccgggcccgcggcgccaggggagcgctggggagcgctcgcggggactcggcagcccctccggccggcgccagcctgccaggtgaactgggaaggagcctctcctggtgtccccccagagcctcggaagggtcagtctccgagaaaaaacaaaaacaaaaacaaaaacaggcagcccgcagaaaacccagaaacaaccgaaccggggcagttttacattgctttgggttttttgagggggcggggtgagggggtacgagacaagtccccaagttttctttgcttttttttttcctttgctttttcttcttttatttttttatttgtttgcattttttttcccctcctggtagaagtgcgctttccacctaccagaccctgaaagaaagtgtcaggagccggtgcaaaacccagtttaagttcaagaagacatttgcaagtgcaagaggccaagcagtttgaagaagtgtaagagattttttttccttcgaaagaatatatttttaaagaaaccagccagtccgcggaaagcaacagcagttttttttttttttgcctctttttcttattttagatcgagaggtttttcttgcttttcttcccttttttttctttttgcaaacaaaacaaaaaacagcatagaagaaagagcaaaataaagaagaagaagaggaggaagagagggaaagagaggaagggaaaaaaaacaccaacccgggcagaggaggaggtgcggcggcggcggcggcggcggcagcggcggcagcggcgcggcggcggctcg

SEQ ID NO: 13037 - DNA, 2300 bp, Homo sapien
ttaggtcaaagggttgacgagtagtaaaggtctcagcatcattggtgtcactctgaaaggtcttgtactggggcttgcagaccgggagagagagcagttagcgggatttctcccctttctgagatgctattacctgcttcggaaagggtgagaatgttgagctttaggagaataaaatgtttgtatctgggtgctaaaatgatacaattttatttatttacattttataaagtattataccgttatttccttttgagtttcaggacagtgcatatagtgtatatcgtcaataacaaataaatgctgattggttaatgcattagcaaggtttataatgaactcacacacatctcagttaaataagaggtgtggtcatattccttaagctgtgtttttacaggacgtatgcagtcgccattgtaatgattctcatccaggctggcgtggggctaagtgtgagtttgaaaaagctcattcactatacctattgtttttgttctgtaaagcacaaaaagtaaagattattatgcaggaccacatggaaggtagaagcagaaaacatcctaaggagcatgcattggaatgtggggccctttcttattgtcatgaagggcctcaggagagggtttgttttttatttgctctctttaagtagtggttttattgctcttccatacacatctctaaacatgtagtcttcagtttagatggtctcagactccaaaatggtgagttcataatgggtgttttcaaacaggttccttcataatgggtttatttgcactaaataggagtctgtgctaatcctttgtcaccaagtgggtagcgccttagtttctcttctgcgtagatactgtttactatacctgacactgagggtaaagcatttgccagttctcaaggagtgaataggaagttccgtctttgaatattcctcattctggtcattttcgccatttagcaggtatcttcgcatatccagcatgccctcttcacatatcaggttgactgttaattatgctgtggtaagatggccacaggcgcctgagctatgtgccacacccagcttcctcatagtaaagttcctgttcccctccttttattcatccaaacagaatagttttttctatgcatgtcttttcatctttttgactacataggacatgctgaaaagttcagaaattaatataacagatgtccaagaatctgctaccccagctgagcacatgtcaaagttgtattctcattgtcctttcttttattctcacccactgatcagctttcctttcccttcctcagcccttggttttgtttttgtatttgtttttaagaaataaaacatcacagatacagccaaagcctcacattttcatccccttccattccctccctccttgcagggtgttcatcttcactgtgaatgttttctacttcataaataaccccataaaaatatatggttgtaattgatatttgaaaaatttacataaatggtgtcatattacgtgattttttaaaagccactgtggtacatttagtgttatacttatgttgatacacatagctctagctcatttaaattgccttacagccttctggcttacagctctacagttttgtgttcttagaatcagggctgtggggctcatcctttcccatgtctccttgtgcacatacgcgagctactcatttttgttttaatggaaattttgttaaagcaaatgtgaacatgagaggtggcatgtttgacttttaaggagaaaactgctctgtaaatcatagtagtggtaatagaagctctctgccctttgccatcgtattacctaatagtacctaatagtcaatatttatattacctagtgtcagtatatatttcactgtaactgacagggagtttaggattttaattcttcttccctgtcaccagttaaggtatgtactgtgaccatctggtgattagttttgatttcaagattggcgtgttaagactatttccagtgttagttatggcctgtttttattttctgagagacgtgtgaatgatatgtgtcctaaaagtagctcttgttttctaaaacgtggattaatataggtctgtccgttacttttgatggaaaaagagaagattactttcctgatctaatgaaatgggcctctgaaaatggggcttctgtcgagggttttgaaatggttaacttcaaagaagagggctttggtttgagagcaacaagagatatcaaggtgagtttataaaatgttggtctcaaggggtctatgtgtttgaactgtggtgtgctgta

SEQ ID NO: 13038 - DNA, 2300 bp, Homo sapien
tttgtagctgttggtgggcaccctgtgagggccggtgcagaacagccctgtcccaggctcacttactgttaagagaagggaaagggtcttggagctcctcatcaaagtgacgttcttgcctcgtttacaggctcccacagcagaaggtctttcaggcaaggctgaagggagaggccagctaagccattgctgacaggatgcttctgcgtctcctcctgccaagccagcagacccactatatttggaagtgtgattaacgtccttattaccagactccttggtggttttagttattttcaggtcaagttcgatggtcctccagagatgccctccgcagatatgggaagcctgaaatgcccagaagggtggaggtgctgtgtccaggctgtgcccttgctcttggctgtgagccagaaccatggggagatttttttctcttctaagaagacatttcttaagcataggaaaaggtgcttaagctgtctgtcatcctgccctcccctcacttaaattttctgcttttgatcacagaaaaaaaattccttgtattgctgcaaaagttttatgtatttttaccagtttccttttattccaggatgactgacactgtgtattttacactgatttttagaagacttattatattaatgtgttacacattattctttatacgttagatacataagagaagatacacacgttagcctgttaaataatgtgatgtcctactgttttagcacatggccatatttgcatggactcagttacagcagagtcaatgatcatctgtatagtgggagaatatgttttaaacctttgtcctagcatagttcttcacatggtgatagttaccactttttgtaaaaaacaaatggaccaaagtctgctttttgattctcacttgagataaagtgtaactgactggggctcctggaggccatcctcgtggtggtttgttattcattagcttatggatcgccctaccagcttcttggctggacactttttccatcttccttggtcatgatcttagccccttgtctctggagaatcaaagccagactcctctggcagtgactatcaccctgtcttgagtggctgcctcgctaggcttccctagagaccccctctccagccgggttcccttcctcactgtgcttccctcacgcttctagtcctgtccctgtctttgaatgcccccccccccccccgccattcttcacacatccatgtcccttactttctttgagacctattgttaaaagcacttgcaagcaagcattatctcatagggtctttacccaggacaccatggcgtgtcctataccacatggtctcatctgcgtgtgaaaatatgctcatcatttctcacatgcccgcagaggacccgtgtgtggcacactggaacgcgacgggagacctcgttcaagtcccgggtctgccatcagcttcctgtgaaatcccaggcaaggtgcttgggatttcccatggagcaaaatgcaggagttagactagctcgccagagttttttccagctctaaaacgtcttcagcatttgtccagagagtgtgatcagttgcttatgatacagttatggttaatgggaaatgattattttaaggcaaagtggggagagaatatataggtctttatgcccatatgtgtatgatgtatgcatgggttttatctctctagtatcctggaatatgttagtctgcacagtgaaatctatgtaattaaaaaaaaatctagagtaaaatttgctctactatagtttttgtaggtgaaaaagaacgaacttttcttccagagactacaaagcagatttttttttttcccatttgagaacctctagatactaatactacacatttctttttctggaagaaaacttcatgtaaggtaagatcttagcctctgaagactaagacactgccatgtgttggacatgttttattacttgattttgttctttggtaatgtaatttttttctcttttctttctcttctctgtagtcagaaaaatgggtaagaagagtcgagtaaaaactcagaaatctggcactggtgctacagcaactgtgtcaccaaaggaaatcttgaacctgaccagtgagctgctgcagagtaagtcctcctctgggctctccctgccttgatgtggtggctgtgcctttttcttctttgtcaccagaatggggacgcgtgcatcagacaagctggtattcaggtccaagcttattagctgtgggcctgggcgagtcacagaggttcccaggcttgcagtcctcacctgtgag

SEQ ID NO: 13039 - DNA, 2300 bp, Homo sapien
ccgaagaaaaactcctcggtaaactgttggaatttcaccaaagtatcaatcacggcagcccttgggactaatccagtactgctggactttcacgcatggtagcccgtataaacacagtacatacagcaaggttcaagcaagtcttggcaaattttaacagtggagaggaagactgctttattttgctatattcttgggttaaatgtattcgcttaaaataataaacacttctccgagattattactggttagttcagttttgaaatactggcaaggtcatttcaagaagaaaaacgggagagggagaggtatattttacataagataaaattcacacttttcagtgtccggttctgagttctgacaaacgcatttatagtggcctcatcagcaccacaatcaggctacgaagatggggtaactcttcgaggattcttaaaagcaaaattgatttgtcagcatactttaaaagtatttttgcttttgaaacatcaccttatttatttagaaaagcaaaataacacggtccgagtggtcctaacccgcgaatgcctttgcaacactgaaatgccctcctcccaacaccggccgggcaggggtgagccccgcagccaggggcgcgcgtcactgtcagctccttttcccaagtggagaccgggaaaagacaagagttgcatcgccgggctggagccacgaggaggaagagttaacgccggaatgacaaactctaaagcaccgaattgcctctccctagtagggcactgcgcgtgtggagcacggccaggggcgcgtgggaagaaagacgacctatttcctacgtccgtcttcctaactggacggcgcgggaggaggcgggggctggtccccgggcaccctggtgggcaccgagaactcgcagagaggaacataaaaccgcacagccttccccgagcagcggggtgacgggaggaaggaaggaaatgggagcgcgacccggccgcgcgcagagccgagccgactagcgcgaggggcccgggccccacccgagagcaggcgcgagggccggggacagcggggcaagctcggggagagcgctgcctgcacctggcaccacctcgagaccgggtggcgcggggcccgggagcgtgggcgccagaggggacagggcagcggcgagcgcgcgcctctcgccccgcagggcgcccgggcagaggccgaccggcgccctccgaccccgccgggccctcctcgccctggcccccgagcgcacacctgccccttcaagccccggggccacagcggccggcggggaccctggcgggggcgcgggccggacttcggccgaggggcgctggccagggcgagggacggcctcgcagagctcggagacgcggcgcgagtttcccccgcgggccgcgcgggcgcagagaccgccgccagcactcacctgcccgcttcccctagcgcagcgggaacgacgtactccggcccggaccccgccgtccgcctcaaccaacccccaggcggtggcggcggtggcggcggcggcggccggacgggaggggcgggacggcagcctgagacggccccgcgaccgcggcccaacgcttctcctcccgccccggaccccgcccccgggccgcagccgccgccgttcattggcccacgcttcggacgcatgggcgcggccccgccccgccacccagccggcgttccgttcggggtcctccccagccagtgggctggcagctcccgggggcaagagcggccggctcagccgccgccaaccacgatgtcgcaactggctgcgttcgcccccgccagagctttgattggacgaatctcgacccgggccccgcctacgcgcccaagttccgttagcaggttcggttgctccagaatgccttttcgccccgaggggcgggaccgacgggatgggccctgtggctggctcctccctctgtaagcagcagccactgacccgcggggcgggcggggaggagagcggcggctcgttcctcttttgagagctctgctttcttcccattggttgacaggcatcctactctctccgcccctccggtcgcttggtggcgtctcaggacgcagcgtgatgacgtaggtccccgacattccatatacaagatggccgcagtcggcaaggagagacgtcgctgaggggcttgcctgaagcgaggggtgagtgacccaccgactgagggcagcgccgcccacctcccgcgtatctggaggtcggagtaggttatggccaaccgccgctatccactggcggagtctctctttccggattctgcctccct

SEQ ID NO: 13040 - DNA, 2300 bp, Homo sapien
cttaaaaatatgatcactctgtaatctcctcaattaccttgaatttaattcctctagatttttttgtccttatccaattttaaagaaaacaagcagaaaacactgtcctccctttcagacactcagcagagtcactgctttcaaatataatgtcctgaaatgaactagcccattttataggccacagctatgaccaatttttctttatgacattcaattttagaaacagcatttaaaatttaagaacctcattaacaactcgaatagtttttattgcttgttagtgcaaactacattttcaaaatggaacaaatttaaacaggatttgcccagaaatcaactaatatgcttgaataatgcatcacaatataatcgaaatgagataaaagagggaaaaaaaccctaaaagacaccagcggtggtcactctgaataagacaatcttggataattattatattcatagtcaagattatttaacaggtaagcatcctaagggcactttaatccaaatgtctatcaatactactaccactaccatcatccatccattctttcattcagcaatacagagggcttattaaacgtcaggcagtgttctaggcgctgaaagctcctcgctttcattctagcaacatcattcatacaaacctttagcgggcacctacaactgcaaggcattgtgctaggtatctgtaaacagcgatttagatcgagatacacaaacatcaccaagtttctcttaaaaacacagaagaccacccttaagaaatgctcttagaaatagttcctaacctcagatgacttagcgaaagctccgtttaactggcagtctaaatttagggagcattaccgagcctatcttgggcagacaatcgtttaggagctgtcacataacctctagacttacgctccaattttctaaagaacaatttctctcataacaaaccaaatcaaccaccaggagcgggtccgtaaagacgatgtctgggcaagaacgaaatctaatcccggaagtgccttttcctcatcttagccgcaccctcgttacgtggctctccaaaactccaaagtcggagtaccctagacatggaacaacctccaaaaagtttcaggcctagccaaggttgggactaatacgccgcgaaataatcggggagatatgagaagtctgtggctgtgagactgtgcgcggttaacaccgctgccccttttgcccaacccctagaaagttccccaactctgactgccccccagtgcgagggccgctaccagttctagggtgagtccggcctccctgccccgccccggcgcctcagaccctctctacacgcccgccccacaaccccgcgtcgcccgcaaagttcaatgtgtaccggaggttagcggagggaggcagaatccggaaagagagactccgccagtggatagcggcggttggccataacctactccgacctccagatacgcgggaggtgggcggcgctgccctcagtcggtgggtcactcacccctcgcttcaggcaagcccctcagcgacgtctctccttgccgactgcggccatcttgtatatggaatgtcggggacctacgtcatcacgctgcgtcctgagacgccaccaagcgaccggaggggcggagagagtaggatgcctgtcaaccaatgggaagaaagcagagctctcaaaagaggaacgagccgccgctctcctccccgcccgccccgcgggtcagtggctgctgcttacagagggaggagccagccacagggcccatcccgtcggtcccgcccctcggggcgaaaaggcattctggagcaaccgaacctgctaacggaacttgggcgcgtaggcggggcccgggtcgagattcgtccaatcaaagctctggcgggggcgaacgcagccagttgcgacatcgtggttggcggcggctgagccggccgctcttgcccccgggagctgccagcccactggctggggaggaccccgaacggaacgccggctgggtggcggggcggggccgcgcccatgcgtccgaagcgtgggccaatgaacggcggcggctgcggcccgggggcggggtccggggcgggaggagaagcgttgggccgcggtcgcggggccgtctcaggctgccgtcccgcccctcccgtccggccgccgccgccgccaccgccgccaccgcctgggggttggttgaggcggacggcggggtccgggccggagtacgtcgttcccgctgcgctaggggaagcgggcaggtgagtgctggcggcggtctctgcgcccgcgcggcccg

SEQ ID NO: 13041 - DNA, 2300 bp, Homo sapien
agctgcgtgtctacccaggggcaggcagtcccacccccagcttcctgcctggaagggtccatgtggctgggaagccaggtgcagggcttctgcctcgggctgcagtggggaccacaggggcccaacagaaaccagcaggtcacaagatgctgggagaggcttgggaggaacttacaagtgcccagagccagacagaaaacacccagcggtgccctgtgggccctggaagcggggtttccaggacatcttcggggctcccacctctggcaatccttgggccaaccatggaagctgagtctgccgccctctctgtaaatggggccctgatgacgcctcccaacggcctggcaagctcagggagctgggctggaatcccacccacccaggcctgcatcatggggccacctaacactgcagggctgggttctgcgaccctcaggacctggaaccccctgcaggcctggcagccaacccctggtgccctccccgcccgccctggcctggacctgctcccagggccttgcaggttgaccggctcccgcctccacatggagaccaggccccacccctgaggctagggggcctgggagctgctacctccggaggccccccgagccctggggtctaggaaagcgtcattgaggtggggctcaacccacgctgagcctcggtttcctcgtctggacaatagaaagggtcctctgccccagggtgtgtgcagacccctaactccagcccaggctgttgggtctctgtagtgtagggaacccaacagggacgctggggattccccctggggcaacgcaaggcggcactccccgcgccagacagcagggggcgccagtcgcacacatacggccctgggagacctgggcacctacaccttcctgcaccttccgctgcagaacacaggccatgtgccagccggcccctggcacctctggcctcatctgcaccaggcccctgggctgcctgtcctgttacagcccccggctctagggggctgggatttctgcagcacaggcaggagggaagccaggagcgtgggggtgggctgtgcaagccgcccctctcctgcccgcctcactgggcagtggtgggtgccagcgagggcatggcccgggatcctgaaagtgacaccaggactagacaaagccctagtgttacctccagggcattcccggggtgcaggggcccccacctgtactagaactcagccccctcgggccacacacacctcccactgactaggtacccacttagggcagatgggcccactgagtccttgccacactgctcccagcaggcactatctttttacatgttcatacatgccttttttttttttttttttttttttttttttttgagtgagaggatctcactctgtcgcccaggctgaagtacagtggcaccatctcagctcactgcagccttgacctcccaggctcaagcaatcctcccaccccagcttccagcgtagttggaactacagatgcacaccaccatgcccagctttttttttttttttttggtagagatggggtttcatcatgttgcccaggctggtcttgaactcctggactcaagcaatcctcctgtcttggcctcccaaagtgatgggattataggcgtgagccactgagcctggcctacatgcccactttacagacaaggagagtgaggctaagagaatggcttgcccaagaccaaacagcttgtaaacaatggggctgggcgccaaacccaagtctgtgggactcctgagctggtgcccaaagtgaggataccagtgtgcaccagagagaactgaaaatagacatccacaaaatacctgtcgccaaacgctcagagcaacaccattcatgtgagcccaaacatggaaacgatccaaatgtacagcaacaaatgaaggaatcatgtgttccacccacacaatggaatagtattcagccatgaaaagcaatgaagaccaatacagggtacctgtggctggaccctgagaacaagatttggagtgaaagaagcctgacacaaaaggccacacgtcatgtgattccatttatacgaaatatccagaattggcaaatccgtggaaacagaaagcaccaaccagtcggtggttgctggtggctgggaggaagggggacgggagtgacggccgatgggtacagggtgtctttctggggtgatgaaaatgttctactgtgatgacggcacaagtctgagtgtcctcccttaggaggctgatgggtataaaccacctcccaccctccactgggcacctgccctgacagcca

SEQ ID NO: 13042 - DNA, 2300 bp, Homo sapien
atttaagtgcaataatggttactcatttgatgcgccattagtcacattgccccttaatgagagattgtgtgtttttcctgcctggctttgtggcttgctaataaagttctatggacatgcaaatgtttatagaggctcaccgaaggcaagggtgggaattgcgtgcagctaattaaaaacctccctcacgctcacgcacacacatctcctcccagggaaattatctgggggaggggaggggacggcagcacaaacctgcgttttcggtaacagcacgtgggagcccatttggtcgagggccagagaggatgtggaggaagggacgccggagtccaaacagaagctgagcagggcagggcagggccggctgaaggggagggcagctgttccaatcccaggtgtacccttcctggctgtgtggcccagtagtcagactgtgtgtatgtgcacgcacgcattcagagtgtgtgctggcttagaatgcattctccattggagaagattttgtaactctcttactgttgcagagtcctggccaagaaaatcaggtggtttggaattttcgcccttaagtggagctaggggtacatctctcaggagaggtgacccagagaggcatgggtggctctgatggggtggggggaggggtgtcactcatggttgggggagggtgagtgctgggcctaggggtgggggctgtagcctcttcctctttttggtacctggtgggtggggagggggctttccttgatctgacctccacctgcgggccgtgagtgcctctagttaacctaggcagggtcagccagggttaatgccgtggtcagggcatggcagtcccatttgatggttcagggctgtgcccaaggcccccgtgctgagacccctttgtgatgctcgccagggttatctaaaacccatcacactttgggggccctgcaggaaggttggttcccacttctctgtctctcctttatgtccctccctgaccttggaccacacccaggtcctccctgaggcccaggaagcagctcccagcctccagtgcccggctgccctggctgaccggcgtctggtgggcgtgggctatttaatgaggggagtcagtgccggatccctgctttcctgtcttggctccgtgggagctggtaatagagcatccacttgcctcctcacccccgcaggacacggctgtttgctggcccttgagccaagctcttgagacctcccagccccagtggggggcctggccagggctctgatggggctgggagaacacaagagctggacctcagtgaggctggggcttgtgagaagtgcggggccaggtccagcttttgagggaggcaagcagggtgtgtgtgggatctttcacagccaggccgaggggctggtgagtggaactgggaccccagacatggctgcagcctgtcctgccttccttgcccctgccccagcccagccccagcctgggcctcccctgcccctgcagtttgtttgggtaactcaacagcctgctgatttatgggacattccgcagggttttatctgcccagccactttctctcagttcctttgaagtagaaaagggtgtttcggccagaaacacccaaaaccctttagtgatgcagaaagaaaagaaaggccgggccttctgctgggccgggccaggggaggggcactgtgggactgaccagagaagtttatgggacctgtggattcattctggctcctggtcccagccccagccccaaattctgggggtcggtggtgtttgctttgctcttaagcaaagggtctaaggccaagccttcctccctccctcctgtgtgcaggagttagttacaaccccacagcttgcacgagttctcagggattcagaggcagcacccaggacctgctttaggagctccctgcccatccgatgggggaggcagcctgggcggagcatcccgagagagccccgaacccgtgggaggtgggaggcctcgcctgtggatgtggccccatctgctgccgatggctggcccaggccctgtgagtggtgccgtctgtgcagggacccaagggcaggaagttggagcggaggagccagggtgagtcacggggtgggagagacactctctcctcactcgctctcactggctcttcttcattcattcattcattctgtttattcagccatccaacaaatgtttacaaagcccacgttggagagtggatcgctgacatttgagctggggagagtgaagatcgattgatcccggctcgggggatggataagcggtgtggaggggagg

SEQ ID NO: 13043 - DNA, 2300 bp, Homo sapien
cagaggtcatcatctccatttcacagacaaagaaactgaggcacacagaggagaaaagctagaatccgttccaaatacatctccctcgggaaagtcttagagtctcggctgagaaaggtcccaggactagaagggcggaatttatggcaaacaagaaaggctctgagccccaggcctctccccaactgcctctgggtctcaagcggctgcctgtgcaccttcccaatccccacaccccactgcagaactccagccaccgcacacacgtggacgctgcttggtttggaggacacctgttgctgcaagaggggaaattcacttgcgctcaaggggccttgtatcctttgctgtttagaacttcccgctactaggcaaggatttccaaggctgggatgaggcgcccaccgccagcccagcagtgacagaccctaattttggcaactacacccgctagaaacttttctgggaccggaccggcagcaggttctgagctggacaaaaagacgctccaccactgaaccggcccaccaccgcccaaagccccactttgggtgagtgcgggatcccctggcccaggatccatgacagctggaggagtctggagtggcggccgcatgagtgggacagccagggaccacctcctctcgccgcagcctgggaaaagggctgcagccagggagacccgcgctgcccggcccgtgtagtccttaccgtgcaggccgttggggatgctgcggtggtgcggcggcgccgacaagtcgtccagggaccgacgtgtggctcctgccttgccgtcgggggccttgtgcggcccggggggcagcagcgggggtgggacgtggtggtggtggtcggggctgccgccgctgcccgcgctggacgtactgctgccgtcgcccacgtcgcgggcccccgcgccgggcgcgccacccgacagcggcccgctcaggctggcctggctgtcgatggagctgcgggagccggcgccgcccccgccgccgccgccaccgcttgcggcccccgtcgccgccagtgccgcgcgctcctcgtccagcagcagcaccagctccttgagctccaggttctcgcgcagcagggcctcctggcgcgcctcgagctcgcgcagcttctgctgcgagcgggccacctcgtgccacacggcgccggccgcgtggcgcccgaagcgctgccactcgcgcgccagcttgcgccccttctgccggtcgtcgtcgaggaagcagcagagctcgcgcagctcctggttgtcgtcctgcagccgctggttcacgtccttgaggccgcggatctccagcaggtgctgctgcagccgccggttcacgtcgcgcatcaggccgccgtgctccagcatgaggcccaccttctcgccctcggcgcgccgcagccgccgcgccagctcctccttgctccagcgcagcagctcctcgtccggcacctggctcagctcctccgacgccgccgccgccgtcgccgcgggcttagccatggcggggccgtcaccgcggcatcgccctcgccctcgcccggccggcgcttccccgcgccggggctccgctgggccggtccgcgcgcgggcggggggcggccgggggcgcgtgcggcccgccccgcgccgcctggcgcgtcctctcgccgcgcccgccggggccgcccgggagcccgcgcgcctcggggttgacgagcggaggcggctgctgcgtcggcggccgcggtgccgggcgctctcagggttctggagaagcaggcggaggcccgcccccggcccagctcccggagcccccgccgccccgcccaccccgggcggagagtgggcgggtctccgaggcccggccccgcccccgagggcgactggggagcagaggcgcggcccccgccgtccccctgcgcggtgcgcccgcccgtccagtgccctctcagaggcgcgttccggccgcggtcccgccctcccggccgggcgattgggccgctccgggggtgtgcgggaggggcggggcgcgcgcgggggaagctgcggcggtggtacggtccatccgcggggtttccgacccccgcccgcggccggctcccggcggttcaagtttctgcgcccggaggacgcggccttagccaatcccagggctacagggcgcttttaaaatgcaggtacggctgcggggagggggacggtgggaaaggtagggccgggcttcccttaaaggcgacgcgcgaaaatagcagtcgagccccctccccggcccgcgtccccggtcctcttccctctccccagataaacaaatacccac

SEQ ID NO: 13044 - DNA, 2300 bp, Homo sapien
tttttttttcttttttgagacagagtctcgctctgtcacccaggctggagtgcaatggcacgatctcagctcactacagcctccgcctcctgggttcaagcgattctcatgcctcagcctcccagtagctgggattataggcgcgtgccaccacgcctggctaatttttgtatttttagtagagacgagatttcaccatgttgaccaggctggtttcgaactcctgacctcgggtgatccgcccgcctcagcctcccaaagttctgggattacaggcgtgagccactgtgcccggctcctgactgtgacttttcttatctttttttcatgccttgttgtttttctggaaagccaatcaggatgtactagataacagaaaccgaggtaaataggtattagggtgaggatttatgttactctggctggggctgggctgtgtttgacattttctgtggctgtaggagcccaaacctcatggctgtggcccaggctctgtgtcacttccacctctgtacactcatctggagccctgtgttgatgtgtgactatcacccagttctgagtcccagctgggaagtaggcgccatcgtgccctccgattccatcctggctctgcctattcccagctgtctgtgcaggaagccgttgcaggccgcatttcccaccctagcagccctctgctaggttcagccaatgaaagccacaggtgggagttggaggggaagtggcagggagaagccggggtatttctcctcctctgtctgtgcagaatctctgacagtggctatctccagctgtggccagacaggccttgtgagggtccagctttgacaaggtgaccatagctccttggctccagtaacatctgctcttcctgcatcaaggacctggggactgttcctactgttgctgatctcaaggttacttcactgagccctgtatggcttcttagcctctttggcttcaagtccctgcgttaaattccccgtgtttcaaatactcagagatgtttggctgtgcggagaccctgactcttacactgcacctgttcaggccagagccacagacctctgagtgctccagccctgccgcatctcatccacccccagctctgccaggagcatgggcccaaagacagaaacatgatcccccaggacagtccaaagagacctgcagaggacggatgtgtgcgttggggccatgaagatggagtaggagctcactggacagagaagatggggaaggacactccagggagaagcaaacgctgaggtccacttgagaaaaatgcctgggtggttttggtgctgtgagattctagggtaggtgagacagtgtgtgtgtgtttgtctgtgtgggtggttttggtgccatgagattctggggtaggtaagacagcgtgtgtgcgtctgtatgtgtgtgggggggtggggcggggttgggtctgaatctccagcgggggcagcggaacaaagggctggatgcccatcccaggaggtagattcatcagtgctccctatgcgagagtggaagtggggagccccagtgggtcctgggctgcaggagaatccgctgccccaggagcagagactgggaagaagcccacagtaagggcaaagggtggactgcggagactgctccgtcctccctccccacccctacgccaggtttcacttctccctgagagtcctggggcaacaccccctgttctttccctcgcacccccatttttaaaatgttacgtgggagctttcggggacgggctgcgggcatccgtttccctagcccagtgggaggtggaaccgaagcccaggagtccaggcctctggccctgcgcctccctggctaaagagcgccctgtggggaggaagcagggccccaggcggaaccgggaaaacacaccggggctttaaacagaccgggccactcccatcgaatttggaaagcggttaaaagaggtcgtgccgcattctgcgccgcgtccctcttccttcagtcccgccgagtgtccccgaccagaggtgacctcctagaaggggaggtccccaaactcgaggccctgcgtgtagggaaggggagcgcccgccccttccctgccgccgcgagcgccccgggaggggaccggggctgccgtccctccgcctcttcccccgcggggcgtagcgatggcccgggccagggccggggcgctgctggcgctttgggtgctcggggccgccgcgcatccgcagtgcctggacttcaggccgcccttccggccgacgcagccgctgcgcctctgcgcgcagtactcggacttc

SEQ ID NO: 13045 - DNA, 2300 bp, Homo sapien
ggctcactgcaagctccgcctcccgggttcacgccattctcctgcctcagcctccccagtagctgggactacaggcgcccgccaccacgcccagctaattttttgtatttttagtagagatggggtttctccgtgttagccaggatggtctcgatctcctgacctcgtgatccgcccgcctcggcctcccaaagtgctgggattacaggcgtgagccactgcgcccggcctctaaaacttttaaatacattttcactcctgctctaaaacttgcctctcactctgccttacgcccctcagtcgaattctttcttctgaggaggcaagaactgaggctgctgcagacccatatggatttgctgttgctaacagtaccattgttccaggggtctggagagacaaggcaagagaaagtcctcttcagacagtgcgatgcactgtgtaatctcagggagccgttccacaaactggatactaaatgtgatgccgtcacatttcttttctagctaaccaccccaacccaccttccagtgcgcaggaatccacaccctccttcttgcagcctcatcctccctccaaattgccctcaagccccggagctttcacagcccacaggggacctggtggctccgttccacacctcaccccagcagggccagcctgagttaccctgtgggcctgcggctgcctgtcaccgccgccacacgggggcgccatagcaagccaacatccccgagtccaactgggcggccgggccaggcgccggggggatggatgctctgctgcccacctgtccaggctgcggtggccccgagggcagaagtcccgcctcctccgtgctgggcacggctcttaagacttggccgtctccgtcgcccctcagcccacacccctaacagccatgtcccatgtccctaactatacctgggaaggcggtaccaaggtccccttcgttttccaacccccaacctctccaggactggctcaagcgtggggcaggggcattgcctcttctcagaaacccagcagcatctacactccctgggcctctacctccagcccgggggacctttacctgggctaggagtgggcacacctggccttcccctgccacgactttcacgctgggtggtccctcgggataggaattgggaactaaaacgcccagaattggcctcatcttcatacgggatgggcaaggagacgcgggttacgacagagggggaagccctggtcattatttcgaaaataccttctcctccgctacccccgcctccccggcacatttcccgctttccctggagggcggacccagattttcatccctccaactccaactccttcgggcctgagccagcgcctcagatggggcttcgcctggtctaggagggtccgcaggcccccgagtctctgggagaacagcctccggccacgccgtgcgctctcggtcgcagacacaggcgtccctgggtcccgcaggatcctgccaccagcccgcgggccccgctggcggaccacgggcgctaggcgtggactgtccgggcggaggaggcgccccggggcaactggagaacaactttgggggtctggggttccaaggagaagtttgggaacagtcggcgttatgcggacttttgcaggctgggatggggtttccgggcaggtttgggggaaaaaggaaggggcctaagaccgcgcgcggaaagatgccgttatttggaggcgccgaagcgggcggagccagccagcaggacttcgcgccgccgccgggccagagcgctgaggatcggcgttgccagggacaacgcgttctgggcggagctgctgctggggcggacctgagtctgaagaggtgggggcggagcctggggggctgagccagaagcggagttgtgattggtgaagaccacatgctcggggtggggcctgggctggggcggtgtggaggttggggcggagctctggggggcggggcggggcgggggagggcccggagcgccggagccggaggcggagacgtggttggcggggactgtgcgccctgggaggggtcggagtcggcgggggcggagccgagcgggcggggagggtgctgggtcgcgcctggcctggggccgaggcggcgcgcggcgctgacagctgagtcggctcgcggcctcccggccccctcggcgcccggcccgaccctggcctggcctgccctgccccggagccatgagccccgggctgctgctgctcggcagcgccgtcctgctcgccttcggcctctgctgcaccttcgtgcaccgcgctcgcagccg

SEQ ID NO: 13046 - DNA, 2300 bp, Homo sapien
agtagactggaaagagacatttatttaagaaatacttattgtgccaagagccagggttgcaaaggccagccaagcaaacttcaggaagctttgaggttatgggaaacatcaattctaaccagatgatggcccacatgatcatgacataaccatgtcattgtcttgaggaagcatctccagcacatagaacctcatgtttgaacagtgctttatagtttataaagtgctttcacagacatttttatttttttaactttttatacacacagcataaagtttgccatcttaaccatttttaggtgtgcagttcagtggtattaaattcattcgcattattacgcaaccatcaccagatatttttattttttaatctcacaataagatgttgtcttagagatgactgttctatagtaaatgccaaatttacaaggctttatgaaagaaactttagaagatgcctgtgtttatgaaagtattattgagccttggtgaatcctaattcactaatgaagaaaaaataggaaccactgatgagtttcatctccaaccattacccacacagaatataattttgtacttttaataaaactgtgagagtaaattgctagtttctacttttccagattttggttttatgggaagacctcagtctgagtccaccaagggagtcaggattttattgttcacctaacgctgtagcccagttttgtttctacaatagctgcaagagattcagtgtttgtatgataaccggccacatactatctggataatcaacttaaatgagatttttttaaaaagacaactacaaatcatcttgcaaataaatatatacttgccaaccatgtaagcattatgagaaaaagtcaagggtgctgtgggagcatatattgcacctacctggggctcaagagttactgcctgaggaagcggcctttgagtgtccatctggagaagggagacattcaggtagtgatggttgtgggggatagagggtgagtgctccaggagaggggatgtgtgtgcaccagccccatggtgggcaggagcattgtatttggaggagccaaaaggcccctggaacaggaaggcaatgttataggtggaggtcagcgagaagcagactccagctcttaagctcaggtgaagattttcatccccctcctaagagcaacagcatgcttcaaagtgttttatgttgcaaagggaccagatgagagtggagagccccaggctcacctgctgccaggcatgtgcgtcggctagttgggcaatgaaaagctggttactattttagtttttcttctcccattctctctctcttttttagagacagggtctcactctttcacccagactggagtgcaatggtgtgaccatagcttactctaaccttgacctcctgggctcaagtgatcctccggcctcagcctttcaagtagctggggctacaggagtgtgccaccatgcccagctagtttttatttttattttttgcagagacggagtcttgctgtgttgtccaggctggtctggaactcatggccgcaagcaatcctcctgctctcgccttccaaagtattggggttataggcatgagcccctggccctggccccatttctctttttaaaaattttctatttggaaataatttcaaattttcagatacgtttcaagaataagaataggacaaagaatacccatgtactctttactcagattaatattaaaagattaacatttctaggtccgggtgcagtggctcacacctgtaatcccagcactttgggaggccaaggtgggtggatcatgaggtcaggagtttgagaccagcctggccaacatggtgaaaccctgtctctactaaagatacaaaaattagccagccatgctggcacatgcctgtaatcccagctactcgggagcctgagacagaaaaattgcttgaacccaggaggcagaggttgcagtgagccgagattgcaccactgcattccaacctgcatgacagagcaagactctgtctatggaaaaataaataaataaaaataacatttcttttaattataaaagcagcattttctcttagcaaaatttcagaaacatgtaatgtacaaaatggcagtctcctccttccagctcccttggggttgccatttttgtgagtttggagtgcattcttccatatctctttctaagctctgtgcctgggagggagccctgtgggttgggagctctggggtgcgaatggtatctgaggactcatttccacatagagttggacaccatgattgctcaa

SEQ ID NO: 13047 - DNA, 2300 bp, Homo sapien
ccagcctcatcctccttgactcttcctgcagagaactctacgcaaatgcccactggaagctttctgtgctcttagcttagagagacaatgtcctctgctgattctcctgcctctctgaccattccttcggaatgtccttctctctcctttgtcaaggctgtaccccagcccctgtccgattttctattctcttctttagagacttcatctacaacccctttgctgacaactcccaaatctcaattctttctctccagttgctacagggcacttctaattggaggttgtgctgtccccgcttgaccttcctgtctttccagctgtatggtcctatagcaacttccctctggccggcccttggtgcctcatttctggagcactgcagacatcctgggctgttccagcaacaggccgcggcccctgcagcccagtcggcaggcagacccagctccctaacacagctctcaacagtggcctgcctgcgtgaaccctccaagcgttcctccatctccccccaagtctggttcaggctcctctgcagctcttggggcctctcttacctggccccttgccctcagtccagtcttatttcccacttgtctgcacaatgtctgcaggcaccgttccttctttcctcactagcagtgtcctgcccactgtcctccatccaccaagtcacagtcaaacccgcagcacctgtggcccttcagccttcactcacaatgtatcttcccaattaacaatcctgctaggacaggaataagctcttaaacttctccctctgcccacagcatatagcaccagtccttactaacccatgcactaaccgtgccgcacgcagagtgacagagccctgtccctcacctgccatctactgatgtccaagctgggcttctggaaggacaggcctctgagcccaagcgagacctacgagttttcctaattttaacttactcagttcttatttcacctactctattcaacctgcacaagttagtacctaccatttcagattttggcatggaactgaattatgactgatgcaacaggaagtgtaaacgttctgcagtctctttgggaccaagctcattcttgggttagatgatccattttatatattctaatttattgcttcccactcgttatttggcgcatctttacttactttactccatgggtataaaatgcgaaccattaacagcatttatacgtgtatggcctggaaaagttacaaactcatagatctatgtgtttctccgactgcgctattttctcctaactcttggtgtctttctgatgtagaataaatactgatttccttagtcctgtagcaagttaacaagcctgtaacgtgacagatctgtatcccaggggctgatcatagagaaaccacaaagcgatgttttagctgcgtcgagtcctcaacacgggggacttccagcctggtaccaggatagcctctctggcccagtgtgagcgaaggttcgagctgacttgccagtcccgtgctaagtctcactgaggcagggccttgctgccgcggaaaaacgtgtggacagaggaacgcgccggtcggatgtgggccacagtgagccgcggcgtggaaacggccgaaatgtgcgggcgcgttgtccatgtttggtcgtggagctgcccgcgggcgcgggaacagcgcgtcgggggcgggtgggcttgggtgtccgtggcggaggttaccccgggccccacgcgcccgctctctcccggccttggtctttgtccccgcgcccccgcaagggccgcccgccgcgccccgcagcccctgagcccccgtgcgcggaggcggggcctggccaaggggacagcgggcggcagacgcgcccctgcggctcccaggccgcccgggccgcgctccccgcggggaaagaggccgcaggcgcggggaggctcggccccgccccgccacgtccccctcccggcccgggccccgcggccgccgaggccgccccctcgcgggcggagcgggcgctgggctcgcgcggctgcggcggcggcggcgggcccggggttgccatggtaaccggcagcagcagccgccacagcagggccggccccagcgccagcgccggtcgcggtcgggctcagctcagtgtgtggtgagcggcggcggcgcggccgggccggggagcgggcgcggcccggcggcctcagcatggaggacggcttctccagctacagcagcctgtacgacacgtcctcgctgctccagttctgcaacggtgaggggcggccgcgcggggccggggcggcgagcggctggt

SEQ ID NO: 13048 - DNA, 2300 bp, Homo sapien
atccagttttttttcaggaacctgccacaaaatttataactgaccagtttgctgtgctactttgaacagtgggcttatagggtcctaggcccacattctatcctatggtacccctctttatgacagaatgatatagaagacaaatttataacacaaagcacaacagattttctacagcttaagattaccctcacaaatccttttttcccattaatcaaaactttacaggagataaatagtgatttttaccattcattcagccagtttgcagagagagagagagagaaaggccagaagtctgactggtaagaaattcttaccattttgctggcatgccaggcttctgggttccctttccctgaggcggccctagtgatccagctggctgcaccacagccctaggggccaagccacatcataaaggaaaattatctttttctgtcctggccagagcaaaatatgtgtgacaaaacatagatattagccattcagctcagcacccagcacccaaaatcaaactggcagggctcagacatgcccctggtcggccccatcgttgttaatccagcctccaaccaggagcttcaacttacggtctctgggcaagatggtggccctgagtaatagaaaacataagaaagggaaaaaggagagagagaaaagcattccctgtggcagggcggggaaggtgaagagctcagggaggccagagaaagacctgcccactgcagtgacactgaaaagttcaggtggctgcctgttgataacgaagggatctttcccagcagtcccgtcagctcttaaatttccccttttggggaggaaaaagttccccatgtcccatgatcttgtacatgcctaattctgtcacccttagccatcagcaaagagtgcaaggcagataaacccaaagatgataatagcagttaacgtcccatagtgccaagcctgttcttagctgaaaaggactttactgagagggacctctaaccccctaaatcttaggaaggactctaaccttcctaagttgggcctggaacccaaggtctgtctagcgtccttgccttttattaagaggggcctttaacccactctgtcttaggagagactcctaagttaggcctctaacccaatcccatcctttgcccaggtgtgtgccccccccttacccaaaatcagccattcggtgtgtacagatgatttttctttgcatcaggggtctccagtatcatccctttggggttcaccagaaagatgttaccagaccccaccacttactaaagttagcctttggattggaggtttcctcagtattgtcccttctgtggtctccagaaagatgtcactggaccccaccacttacccaaagtcagcgtttgggttgggggtttcctcagtgtcatcgcttcatggtcaccagaaagatgtgatcataaaggggtcccaatccagaccccaaaagagggttcttggatctcacgcaagaaagaattctaggcgattccataaagtgaaagcaagttttttaggaaagtaaaggaatagaagaatggctactccatagacagagcagccccgagggctgctggttgcctatttccatggttatttcttgatgatatactaagtgagggatggattattgatgcctcccctttttagagcatatagggtaacttcctgacgttgccatgacatgtataaactgtcatggtgctggtgggagtgtagcagtgaggacaaccagaggtcactcttgttgccatcttggttttggtgggatttagccagcttctttactgcaagctgttttatcagcaagatctttataacctgtgtcttgtgccaacctcctatctcattctgtgacctagaatgcctaaccatctgggaatgcagcccagtaggtctcagccttattttacccatcccccattcaagatggagttgctctgattcaaatgcctctgacaatcccaacgtggctggcgggcagcctggctgcaagcaggggtcggacagggccttgtcatcttccaggcttcctcaggacgtgctggttcagcagacccaccctacactctttcaaaccatttcaaccacttcagaaacccatattcacacacatgtgcacgtgttcacatgaaaagacccccttgcactcaggcccccagagccgaggcattgtgcagccccacagcagccaccttcacagctgctaacagcccctgtgccatgcctgctgcaggcactgtctgctctaggaggggctcttgttttcatggaacccagtggtgaag

SEQ ID NO: 13049 - DNA, 2300 bp, Homo sapien
acaacttgtcagacttcagggcagcagggaaaatacctgatctggagatcagagtgggccacatgctgaaagagcatcaataaaccaggctgcaaacaagcaggcctgtatcccaaggtctcagcacaggactttgataggcagtgaccaggggttaaccttgcctttccatagcacagctggaatgtccccaggtgacctgaggcttgtgcattttagtaaattttaggatgcaacaagactctcctgtagcaaagagaccactcttgaacttgtgaagagagggacaaatgaggttatgagagggtaccaccctcaggggctgctaccagggctgtaggagatcatggtaccctttcaggtttgacaactctgggcttaaacaaatacaggaaggaaagtggaggtgctacaaccaatcgctagggaactctaaatacctgtacacggtgagggaggtacaaggagacagggagagagagaagcacatagagacccaaactgcagcccatgacactgatgttcaaccccagcaaactagaacgcatgggcactgggattccgagtcagaaaaacgctgcttgagacttggctccaccatttactatatcttggacaaaactgcttaacacacacagcctctcctcaatcctggacaggaggaaaatagcgacccttcattgccctcctaactgccagacgctgacaaacgccttaaatgctcttgttcagaccgtttttcaaaaggtagctattaacgttctgtgacacggggaagggaggcaatagtgcccatactggtaatgcatgaggaactttgtcttcttttttttttttttttgagacagagtctcactctgtctcccaggctggaatgcaagatctcggctcgctgcaacccctgcctcctgggttcaagcgattctccttctgcagcctcccaagtagctgggattaaaagtgcgtgccaccacgccgggctaactttttgtatttagtaaagacagggtttcaccatgttggtcaggctggtctcgaacttctgacctcaggtgatccacccgcctcagcctcccaaagtgctgggattacaggcgtgaggcactacgccgggccggaactgtgtcttcttacacacggggagtgagaccctggaggatctggggtttccagccaccagtgagattcactaacctttaggaaagatggggatttaaaaaccagagacaacctggacgaactacttgacgctgtgtacggtaaatgtgatttttcacaggctgtggttctggggacccgtgtgggctcttgttgagctgggggagatacttcgaatactgatatcgccccaaagctgcaactctccggccccgccacggctccttatgtacaaagagagggaatcagtcgccggtgacctcgacggccctcggatcagggatgccccgagtccgagcgggcagggtgctcagcagggccaggtgatgggaatcatggggccatcgagcacggaccctggctcccccggtggcctctgtgagctctggggtcaggcggggactggaggagcgtccgcgccgggagggagcgcaccgcgccacgtgcccgcccggcgccccgcccccaccccggccacgcccctcgcgcttccctcaaagccccgcccctcagccccgccactctcgtccgccccgcccctcgcagcctcaagctcagcgctcccggaggcgcggacggtggggccccgcgccttttgtgtcgggctttgaccgccgcgcgcgctcattcacctcagcggccgcgggcggaggggcgcacgcgcgcgcagtcccctcggagggcggtggggcgaacagcaacgcgcgtaccctagctcttggctgctgtgctgagactagcccgcgcgcccgcgcgcctctccctcgaggactcggagccgcccgcgcactcgccaggggccgccgccccgagtctcaggcggacgcgcacgcgttcccgccgcccggaccccagccggctcgccccccgcccccccatcccccggcggcggcccccaggcacgcgcccgcgcacacgccggcccgggcacgcgcccgccaagatggcaggggccggggcccagctgtcagtcgccgccgccgcggcccttccccgcagctagcggccccgacgcccacccggagaagatgagcccccgctgccccccgcagcccagtcagacgcggagccgccgcgcccggggccggctcccccgctagcgcccgcgtcccgcgccccgccgccgccgccgccgccgccgg

SEQ ID NO: 13050 - DNA, 2300 bp, Homo sapien
aagtggacagaggggctatgagaaagcaatgcagtcagtgtccagaagctgagagaggtgagcaagagagacctatgtggaacttctgatgatgttgggcttctgacctcctatcatcttacaaaactctaagataataagtgtgtgttgttataagccactcagtttgtggtaatttgttacagcagccgcagaaaaccaatgctgcatggaaaaatgtacctaacaagagcttcaagaaatagtgacagaattaaagagggaaatccacagtcacagttgaagatttcaggacctttccctcagcagttgatagaataattagacaaaaacaaacaacagcaacaaaaagtaacaaggacgtagacgttctgaacaatactattaaccaccatgacctaattgacattctagaacactgcacccgaccagtttcagaatacacattctttccttgtgcatatgctacatccgccaaggtagactgcatgctgggccataacgcacattttgataaatgtgaaaggattgagatcataccaggaaaaacaaaggaagaagtcacaccaaatatgttctctggccccagtagaattaaattggaaataggtagcaacagatataggaaaacaccaaatatttcaaaatttaacgaagcacttatcaataatccatggataaaagaagaaatcactagagaaaattaaaaatattttgaaccaaaagaaaaaagaaaactgcaatacatccaaactgtggtttgcaactaaaacagtgcttaaagggaaatgtatatcattaaaagccttttaaaatgcatttttagcattcaaagtgcattcatctctccaattagaactgatacttcttttgtactgtactctgtacagctgtttttcactatatcaataatattttaatggatctattaaatatttgctaacattatcaacctcttcttttctaaaccataaaagtcctttaaggacaagtacagtcgttctcaattttttgtctgtgatttctaacacagtgcatgcttcttagtgagttctcagtagattttgaaagaaagattggactggatcttaccttcatgagaaccctgtggagataggcaaaataagtataaccccattttacagttgaggccacccacttaataaacaagtgacaaagccaagtttccagtattcctcaagtgttttcctttcaggctctaaattgctgacttaaatgtcatcattagagagagttgtctcctcggtagaagtacaaattttgttccagagtcaaatatgaagacttgatcagtggcctggcgcggtggctcacgcctgtaatctcagcactttgggaggccaaggcaggcggatcacctgaggtcgggagttcgtgaccagcctgaccaacatggagaaaccccgtctctactaaaaatacaaaattagctgggcatggtggcacatgcctataatcccagctactcaggaggctgaggcaggagaatcgcttgaacccaggaagctgtggtggcggtgagccaagatcgtgccattgcactccagcctgggtgacaggagtgtgaaactctgtctcaaaaaagaaaaaaagacttgatcagcttatagcctttatcatctagtcttctattctctggagagtcagtggggactcttccgagttcttgtagccttttcttaaggcctataggaagtcatctgtgctgagcctgcactttctataacagatggaaaactgaagctcagacatcttaagtggcattgacttagactatagagctagttagtggggggccagcaccatgacctggcccctacctccagcaggcttcacccacccttgcacccttgcaggaagcacttagaggcttgaggttgccagctgtggggggttgggcctgtgcagtgcctctcagccgcccacgctggtggggctctgcagtgttagcttcttgtttctctattttctacctaggtttcagtttttcacttgggtttgtttcccctttgtctctggttcagcttccttttcctgtttggttttaagtaggctataaaaatcaagttgctgtcttcagagggtctgtggtcctctgatcaacataggctggtgggagtacaggactcgcctcctcagggttccctgtgctgccacttttcagccatggccacaaggtgagtattggaaccagtgcaggggacagagggatgtcaagaggaaacctagaatcttaacggtgaatgggctgtagaaattatctcaggtccccttagtat

SEQ ID NO: 13051 - DNA, 2300 bp, Homo sapien
caacagctggacatggggtgtggtcactagccagggctgcaccctacagttcaaccagtcctagcactggcgctgagccctacccctttcctccagcccagagtccttcctctgcggccggcacacagaatcagtttccccacagacatactgaccatatttcccaagccaaaagctggcatgacaacatgatagaatatttggaactgagattgcccaaaaaggcagaggcagccagccacatagtatctggaggtacatgtggcctgaattggaaggcctctagaacctgcgtcaagaatgtctccatcgccaccacaaattgaagggaaaccacccttatcacagagcaggaggcattgaaactggccttgcagagctgaacaggtggtgagagcagagcagtgcaggtggacagagatgaggaagtcttagcagtcagctggggtttgtccaaggcttgtggtcagccaggccgtgtgctggggacagtccctgcctgcaaagagcaccgtgtgaacaaggccactgtggtcctgaggggtgctctggacagggtgcagggccacatggtggaagggacagggtgctttgcggagtggggtggggcaagcctctgtcgggagctggcattttcgttgacccggacgaggaggagtctgctctgcggagatcatggggacagcctcccaagctgaaggaagggtaagtgccagggccctgagcctgcagccacccgccaagctcccccgcacctccacctggaagcagacaggccatggggcaggggaacgggaagggtgaggaagagggtgtgggggagcgcggagttagaagtttgcattgtgttcatgcgcagggcccagtcatggaacttgaggcacagggtgccatggtggaggctgggaaggggaaggcaaccagagtgggcaaaacgagggccctggagcagacacggcagcaaggggagcctgcagcgctcccagcggactccgccacgtcctgctggtggagcaaaggcgggctgccatgttgtgagtggccaagggtcgctcactgggcaggaacattgtcaaggccattcatgcttggaatagggtctctcttcagctctgaggcaaatctgttctctaattttcagatgacttcaaggggaacgtgtaccaccacccctctggtgcgtcacattgcttaggaagcctgctgtgtttatcactgggtggctgtcagggctgagatggagagggccagggcctggcgaggtggagcagtcggcccaggtgtcccagcaattgttgctggaacagggtctggaacccacaggagaggcctgaaggacccagggccctctggctggatgcgtttgcctatcaggacccagaattacttacagacctgtttagggctaggcttggcctctttcttgagctcatctggaggggtgtggcaacactcattcttcatccttattctccctggctgtgggcaacactggtcctcagtgtcaccagatggtcctcctctgtgcccatgacccctcagcagccaaggctggccctgccagataaatgtgtgtgcccatgatcacacccaggggcacaggccacatacgtttccctgaaaccttgggctccagcctccatcccgtccatgtgggagggaacttgggtcccagcagtgtgtctttcagcaccaagtcatgtttaaaagaccagagagacaagcattttgccaagatcttccagggaagatgcatgtgtgacacattaacattcaaatcaggccagcgcggtgctcatgcctgtcatcccagcactttgggaggccgaggcgggaggatcacttgagcccaggacttggagaccagtctgggcaacacagtgagaccccatctctacaaaaagttaaaaaagaaaaaaaaaagggcacatgtctgtagtcccagctactcgggaggctcacttgagcctgggaggttgaggctgcagtgaggcatgatacgcctctgtactccagcctggttgacagagtgagaccctgtctcaaataagtaaaaataaaattcaaatcggttaccttagtttggaaacttttcaaagaagtagtccacgagaactaccttgaaagagcaaaaccagccaggtgcaggggctcacgcccataatcccagcactctgggaggcccaggtgggtggatctcgtgaggtcaggagttcaagaccagcttggccaacatggtgaaaccccatctctgctgaaaatacaaaagttagctgaaaatacaaaagtggcacatgcct

SEQ ID NO: 13052 - DNA, 2300 bp, Homo sapien
cacatatatgccacacccagtttcctttattttaatatcttataatatggtgcatttgttgcctttgatggaccaatattgatacactatgattaactatggtccagctttactaggctttccttagctttacctaatgtcctttttctgctccaggatcccattcaagacaccacattacaaacgaaaatgtattttctgtcatttctgggacaacggacagggtggggacgcaacagtatgtgctcctggctcgtcaacaccgtgaagctgggtttctggctccccagggacttggggagcacttggcaagggcatcagacttgatttcatgcatcctgggtgtctgttccactcccaggtcttcttcagcatgtcctctgacttgtcccctctctggcctcagtttcctcatctggaaaatgagggccttggtgagtttcctctggataggcggtggcctggggcagagggaactggcaggcttggtgttgtcctgagggtggagctggggctcagggcggcagatctcacggagttcaacacaggggcgaaggctctgattttggaagctttttaattcaaaggtcaggggccaaagtcatgccccagccttgctgttaattcctctgtgcctcaggcaaggcgctcctcatctctgggcctcagtctcctgatctgtaaagtgatggctggtgggatgacttctgaggacccttctggctgggaacagagcaggctgccctgggagcaatgagtcttctcccaagggtgcaagctgggccgggaggcctcctgggtgtggcaaggggtgatggccatggtggcatgtgggtccccctgctgatggaaaatctggcctctgtgtccacctttcccatggctaattcaggggatggtggctggcggctgcaggacacccatgccttccttcctggctcactcaggactgcctttggccctgagctaaggaaggcctgccaagtgtaccaaaccccgggccatggacttccatgggacgcacagaagcacgccctcactatgtgcgagcctgtggcagcgctggctgatgtgtcagtcagctcccaggcaactgccagccgaggccaggctctggcccacaggcacagcaggtccaccctccaaaactccaagggagtgggagaaggaacagaggcatcactgagagggtgaagatgaggggccctgtgcccttacctccccaaaactagactttccatttgagaacattcaggttctgccttgtttccaagcgtttgcatctgctgttccccctagcaccaatgcctttcccttttctagctgttgaactcctacccacccctcaaggcccaatgcaaaagttccttctattggatcctagctgcttcagggcctacctgtgtcatggcacgtatcaccctgaatcataacagccacttctgtacctgtgtccccatccagaactcaagttccctgaaggcaggagtgggtctgactcatccctgtgaggttgctgcagacgcattatctcccctttgcattattggtgaaagggccgggtggaggaagggaggattgctgcaccaacctttcctcggcgcctgtttactggcaccgtcgcatccattccacgccgatcctccgcagtccccctatcctgccagccgctcctccttggggcaggggcggcgcgagccacaggggcgtgcccgcgagcgggtcggggctgcggagagaacgggccggggtaaaaacccgacggctgcccgcgggtgggcggggcgcgcagagccggtgggaggccgcggtggcagcagtcgcccccgcgcatcgagggacccagggactcgcgcagatggcacgcggccacctcggtcctgccggggagccccatttccaaccgaggcaactgaggttcccaaagcgccagctacccgccggggtctggagagcgccggggcccggccgccccgcccagccagaggtgccccgccccaagcctggcgcacctggccccgccccgccgggaccccgcccccgccctaatcagagctggttccgcgccgcggccgccgcgacaggtgcagcagagccgagccggccgcgctccgaacggcgcctcccgccccaccatgggcaacagcgcgagccgcagcgacttcgagtgggtctacaccgaccagccgcacacgcagcggcgcaaggagatactgggtgagcgccgcgcggggcccaccccggtggggaccgccccgttggcccgtctggagtcgcgtcgtggggtcgagcccagacgg

SEQ ID NO: 13053 - DNA, 2300 bp, Homo sapien
agaatcccatgattctgaaactgcaatttgacctgtccttttaaaataatttttacctttagcaagtgcaagcaagcgagagccacacgacacattatctttgcatgtctagtcataagatactccaccgttaaacagtagaaaacaagaatatctcccactagaaaaacttaaggcctaacaggtcacctcctatggggcaagtttaaaaagctattttctggagcaggtactaggatggccttcaggagcattttagtgctttctgacctactacctttcctcaaagctttcaatccttttgggctttctccacttgaatgtgaacacctacagatctacagctcagaaaccaggatgcttaatgggtaattccctcatttctcttgctctcacaattggtgtttatggggaagtatcaactacttgcagtgccatttccccatcaattactagagagtggggaaagtgaaatttaaaaagcattaagacatgtaaaagttctcccacaactggtttccattcatgaaatatttatgcagagtttataagctataaagccagagatgacttaattcaacagatttgacttttccaaactgagtgggtgcagtactccaaggggaattattcaggtttcaaagctcagattcaaagagaaaacgatctaatttgtcactccttacactaatattctcaaaagtcaagtccaatgcgatttagcaataagaagggactaggatttataaagttgccttttaatgagaatgtatagtctacttgttttaacaagttgagcctaagattaatgtattgcgtacagttcagaaaatcatgggcctcaactgcatgaacactattacaaaacagtaaatgttgataatatttaagttgaacaaattcacagaggcgttaaatcggccaaacgagtacaacaaagacacacctttccaactcttcaatttgtcatagtttccttaaaaatcaggaaatctttgttttgctttaaggcaaattgtcaggtcgaccaaaaggacagataagagcagaaacacttcgctgcaatgtaactcattcaggaaggtttaacttgccgctaatccgtgccacaaaaaaaaatctaggctctgttgcaggtacaatggaggacacggctgaaaaaatttggaattttaaatgagacaaatgcaaaacctggtgggcgtaaaaaggagcacctatgaaagtgacaaatagggggaaagggtgggcaagggaaacaatggctgactggagagcaaagaaggggaagctcaggagaaaattttagaaagccgccaggaccctgtagttctaagatctacggggaaacaggcacccaacggctgcgtctcaggtttccgcgggtcactaaagaataacggacatcctcccaacggtggccctggggctccgcgggcgcttccgccgagctcgcgccgaccccgcgctcggccccgcaccccgccgggcgctcgcggcgagataccggacgctgcccgcgtcgcccgattttgtccgttcggtcctccacactcaccccgcggccatcgctcgcccgaagccaggcgacaagaacaaacacctcccgacgcgaaaaaggaagcacaggcgattctcgtcaaagcagactttattggggcgacagggccgccccgcacgcgccagccgctccccgcgcggcccccgggccgcccacccgcctcaaccccgctcccggccggcccctccctcccttctcctcaggctcccgcccccgtggtgcccggggccgcgcggaccgctcaccggctcccaaggcagcggctgtagcggcgacgccccgttcccgagtgcggccccggcccgaggcggcgggttttgtggctgttgcaccgcgaagggcggcagccgcgcgacaccgggaagcgggaggcggtggcggcggcggcggcgcgctgacgtcacgcgccgcgggccagccagggcgcgtgcgagccgccccgcccccggtcccatcggccccaatccgggaggagcccggcgagtgggcggggccgcggaggccagcggacagatcgattggccgagaggagaatcgagagggcgaacgggcgagtggcagcgaggcggggcgggctgaggccagcgcggaagtctcgcgaggccgggcccgagcagagtgtggcggcggcggcgagatctgggctcgggttgaggagttggtatttgtgtggaaggaggcggaggcgcaggaggaagggggaagcggagcgccggcccggagggcgggaggaggcgcg

SEQ ID NO: 13054 - DNA, 2300 bp, Homo sapien
ctcaatttctacttcattcattacaggattgaagtaatttatttttggtagttaatagtataattactaactgataaagtttctagagtgtaagtataggtaatactttagcccataaataagtgaaagaactagcagtgcagctagtaaatctaacgtggttcttttttgacaactgacaccagaacccttaatcatttgtattttactgttggaaatgtttacagcagcactaggactctagcctgcatttaggaagacttgccattttgccaagtgttttaaacagttcgtgagggctctccttgggttttcggggttgtccaacctgcctgctgattctagactatatccacaaagttcacccagggcaggaatgaaaagtgtttggtaaaataaataggctgttctctagcaaagcagtgagctcctgactcccagggtctggtcagagttgctgagtgggttgatctctggtctttccttgacagtgcacgttcgaaggctgtgggaaacgcttttcactggacttcaatttgcgcacacatgtgcgaatccataccggagacaggccctatgtgtgccccttcgatggttgtaataagaagtttgctcagtcaactaacctgaaatctcacatcttaacacatgctaaggccaaaaacaaccagtgaaaagaagagagaagacccttctcgaccacgggaagcatcttccagaagtgtgattgggaataaatatgcctctcctttgtatattatttctaggaagaattttaaaaatgaatcctacacacctaagggacatgttttgataaagtagtaaaaattaaaaaaaaaaaactttactaagatgacattgctaagatgctctatcttgctctgtaatctcgtttcaaaaacacagtgtttttgtaaagtgtggtcccaacaggaggacaattcatgaacttcgcatcaaaagacaattctttatacaacagtgctaaaaatgggacttcttttcacattcttataaatatgaagctcacctgttgcttacaatttttttaattttgtattttccaagtgtgcatattgtacacttttttggggatatgcttagtaatgctacgtgtgatttttctggaggttgataactttgcttgcagtagattttctttaaaagaatgggcagttacatgcatacttcaaaagtattttcctgtaaaaaaaaaaaagttatataggttttgtttgctatcttaattttggttgtattctttgatgttaacacattttgtataattgtatcgtatagctgtattgaatcatgtagtatcaaatattagatgtgatttaatagtgttaatcaatttaaacccattttagtcactttttttttccaaaaaaatactgccagatgctgatgttcagtgtaatttctttgcctgttcagttacagaaagtggtgctcagttgtagaatgtattgtaccttttaacacctgatgtgtacatcccatgtaacagaaagggcaacaataaaatagcaatcctaaagcaagaatatggcagaacaagatctgtaagcacagtcttattttcttttgttgtccagaatacttataattcttgagcctcccagaaattggaagctaaataaagcaactcaagtttcctttattttgcactcaattacagtgattattgatgaaagcgatgcatggatattttaatacttcctacatgtcctgacttctgaaagagagtaggtaacaggcatcccgagttcaggaactacctcagaacaccccaggccaggttggtcataggctgtgattttagcccccggcaagtgtgagtgaagcatctgtaccaccgcgcaggctgagcgcctgcgcagggtaaggtgccacctggcagtggggcacacagagggaagaccaggcctgtccatcagccggctgccttcagaggcagctccagcaggaccttggcttgtctgacaggaaatgcttgtggtcgttggttatttggtttgagagcccttgttcctccatctagtggagtccttattaaatgctagcaatgtggcaattgagtgccagtagcttaatttcatgtttctaaatggacactgggtgcaaatcggcaaggtgattagattattagaaaattctgctcaatgagtacctctcacattgtaacctcttaaatgtacgattataatgttggatcttaggtcaaataacagacttgagaatactttataaactgccatgatacagcaaaatctcatttattcaaagtgcaaacatac

SEQ ID NO: 13055 - DNA, 2300 bp, Homo sapien
tagtggagttgagagggggagcatactatttgtataaagaactgtcaccccagagtgacatttattttccaagatgaccctgaactcatgctgttggtttcatatggtgtttgtgtgctttgcctagattcaaggcctgaggatttgaggaaaatcgggattttttttttcctatttggttttcatgtaaaagttctaaatgtcacttattttgctaaataagaccctttcacaggatagtgtgcgcaatacctgtccgtgtttccaagcagagttcaagttcatgtcttcacaagtagatgagagtcacttccagtcgggggaagcccgcctgagcagtgttttgagagtgcgtacattggaggactgccccacgtccgtttgcactctgccttgcaaaacttactgtggagacgtgtcccagactggtctcagaccagagtttgtggcacaggaaaacctggccccctaaaaagaagttttggaattggaagcctgataatttcgggaggctgaggcaggagaacggcgtgaacccgggaggcggagcttgcagtgagccgagatcgcaccactgcactccagcctgggtgacagagcaagactccgtctcccaaaaaaaaaaaaaaaaaaaaaaaaaaggaaacctgacaattctacccacctccccccacccccgactataggcaaagagagttgatcacttccagggtctctgacttctgtgacctggaaatcagcctggcttgggaaattcatgttgttgatctttaattatttaattattctttaataatccttctattttcttgacatctgacccccagcaagagtaaggatcccagaggtcaaaacagtggtgagagccaagctgctcacagacacccacttgatgccacagccatgccatgaggcttcctcccagctgctctgctggcttgctgaagccagctctgagtcacagggttgccttggaccctcggctgtagggggcacctgtctggctccgggccctttgtcctggatacactgacagtaatgtgagcgcagcacttcagagttcaggcccagcaggtcctggcaagtgcattccacccgaacttttaacccaagcggtggggaaggaagccaaaactccaagctgcactttcttggggttctggccatgcacttcttagccttctctctgactttacaggacaaaaggtaccccacgccttcagaatcatgcttacctgcacggcagcatctgactggatggctggctaggtctcatccaccccaaattactgacccttgatttatgttgttactgctcaggttatgctcagatgccctggttgcctgaagatggtttaagtgcaggcccttcagacaagtcacgtcaggcaagagagggctggcctctgacccacaagagggcagatttgtggccaagaggcttcctggcatccacccccaggcccaagggatcagtgtggtgccagagaggatctttaagctgggactgtactgaggcttgatgggaagtatgggcagcatgtacttgacacgttatcacccagtccccttgtaaaatctggaatggagcgtttaagctgagcgttagcatcaggtcagcaggcaaagcaaacctcccacaaactgggtgccgtaaggtgggaggtgacacatggagagcttcgtcctggccgagcaggcacccagccccatgtcccccgccagcattctggatgtcagaggagggtgcgtgtgatggcgtcacattcatctgaagcacactgattgattttccacaaggtggcaagtttgatcaaattgaccgcttttcatgagacacccagatgctgtaaaaaaaaaaaacagcactgggatgtgttgaggagggggcagtttgctgtgctctgttctgtctgctgctctctctgggggccgcacaatgtccgcacacatcacggaggggagaaaggcatcagtaccaaacggaacaacctcttttttctacattgtccatacccggacatgtgaggctctattatcaacaggtggtgagaaaaattatgtttttattcgctttctggtaacttctgtaggccctggctcaaggacttagcatttcgtctcatgtacatctttttcttaagtgttctttgccatttctggaattgtccttggtttttccttagctcataggtcatagatgcagaaatatagtatttaaggcatccgcatccagcatcagatggctttgcatccagaaaaacattgataactcagtttgaagcaccaagcatgtgtaa

SEQ ID NO: 13056 - DNA, 2300 bp, Homo sapien
actacaggcacacaccaccatgcctagctcatgttttttttgaagttattagtagagatggggtcttgatatgttgcccagctggtctcaaactactgggctcaagtgatcctcctgccttggcctcccaaagtgctgggatgacaggcctggcccactgtcctcacttccaacaccacgggtcccttttgcctggttgaatataattgcagctgtaccctaggatcatcaggggccacccgagtctgtgtcagtccgtactgtcacatggccacagactatctcatggctgggacagtcacagtttattcccccaggcccttgggactgaaagaatccaagatctggatctcctctatagcgcccagaaccacagccaccgtcctgaagcacacggccttcacacgtttctacacgaagggagttttctgtcctgcttccttggacacagcaataatcagggagcagttgtcttgacctatgatgagggggtgaccggccatccctgggcatgggatggggagtgtgggtgggggctggctgtgggggctccgcgcctggatgtgatgttgaaattttgtgttgctttaaccgcctttactttctgagctaggggctgtctccatccatagcaaaagtgtaactttgttgtagatgggcgtaagcctcaccctggagagcgctagtaagtacagaccaggtgaaccagatcccagcctggaccccaccctgtcatgcccatctccccaaccccagagttccctccgtagcaggggacagggagggtgtgaggcaagcttgggctcagcacaggtcctggggtgggggctcgggctggccaaaaaaaatcagccccctctggattgggggtcctcatgtgggggtctctcggccctatggggagctgggagcttcctaaacttgtgtccaaatgactagtttcccaggggtgggtccgttcccatcaatcctcaaaggagagcctggcaccccaagattttaagagcctgagctataaatgacaagacttgggacactgggccacagttcctctcccagagagcaagggctcgtcacagactgaggggtactgaggggtcagaaacaaagtggggagaggcctctgcccacattggtgggagaagctgagttgacctaagcctgacattccccagccggctggacttgggcattcaccagtgtctgtgatctgcaaagacttcacaacactacccaggtggcactgagtatccaacctgggaagggacagctccatgtcacatcagttctactcacacagccctcttagtgccagtgttggggctgcaggaggaacagagatccccccagaggccccagaacattgaagggagagcagcaaacctcgcatcaaggtgttggccaagaactgggcctccagggtgggagggtgcttcgggccaatcttgaagcattggcttccagctgttgaggtcctgggggtactgagatggtacttgtttcctaacaaaacattttttataagtgcattcaccaatagagggcccacctattctggtggagagaattggaaaaggttccagaatccgggcagaagcctggctgttcccggtgagggctctcccttgctagcactccctcccaccctcactctgagcaacacagctgctcatgtccctggagaggacagctttggccaagttgttaaacatctctgagcctgtcttcccatcttggaaatgggggcagttgtcccaatgccgagataattgagtgtgaagccctcccctgtcccatgctgcctagtaccgaaggcacttgctctgtggccctggctgtaagaatgatcatttctgagtcagacctagggaaccagcccctgagaatgtgacttgacctagtttactcccaccgcccgctctgcaactctgagcctcctattgagcaaagataagctcataggcaacaaagagcactttgacatggaagaggttctgggccactgggctcggaggcagcggggcctgaccagcgccccaggccccagagctgctgacgtgggtccccaaggaggttgttggctgttctcttgccaccactctattaactcataactgctgttctcacgagaggctactggcagagaccaggcaggagctcctggagccaaggtcattgcttttatttttatttatttatttattgagatggaatgttcctttctcgcccaggctggagtgcagtggcatgacctcactgcatcctctgcctcacgggttcaagcaattctcccacctcag

SEQ ID NO: 13057 - DNA, 2300 bp, Homo sapien
cacatcctgccgattttttttttttttagagatggggcctcactatgttgcccaggctggcctcaaactcctggcttcaagcgatcctcctgcctcagcctcccaaagtgcctggattacaggcatgagccactgaacccagcctcaaggaggtttctgaagctcaactatggaatacctactgtttaccaggctactaggccccttcccaaggaccccagggactgacagctcagtgcaacctgccccaagcataattttcaaggcatgtgcattctctcaataacaaagcaaaacaggtcatgcttgtctccttatccgtttccatcattttctcactactgccacatgctgtcaaggtactggatttccctcccaaacctcctcaaccaggaatggatgtgcagggatttgtgctttacctcatgagccctccagcatcccaaggacatcctgttcctaaggtaagtgactacatgtaggtagtccagtgtaatcactgtgtctgcaggaggcctccagccacctgagtagccccacagccagctcctgcccttttgggtctgggcttctcttggggcccccataccactgcttttctggcccatgggccactctcccccatccgcacacctgcctccctgaggcaaccaagtgggtcagagaggctgtcgatattcaaacccaggcctccagacccctcgttcagggcccaccagccatcacgagccctggactaggagtcagcagacctagggtttgggtctctgcttaacattctacttagactctaaaaggaaactaacatgagcactggggacccctgcccctagcaccaggctgcactactgacaacacctacctgtgtgtcctagtaccaaatacacagaacctttcgacctgcacctccaggaggtaggtacccactggaatttggataaaagaaccatgtgaccctaaacctggaaacgtggcacacggtgtggccttgcctgcctgcaggccctaaagaaggaagctgggcccggcctaaggctgatctgactcctacagcgaagagaaagcgcctggcccgtccctgctcccaggctccaacctgacagtctggacctccagaggcgctggggaagggctggtgggaagtcaccgaatgggacgctccacagggaccagggcagtcccttgccactgcgaatgtcagggactcctggggggccgagtcagactcggctctcattcatccccgcagcccatggataccctggtgacccagagccaagcaccctccgacttcagcgcctgagcgcggcccctaccgagcccctccggtctcgccccgtccggccgccgctgacggaggcgctgcgatctggcccgactccactctgcagcccagtccaggaacctccctctctccacaaccttccgcggctcccgcgacccgcagtcctcgggaaggagctgtggcccgaaggcctgctgcgccctttgcccatggcccctttcccttttaaggttccctgctctccgcccaaatcccagcctcaggctccgcaggaagcgcccgtgcgcgtccgacccccagaacccggcgggttcggccaggagtccggaagccccggaggccaccgccgccgcgggcgcgcaggcgggacgggcagaggctccccacgggcgattcccgctcgcggagtttcgcaactagcggcgtcccagtctgcgggcctcggaacgtcccggcgctccacggccgttttcgcggcagggtccgcacggcacagactagggcgctgaggttctgcggcggcgccggactccgaacccagggtccggttcccgacccggtccagaccagagccaccccgcgtactccgggtgggggagtcctcggctcaaccccgccaccccgcgcgtcccctcccgccggacctgcgcacccagcgcgctctttgtctgaggcgtccccgcgccccgcccgcgcgcccaccacgtcccccgcgccccgcctcccgcgcacgcccggccaatgaggcgcggcggcgaagcgcagtgcccggggtgttgtccgcgccgtgcccgcccattggcctcactcggcgcccccacccgggccctgccggcaggcacgaggggcggggcgcgcggcccgaggtgagggaccgcgggccggaggggatccagcgagtcagctgccgccgagggaccagcgcgggtctagctgctgccgccatccccaccatccctgaccgcgcctgcccgggctccgcgccaggaggagcggccaggcccagccccggcac

SEQ ID NO: 13058 - DNA, 2300 bp, Homo sapien
tcgacaggcagccttggtttcatgagtagagggcatgggcggggcgggctgcggtccacgggatgatgacgcggctgaggccgtgcagatggacagtggtgaagggagctgaacgtgaatttaagaggttgacacacaggactggggactctggatgtggggtggagagagagaggtgtccagggcaattcctgggcttctggctcaggtgctatgggtgggtggcacttgctgcattggatgctctacaggaaacatggatctgaatggtccctgttctttcagttagacacagtgcttcaaactccctcagcacccaaggtactggcttcttgagtgcagcatcagcaatcaaacccaagtctcagctgtatttgccctgcccagaacaggccagccacctccttccttccagactctatgcttctgttaatgcagcattagcatttagctggccactctcacagggacacgcccggactttgccctgcgtggtcgcagatatgaggcaggtactctcttcatttcatggatgcagaagctgaggcacagagtggtcaaggggctggcccacggtctcagctgtgagtggcagagctgggctttaaaggcaggcagccagcttctaaccagatgctaagcttcatccccttgagggccaggactagcattgggactggccttggatgggccacttcccgccctttgccctctgccgtggcagctggcactgctcatcctgtgtctcccacttgcctataaatagccgggctggcaggggggctgtccctccatcagctctcagcctgctcaaggccagcctgcaggtccagccattagaggacaggaaaacaggtagacaaagagcctcctggccttgccacctgtcccgagggctgcccagatgggctgcctgggcctcatgcatcaacacctgcccctcccctatcctgctggcattccagtctgtggggcactcacttagattctgttgctcagcagctgtgtggccgaggtacctgcacagcctccctgagccttggtgtctcacgtggagatctcacaaggatgcagtgcaggtcacatggggcatgcactgagtccccttgagagccctctggggcctccccaggcgggcctggatatcccagagggtgggttgtatgagagcatctggggatcacatccagccctgccgccctcgtggccttggacaagccccctttctgggcctcaatggccccatctgtgaaatggggagcactaacgctgcgctgtctccctcctggggcggtgaggaggatcctagagcctgagagtgaggggagcttggtgaactgtaaggtggggtgcacgggcaaggaggtccctgtttttacagtgcccagcagacagaagtagcgtcttagtggagaggtttccccttcaggagggccccagccgctggttcagaggctgaatcggcagcctctgtccctggttcatgtgggcagggggacttggtggaggcagccttggccttcgcctctgggtccagggagacacattcccatggagcagagagcagggaaccggggcagcgggaagggtgagagcagatggtgggtgctgttcctgggttcaggcctgtccttgccaccccctccctccctgccaactggagctccttgaggacagggactggctctcatttgcctgggtgtagcatcagcaaagtaagtgttttttgagtgagtaagagagggagctttgcaggtttcccaggcaggggtcctgagcaaatccaggggagtcgggaaagcccaggggacacagtgaaggcctgggcttggacctggagggcgagagctgtcacagccccatctctggaccttcccaggaggtgtttggatgtgatggggcagtgcccctgctctctggtgcctgtcacctcccgtgctctctcctgtgttttcctgacacctgggtcccgagggcactgggacaagggtcccgggggcagggagggagtccagctgtgtgccgcgtggcctcagcaggctctgcttccggtcccctcccctgccgcaggtatttaaggtctgagaggggccagctgggagctgttgaggccaccctggtggcaccaaagccctctcaggcaggcagacccagggcctccccgccacaccttgttcatggattttgtcgctggagccatcggaggtaacagacaggatggtgggctgtgcagacactgctgctcctgggggtagcaggaggaactgaggtccaggaaggtgctgggcagcagggtgggc

SEQ ID NO: 13059 - DNA, 2300 bp, Homo sapien
tttgtttctaggaatttgtctatttcatcaaggttatctaatgtattggtatacagttattcatagtattcccttatgtagtaatcctttttattcctataaggtcagtagtaataccccttcttatattcctgattttggccgtttgagtcttctcttttattccacacccccccccacacacacacacacacccagtcactttggttcaaagtttactaattttgttggtttgtagtcagcattttttatcttagcatggcatggttcttctcactgcctttgtgacttatttattaactgcagtatagtaatactgtagcctcttggcttaggaaagcataggacctgagtcatttgcccattctcaaatttcaaactgcccctctgtctaattttgtcatctgtaaaattggggattaaatgagatctactatgcacagtcaagcttcaagtggtgggcaggtaactgggttcccttagtagctgaatgagtctctgctggaatccatcctcataaaacatgatctcaaaattggaacccagtaaatttctgcacgcttgtcaggagcacctcaccccaggaccgagcacacagtgagttctcagatgctccacataaacacaagaaaagcagctcgtggcacagttacatttttttctcttctgtaagcccatatggttagttgtgagaaccaaagaaggattctttccttccaaaattatgggttattttctttccttatttcaaaagcagtatgtgagcatttcatggggaaaaaaaatgaaaactaagcccaaaaaccagaacacccacaattgtatctgtccagagataagcaatgttgacccttggcttggggaatataaggagaagtcactttcagaatactgttctctagattctcctatccagacctctggaaaaggtagttattcctcttgtatttggggacactttacccagaaacaaaggacattcatcctcgagcgttggtttcccaccctgctgaacattggaactcctcacggagctttttaaaaatacaaattcccggccaggcgcagtggctcacacctgtaatcccagcactttgggaggccgaggcaggcaaatcacgaggtcaggagtttgagaccagcctggccaacatggtgaaaccccgtctctattaaaaacacaaaaaattagctgggcatagtggcaggtgcctactatgcccagctactcgggaggctgaggcaggagaatcgcttgaacccaggaggcagaggttgcagtgagcagagatcacaccactgcactccagcctgggtgacagagtgagactctgtctcaaaaataaataaataaacaaacaaacaaacacattcccagagagcacctcagatccattgaatcagtctctggaggtggggcgcaggcagctgtgattggaagcagcctggtagggagggggatgactcttgagtgacttgcagatgaagatacctagtcccaagctggctgaggggcccagatagatctccaactgggcacttgacctctgaactcccagaggacaattcttactttccctgctaagccaggactgtctggtcccatgcagtttgcctggtattggtctgagagtcctcggggctgggtgattctgagcaaggatcatatggtgttggcctggtatccccagggaagtgtaccaagctcacagtatgtcggcactgatgtttggagggattccaggagtcccagtaactgcatagctggatccatcttttaaacacattattccaaacctacacatcttgtcttttaaaacactcacaggagaaaccatttcagtagaagtttcctgtctatatttatatcataagcaccaaaggtaacaaattctagttattatccatgttgtttcgtctctgtctatattttccatttccaaaagtgcattagtgccttgatatttttctcagaaaatcacactcttcctcttctcctttttcctttagagatatgaatcaggttcttgatgcctatgaaaataagaagccattttatctgtacacgggccggggcccctcttctgaagcaatgcatgtaggtcacctcattccatttattttcacaaagtaagtattggatcttatggcttttcttactctcttagtgaattgagaatgttgcttataaaccatgtttagaactgacaagatcatgctagttcatttgctgagcaaccaagatgtcaagagttggcacttttttggcttccattcactttgttcctgggctcacttta
